(19) United States
(12) Patent Application Publication
(10) Pub. No.: US 2015/0315605 A1
(43) Pub. Date: Nov. 5, 2015

(54) NOVEL TRANSCRIPTS AND USES THEREOF FOR IMPROVEMENT OF AGRONOMIC CHARACTERISTICS IN CROP PLANTS

(71) Applicant: E I DU PONT DE NEMOURS AND COMPANY, Wilmington, DE (US)

(72) Inventors: Bailin LI, Hockessin, DE (US); Shawn THATCHER, Newark, DE (US)

(21) Appl. No.: 14/628,469

(22) Filed: Feb. 23, 2015

Related U.S. Application Data
(60) Provisional application No. 61/942,846, filed on Feb. 21, 2014.

(51) Int. Cl. C12N 15/82

(52) U.S. Cl. CPC C12N 15/8261; C12N 15/8271; C12N 15/8273

(57) ABSTRACT

Computational analysis of hundreds of RNA-seq libraries enabled the identification of novel transcripts in maize. The novel transcripts are provided herein, as are recombinant DNA constructs comprising such, transgenic plants or cell thereof comprising the recombinant DNA constructs, and methods for generating transgenic seed and plants with improved agronomic characteristics.

### CROSS REFERENCE TO RELATED APPLICATIONS

[0001] This application claims the benefit of U.S. Provisional Application No. 61/942,846, filed Feb. 21, 2014, the entire content of which is herein incorporated by reference.

### INCORPORATION OF SEQUENCE LISTING

[0002] Two copies (“Copy 1” and “Copy 2”) of the sequence listing and a computer-readable form of the sequence listing, all on CD-ROMs, each containing the file named BB2384USNP_SequenceListing_ST25.txt, which is 201,270 kilobytes (measured in MS-DOS) and was created on Feb. 6, 2015, are herein incorporated by reference.

### FIELD

[0003] The field relates to plant breeding and genetics and, in particular, to recombinant DNA constructs useful for production of transgenic plants with improved agronomic characteristics.

### BACKGROUND

[0004] The ability to develop transgenic plants with improved agronomic characteristics depends in part on the identification of genes that are useful for production of transformed plants for expression of novel polypeptides.

### SUMMARY

[0005] Novel polynucleotides identified in maize and the polypeptides encoded by such are provided herein. The polynucleotide sequences are represented by SEQ ID NOs:1-44,180. Novel polypeptides encoded by polynucleotides disclosed herein are represented by SEQ ID NOs:44,181-72,254. The polynucleotides are useful for improvement of one or more agronomic characteristics in crop plants.

[0006] Recombinant DNA constructs comprising the polynucleotides disclosed herein are also provided. A recombinant DNA construct may comprise a polynucleotide operably linked to at least one regulatory sequence wherein said polynucleotide comprises (a) a nucleic acid sequence of at least 70% sequence identity, based on the Clustal V method of alignment, when compared to any of SEQ ID NOs:1-44,180; (b) a nucleic acid sequence encoding an amino acid sequence of at least 70% sequence identity, based on the Clustal V method of alignment, when compared to any of SEQ ID NOs:44,181-72,254; or (c) a nucleic acid sequence that is transcribed into an RNA molecule that suppresses the level of an endogenous polypeptide having an amino acid sequence of at least 70% sequence identity, based on the Clustal V method of alignment, when compared to any of SEQ ID NOs:44,181-72,254. The regulatory sequence may be a promoter functional in a plant cell.

[0007] Such constructs are useful for production of transgenic plants having one or more improved agronomic characteristics as the result of increased or decreased expression of a polypeptide disclosed herein.

[0008] Methods for producing a transgenic plant with an improved agronomic characteristic are provided in which a plant cell is transformed with a recombinant DNA construct disclosed herein and a plant is regenerated from the transformed plant cell. The agronomic characteristic may be abiotic stress tolerance, such as for example, tolerance to nitrogen deficiency or drought.

[0009] Methods for introducing any of the polynucleotides disclosed herein into a target site in the genome of a plant cell are also provided. The methods comprise (a) introducing into a plant cell one recombinant DNA construct capable of expressing a guide RNA and another recombinant DNA construct capable of expressing a Cas endonuclease, wherein said guide RNA and Cas endonuclease are capable of forming a complex that enables the Cas endonuclease to introduce a double strand break at said target site; (b) contacting the plant cell with a donor DNA comprising a polynucleotide of interest, wherein said polynucleotide of interest is any of the polynucleotides disclosed herein; and (c) identifying at least one plant cell that has the polynucleotide of interest integrated into the target site.

[0010] A method of marker assisted selection of a maize plant, the method comprising analyzing for expression of one or more transcripts selected from a group consisting of nucleotide sequences, wherein the nucleotide sequences encode alternatively spliced isoforms, is also provided. In an embodiment, the expression analysis is performed with a plurality of isoform-specific probes derived from the group consisting of sequences SEQ ID NOS: 1-44,180.

[0011] A method of enhancing the expression characteristic of a gene of interest or a transgene in a plant is provided in which the method includes:

[0012] a. obtaining the nucleotide sequence of the transgene or the amino transgene sequence encoded by the transgene;

[0013] b. comparing the nucleotide sequence of the transgene to a collection of nucleotide sequences of alternatively spliced isoforms or comparing the amino acid sequence to a collection of amino acid sequences encoded by the alternatively spliced isoforms;

[0014] c. selecting one or more alternatively spliced isoform sequences that correspond to the transgene; and

[0015] d. expressing the one or more alternatively spliced isoform sequences in the plant and thereby enhancing the expression characteristic of the gene of interest or the transgene.

[0016] In an embodiment, the isoform sequence is expressed under the native promoter. In an embodiment, the isoform sequence is expressed under a constitutive regulatory element or a tissue preferred regulatory element.

[0017] A method of identifying alternatively spliced isoforms of one or more genes involved in an agronomic trait, the method comprising sequencing a plurality of transcripts that are expressed under an abiotic stress condition and detecting statistically significant alternatively spliced isoforms compared to control in more than one genotype, is also provided.

[0018] In an embodiment, the abiotic stress is drought or low nitrogen.

[0019] In an embodiment, the alternatively spliced isoforms are listed in Tables 4 or 5.

[0020] A method of increasing yield of a plant is provided in which the method includes expressing a spliced isoform or selectively reducing the expression of a specific isoform, wherein the nucleotide for expression or a silencing element to reduce the expression of the spliced isoform is derived from a sequence selected from the group consisting of SEQ ID NOS: 1-44,180. In an embodiment, the plant is maize.

[0021] A method of genome editing to introduce one or more heterologous splice sites into one or more genomic loci of a plant or selectively eliminating one or more splice sites of the plant is provided in which the method includes:

[0022] a. identifying one or more alternatively spliced isoforms;

[0023] b. determining one or more splice sites in the genomic region for the spliced isoforms; and

[0024] c. introducing a splice site in the genomic loci that lacks the one or more splice sites or changing one or more nucleotides in a preexisting splice site to render the preexisting splice site non-functional.

[0025] In an embodiment, in the method, the spliced isoforms are selected from or derived from a sequence selected from the group consisting of SEQ ID NOS: 1-44,180.

[0026] A computer system including a relational database having records containing a) information about one or more sequences of spliced isoforms represented by SEQ ID NOS: 1-44,180 or amino acid sequences of 44,181-72,254; b) information identifying known SNPs or QTLs known to be associated with one or more traits of interest; and c) a user interface allowing a user to access the information contained in the records, is also provided.

[0027] A computer program product is provided that includes a computer-usable medium having computer-readable program code embodied thereon relating to generating a relational database having records containing a) information about one or more sequences of spliced isoforms represented by SEQ ID NOS: 1-44,180 or amino acid sequences of 44,181-72,254; b) information identifying known SNPs or QTLs known to be associated with one or more traits of interest; and c) a user interface allowing a user to access the information contained in the records.

[0028] A method for comparing a plurality of spliced isoforms among two or more plant populations is also provided, said method comprising: (a) accessing, by a computer system, a database of genetic information comprising spliced isoform sequences obtained from a plurality of plant tissues; (b) categorizing, by a computer system, the data in the database into a plurality of groups of spliced isoforms, such that one or more spliced isoforms for a particular gene are in the same group, and each group represents a different set of spliced isoforms; and (c) inputting data into a computer system, the data comprising sequences of one or more transcripts obtained from the two or more plant populations. In an embodiment, the plant populations comprise inbred populations. In an embodiment, the database further comprises QTL information associated with one or more spliced isoforms.

[0029] Transformed plants, e.g. transformed crop plants, which comprise a recombinant DNA construct disclosed herein, are also provided.

### BRIEF DESCRIPTION OF THE SEQUENCE LISTING

[0030] The disclosure can be more fully understood from the following detailed description and the accompanying Sequence Listing which forms a part of this application.

[0031] SEQ ID NOs:1-44,180 are the cDNA sequences corresponding to the transcripts identified herein. SEQ ID NOs:44,181-72,254 are the amino acid sequences of polypeptides encoded by polynucleotides disclosed herein. Table 3 provides the isoform identifier associated with each SEQ ID NO.

[0032] The sequence descriptions and Sequence Listing attached hereto comply with the rules governing nucleotide and/or amino acid sequence disclosures in patent applications as set forth in 37 C.F.R. §1.821 1.825.

[0033] The Sequence Listing contains the one letter code for nucleotide sequence characters and the three letter codes for amino acids as defined in conformity with the IUPAC IUBMB standards described in Nucleic Acids Res. 13:3021 3030 (1985) and in the Biochemical J. 219 (No. 2):345 373 (1984) which are herein incorporated by reference. The symbols and format used for nucleotide and amino acid sequence data comply with the rules set forth in 37 C.F.R. §1.822.

### DETAILED DESCRIPTION

[0034] The disclosure of each reference set forth herein is hereby incorporated by reference in its entirety.

[0035] As used herein and in the appended claims, the singular forms “a”, “an”, and “the” include plural reference unless the context clearly dictates otherwise. Thus, for example, reference to “a plant” includes a plurality of such plants, reference to “a cell” includes one or more cells and equivalents thereof known to those skilled in the art, and so forth.

[0036] As used herein:

[0037] The terms “monocot” and “monocotyledonous plant” are used interchangeably herein. A monocot as used herein includes the Gramineae.

[0038] The terms “dicot” and “dicotyledonous plant” are used interchangeably herein. A dicot as used herein includes the following families: Brassicaceae, Leguminosae, and Solanaceae.

[0039] The terms “full complement” and “full-length complement” are used interchangeably herein, and refer to a complement of a given nucleotide sequence, wherein the complement and the nucleotide sequence consist of the same number of nucleotides and are 100% complementary.

[0040] A “trait” refers to a physiological, morphological, biochemical, or physical characteristic of a plant or a particular plant material or cell. In some instances, this characteristic is visible to the human eye, such as seed or plant size, or can be measured by biochemical techniques, such as detecting the protein, starch, or oil content of seed or leaves, or by observation of a metabolic or physiological process, e.g. by measuring tolerance to water deprivation or particular salt or sugar concentrations, or by the observation of the expression level of a gene or genes, or by agricultural observations such as osmotic stress tolerance or yield.

[0041] “Agronomic characteristic” is a measurable parameter including but not limited to, abiotic stress tolerance, greenness, yield, growth rate, biomass, fresh weight at maturation, dry weight at maturation, fruit yield, seed yield, total plant nitrogen content, fruit nitrogen content, seed nitrogen content, nitrogen content in a vegetative tissue, total plant free amino acid content, fruit free amino acid content, seed free amino acid content, free amino acid content in a vegetative tissue, total plant protein content, fruit protein content, seed protein content, protein content in a vegetative tissue, drought tolerance, nitrogen uptake, root lodging, harvest index, stalk lodging, plant height, ear height, ear length, salt tolerance, early seedling vigor and seedling emergence under low temperature stress.

[0042] Abiotic stress may be at least one condition selected from the group consisting of: drought, water deprivation, flood, high light intensity, high temperature, low temperature, salinity, etiolation, defoliation, heavy metal toxicity, anaerobiosis, nutrient deficiency (such as for example nitrogen deficiency), nutrient excess, UV irradiation, atmospheric pollution (e.g., ozone) and exposure to chemicals (e.g., paraquat) that induce production of reactive oxygen species (ROS).

[0043] “Increased stress tolerance” of a plant is measured relative to a reference or control plant, and is a trait of the plant to survive under stress conditions over prolonged periods of time, without exhibiting the same degree of physiological or physical deterioration relative to the reference or control plant grown under similar stress conditions.

[0044] A plant with “increased stress tolerance” can exhibit increased tolerance to one or more different stress conditions.

[0045] “Transgenic” refers to any cell, cell line, callus, tissue, plant part or plant, the genome of which has been altered by the presence of a heterologous nucleic acid, such as a recombinant DNA construct, including those initial transgenic events as well as those created by sexual crosses or asexual propagation from the initial transgenic event. The term “transgenic” as used herein does not encompass the alteration of the genome (chromosomal or extra-chromosomal) by conventional plant breeding methods or by naturally occurring events such as random cross-fertilization, non-recombinant viral infection, non-recombinant bacterial transformation, non-recombinant transposition, or spontaneous mutation.

[0046] “Genome” as it applies to plant cells encompasses not only chromosomal DNA found within the nucleus, but organelle DNA found within subcellular components (e.g., mitochondrial, plastid) of the cell.

[0047] “Plant” includes reference to whole plants, plant organs, plant tissues, plant propagules, seeds and plant cells and progeny of same. Plant cells include, without limitation, cells from seeds, suspension cultures, embryos, meristematic regions, callus tissue, leaves, roots, shoots, gametophytes, sporophytes, pollen, and microspores.

[0048] “Propagule” includes all products of meiosis and mitosis able to propagate a new plant, including but not limited to, seeds, spores and parts of a plant that serve as a means of vegetative reproduction, such as corms, tubers, offsets, or runners. Propagule also includes grafts where one portion of a plant is grafted to another portion of a different plant (even one of a different species) to create a living organism. Propagule also includes all plants and seeds produced by cloning or by bringing together meiotic products, or allowing meiotic products to come together to form an embryo or fertilized egg (naturally or with human intervention).

[0049] “Progeny” comprises any subsequent generation of a plant.

[0050] “Transgenic plant” includes reference to a plant which comprises within its genome a heterologous polynucleotide. For example, the heterologous polynucleotide is stably integrated within the genome such that the polynucleotide is passed on to successive generations. The heterologous polynucleotide may be integrated into the genome alone or as part of a recombinant DNA construct.

[0051] The commercial development of genetically improved germplasm has also advanced to the stage of introducing multiple traits into crop plants, often referred to as a gene stacking approach. In this approach, multiple genes conferring different characteristics of interest can be introduced into a plant. Gene stacking can be accomplished by many means including but not limited to co-transformation, retransformation, and crossing lines with different transgenes.

[0052] “Transgenic plant” also includes reference to plants which comprise more than one heterologous polynucleotide within their genome. Each heterologous polynucleotide may confer a different trait to the transgenic plant.

[0053] “Heterologous” with respect to sequence means a sequence that originates from a foreign species, or, if from the same species, is substantially modified from its native form in composition and/or genomic locus by deliberate human intervention.

[0054] “Polynucleotide”, “nucleic acid sequence”, “nucleotide sequence”, or “nucleic acid fragment” are used interchangeably and is a polymer of RNA or DNA that is single or double-stranded, optionally containing synthetic, non-natural or altered nucleotide bases. Nucleotides (usually found in their 5′ monophosphate form) are referred to by their single letter designation as follows: “A” for adenylate or deoxyadenylate (for RNA or DNA, respectively), “C” for cytidylate or deoxycytidylate, “G” for guanylate or deoxyguanylate, “U” for uridylate, “T” for deoxythymidylate, “R” for purines (A or G), “Y” for pyrimidines (C or T), “K” for G or T, “H” for A or C or T, “I” for inosine, and “N” for any nucleotide.

[0055] “Polypeptide”, “peptide”, “amino acid sequence” and “protein” are used interchangeably herein to refer to a polymer of amino acid residues. The terms apply to amino acid polymers in which one or more amino acid residue is an artificial chemical analogue of a corresponding naturally occurring amino acid, as well as to naturally occurring amino acid polymers. The terms “polypeptide”, “peptide”, “amino acid sequence”, and “protein” are also inclusive of modifications including, but not limited to, glycosylation, lipid attachment, sulfation, gamma-carboxylation of glutamic acid residues, hydroxylation and ADP-ribosylation.

[0056] “Messenger RNA (mRNA)” refers to the RNA that is without introns and that can be translated into protein by the cell.

[0057] “cDNA” refers to a DNA that is complementary to and synthesized from a mRNA template using the enzyme reverse transcriptase. The cDNA can be single-stranded or converted into the double-stranded form using the Klenow fragment of DNA polymerase I.

[0058] “Coding region” refers to the portion of a messenger RNA (or the corresponding portion of another nucleic acid molecule such as a DNA molecule) which encodes a protein or polypeptide. “Non-coding region” refers to all portions of a messenger RNA or other nucleic acid molecule that are not a coding region, including but not limited to, for example, the promoter region, 5′ untranslated region (“UTR”), 3′ UTR, intron and terminator. The terms “coding region” and “coding sequence” are used interchangeably herein. The terms “non-coding region” and “non-coding sequence” are used interchangeably herein.

[0059] “Mature” protein refers to a post-translationally processed polypeptide; i.e., one from which any pre- or pro-peptides present in the primary translation product have been removed.

[0060] “Precursor” protein refers to the primary product of translation of mRNA; i.e., with pre- and pro-peptides still present. Pre- and pro-peptides may be and are not limited to intracellular localization signals.

[0061] “Isolated” refers to materials, such as nucleic acid molecules and/or proteins, which are substantially free or otherwise removed from components that normally accompany or interact with the materials in a naturally occurring environment. Isolated polynucleotides may be purified from a host cell in which they naturally occur. Conventional nucleic acid purification methods known to skilled artisans may be used to obtain isolated polynucleotides. The term also embraces recombinant polynucleotides and chemically synthesized polynucleotides.

[0062] “Recombinant” refers to an artificial combination of two otherwise separated segments of sequence, e.g., by chemical synthesis or by the manipulation of isolated segments of nucleic acids by genetic engineering techniques. “Recombinant” also includes reference to a cell or vector, that has been modified by the introduction of a heterologous nucleic acid or a cell derived from a cell so modified, but does not encompass the alteration of the cell or vector by naturally occurring events (e.g., spontaneous mutation, natural transformation/transduction/transposition) such as those occurring without deliberate human intervention.

[0063] “Recombinant DNA construct” refers to a combination of nucleic acid fragments that are not normally found together in nature. Accordingly, a recombinant DNA construct may comprise regulatory sequences and coding sequences that are derived from different sources, or regulatory sequences and coding sequences derived from the same source, but arranged in a manner different than that normally found in nature. The terms “recombinant DNA construct” and “recombinant construct” are used interchangeably herein.

[0064] “Regulatory sequences” refer to nucleotide sequences located upstream (5′ non-coding sequences), within, or downstream (3′ non-coding sequences) of a coding sequence, and which influence the transcription, RNA processing or stability, or translation of the associated coding sequence. Regulatory sequences may include, but are not limited to, promoters, translation leader sequences, introns, and polyadenylation recognition sequences. The terms “regulatory sequence” and “regulatory element” are used interchangeably herein.

[0065] “Promoter” refers to a nucleic acid fragment capable of controlling transcription of another nucleic acid fragment.

[0066] “Promoter functional in a plant” is a promoter capable of controlling transcription in plant cells whether or not its origin is from a plant cell.

[0067] “Tissue-specific promoter” and “tissue-preferred promoter” are used interchangeably, and refer to a promoter that is expressed predominantly but not necessarily exclusively in one tissue or organ, but that may also be expressed in one specific cell.

[0068] “Developmentally regulated promoter” refers to a promoter whose activity is determined by developmental events.

[0069] “Operably linked” refers to the association of nucleic acid fragments in a single fragment so that the function of one is regulated by the other. For example, a promoter is operably linked with a nucleic acid fragment when it is capable of regulating the transcription of that nucleic acid fragment.

[0070] “Expression” refers to the production of a functional product. For example, expression of a nucleic acid fragment may refer to transcription of the nucleic acid fragment (e.g., transcription resulting in mRNA or functional RNA) and/or translation of mRNA into a precursor or mature protein.

[0071] “Phenotype” means the detectable characteristics of a cell or organism.

[0072] “Introduced” in the context of inserting a nucleic acid fragment (e.g., a recombinant DNA construct) into a cell, means “transfection” or “transformation” or “transduction” and includes reference to the incorporation of a nucleic acid fragment into a eukaryotic or prokaryotic cell where the nucleic acid fragment may be incorporated into the genome of the cell (e.g., chromosome, plasmid, plastid or mitochondrial DNA), converted into an autonomous replicon, or transiently expressed (e.g., transfected mRNA).

[0073] A “transformed cell” is any cell into which a nucleic acid fragment (e.g., a recombinant DNA construct) has been introduced.

[0074] “Transformation” as used herein refers to both stable transformation and transient transformation.

[0075] “Stable transformation” refers to the introduction of a nucleic acid fragment into a genome of a host organism resulting in genetically stable inheritance. Once stably transformed, the nucleic acid fragment is stably integrated in the genome of the host organism and any subsequent generation.

[0076] “Transient transformation” refers to the introduction of a nucleic acid fragment into the nucleus, or DNA-containing organelle, of a host organism resulting in gene expression without genetically stable inheritance.

[0077] As used herein, the terms “target site”, “target sequence”, “genomic target site” and “genomic target sequence” are used interchangeably herein and refer to a polynucleotide sequence in the genome of a plant cell or yeast cell that comprises a recognition site for a double-strand-break-inducing agent.

[0078] An “endonuclease” refers to an enzyme that cleaves the phosphodiester bond within a polynucleotide chain.

[0079] Endonucleases include restriction endonucleases that cleave DNA at specific sites without damaging the bases. Restriction endonucleases include Type I, Type II, Type III, and Type IV endonucleases, which further include subtypes. In the Type I and Type III systems, both the methylase and restriction activities are contained in a single complex.

[0080] Type I and Type III restriction endonucleases recognize specific recognition sites, but typically cleave at a variable position from the recognition site, which can be hundreds of base pairs away from the recognition site. In Type II systems the restriction activity is independent of any methylase activity, and cleavage typically occurs at specific sites within or near to the recognition site. Most Type II enzymes cut palindromic sequences, however Type IIa enzymes recognize non-palindromic recognition sites and cleave outside of the recognition site, Type IIb enzymes cut sequences twice with both sites outside of the recognition site, and Type IIs enzymes recognize an asymmetric recognition site and cleave on one side and at a defined distance of about 1-20 nucleotides from the recognition site. Type IV restriction enzymes target methylated DNA. Restriction enzymes are further described and classified, for example in the REBASE database (webpage at rebase.neb.com; Roberts et al., (2003) Nucleic Acids Res 31:418-20), Roberts et al., (2003) Nucleic Acids Res 31:1805-12, and Belfort et al., (2002) in Mobile DNA II, pp. 761-783, Eds. Craigie et al., (ASM Press, Washington, D.C.).

[0081] A “meganuclease” refers to a homing endonuclease, which like restriction endonucleases, bind and cut at a specific recognition site, however the recognition sites for meganucleases are typically longer, about 18 bp or more. In some embodiments of the invention, the meganuclease has been engineered (or modified) to cut a specific endogenous recognition sequence, wherein the endogenous target sequence prior to being cut by the engineered double-strand-break-inducing agent was not a sequence that would have been recognized by a native (non-engineered or non-modified) endonuclease.

[0082] A “meganuclease polypeptide” refers to a polypeptide having meganuclease activity and thus capable of producing a double-strand break in the recognition sequence.

[0083] Meganucleases have been classified into four families based on conserved sequence motifs, the families are the LAGLIDADG, GIY-YIG, H-N-H, and His-Cys box families. These motifs participate in the coordination of metal ions and hydrolysis of phosphodiester bonds. HEases are notable for their long recognition sites, and for tolerating some sequence polymorphisms in their DNA substrates.

[0084] The naming convention for meganuclease is similar to the convention for other restriction endonuclease. Meganucleases are also characterized by prefix F-, I-, or PI- for enzymes encoded by free-standing open reading frames, introns, and inteins, respectively. For example, intron-, intein-, and freestanding gene encoded meganuclease from Saccharomyces cerevisiae are denoted I-SceI, PI-SceI, and F-SceII, respectively. Meganuclease domains, structure and function are known, see for example, Guhan and Muniyappa (2003) Crit Rev Biochem Mol Biol 38:199-248; Lucas et al., (2001) Nucleic Acids Res 29:960-9; Jurica and Stoddard, (1999) Cell Mol Life Sci 55:1304-26; Stoddard, (2006) Q Rev Biophys 38:49-95; and Moure et al., (2002) Nat Struct Biol 9:764. In some examples a naturally occurring variant, and/or engineered derivative meganuclease is used. Methods for modifying the kinetics, cofactor interactions, expression, optimal conditions, and/or recognition site specificity, and screening for activity are known, see for example, Epinat et al., (2003) Nucleic Acids Res 31:2952-62; Chevalier et al., (2002) Mol Cell 10:895-905; Gimble et al., (2003) Mol Biol 334:993-1008; Seligman et al., (2002) Nucleic Acids Res 30:3870-9; Sussman et al., (2004) J Mol Biol 342:31-41; Rosen et al., (2006) Nucleic Acids Res 34:4791-800; Chames et al., (2005) Nucleic Acids Res 33:e178; Smith et al., (2006) Nucleic Acids Res 34:e149; Gruen et al., (2002) Nucleic Acids Res 30:e29; Chen and Zhao, (2005) Nucleic Acids Res 33:e154; WO2005105989; WO2003078619; WO2006097854; WO2006097853; WO2006097784; and WO2004031346.

[0085] Any meganuclease can be used herein, including, but not limited to, I-SceI, I-SceII, 1-SceIII, I-SceIV, I-SceV, I-SceVI, I-SceVII, I-CeuI, I-CeuAIIP, I-CreI, I-CrepsbIP, I-CrepsbIIP, I-CrepsbIIIP, I-CrepsbIVP, I-TliI, I-PpoI, PI-PspI, F-SceI, F-SceII, F-SuvI, F-TevI, F-TevII, I-AmaI, I-AniI, I-ChuI, I-CmoeI, I-CpaI, I-CpaII, I-CsmI, I-CvuI, I-CvuAIP, I-DdiI, I-DdiII, I-DirI, I-DmoI, I-HmuI, I-HmuII, I-HsNIP, I-LlaI, I-MsoI, I-NaaI, I-NanI, I-NclIP, I-NgrIP, I-NitI, I-NjaI, I-Nsp236IP, I-PakI, I-PboIP, I-PcuIP, I-PcuAI, I-PcuVI, I-PgrIP, I-PobIP, I-PorI, I-PorIIP, I-PbpIP, I-SpBetaIP, I-ScaI, I-SexIP, I-SneIP, I-SpomI, I-SpomCP, I-SpomIP, I-SpomIIP, I-SquIP, I-Ssp6803I, I-SthPhiJP, I-SthPhiST3P, I-SthPhiSTe3bP, I-TdeIP, I-TevI, I-TevII, I-TevIII, I-UarAP, I-UarHGPAIP, I-UarHGPA13P, I-VinIP, I-ZbiIP, PI-MtuI, PI-MtuHIP PI-MtuHIIP, PI-PfuI, PI-PfuII, PI-PkoI, PI-PkoII, PI-Rma43812IP, PI-SpBetaIP, PI-SceI, PI-TfuI, PI-TfuII, PI-ThyI, PI-TliI, PI-TliII, or any active variants or fragments thereof.

[0086] TAL effector nucleases are a new class of sequence-specific nucleases that can be used to make double-strand breaks at specific target sequences in the genome of a plant or other organism. TAL effector nucleases are created by fusing a native or engineered transcription activator-like (TAL) effector, or functional part thereof, to the catalytic domain of an endonuclease, such as, for example, FokI. The unique, modular TAL effector DNA binding domain allows for the design of proteins with potentially any given DNA recognition specificity. Thus, the DNA binding domains of the TAL effector nucleases can be engineered to recognize specific DNA target sites and thus, used to make double-strand breaks at desired target sequences. See, WO 2010/079430; Morbitzer et al. (2010) PNAS 10.1073/pnas.1013133107; Scholze & Boch (2010) Virulence 1:428-432; Christian et al. Genetics (2010) 186:757-761; Li et al. (2010) Nuc. Acids Res. (2010) doi:10.1093/nar/gkq704; and Miller et al. (2011) Nature Biotechnology 29:143-148; all of which are herein incorporated by reference.

[0087] As used herein, the term “Cas gene” refers to a gene that is generally coupled, associated or close to or in the vicinity of flanking CRISPR loci.

[0088] CRISPR loci (Clustered Regularly Interspaced Short Palindromic Repeats) (also known as SPIDRs—SPacer Interspersed Direct Repeats) constitute a family of recently described DNA loci. CRISPR loci consist of short and highly conserved DNA repeats (typically 24 to 40 bps, repeated from 1 to 140 times—also referred to as CRISPR-repeats) which are partially palindromic. The repeated sequences (usually specific to a species) are interspaced by variable sequences of constant length (typically 20 to 58 by depending on the CRISPR locus (WO2007/024097 published Mar. 1, 2007).

[0089] CRISPR loci were first recognized in E. coli (Ishino et al. (1987) J. Bacterial. 169:5429-5433; Nakata et al. (1989) J. Bacterial. 171:3553-3556). Similar interspersed short sequence repeats have been identified in Haloferax mediterranei, Streptococcus pyogenes, Anabaena, and Mycobacterium tuberculosis (Groenen et al. (1993) Mol. Microbiol. 10:1057-1065; Hoe et al. (1999) Emerg. Infect. Dis. 5:254-263; Masepohl et al. (1996) Biochim. Biophys. Acta 1307:26-30; Mojica et al. (1995) Mol. Microbiol. 17:85-93). The CRISPR loci differ from other SSRs by the structure of the repeats, which have been termed short regularly spaced repeats (SRSRs) (Janssen et al. (2002) OMICS J. Integ. Biol. 6:23-33; Mojica et al. (2000) Mol. Microbiol. 36:244-246). The repeats are short elements that occur in clusters, that are always regularly spaced by variable sequences of constant length (Mojica et al. (2000) Mol. Microbiol. 36:244-246).

[0090] The terms “Cas gene”, “CRISPR-associated (Cas) gene” are used interchangeably herein. A comprehensive review of the Cas protein family is presented in Haft et al. (2005) Computational Biology, PLoS Comput Biol 1(6): e60. doi:10.1371/journal.pcbi.0010060. As described therein, 41 CRISPR-associated (Cas) gene families are described, in addition to the four previously known gene families. It shows that CRISPR systems belong to different classes, with different repeat patterns, sets of genes, and species ranges. The number of Cas genes at a given CRISPR locus can vary between species.

[0091] As used herein, the term “guide RNA” refers to a synthetic fusion of two RNA molecules, a crRNA (CRISPR RNA) comprising a variable targeting domain, and a tracrRNA. The guide RNA may comprise a variable targeting domain of 12 to 30 nucleotide sequences and a RNA fragment that can interact with a Cas endonuclease.

[0092] The term “variable targeting domain” refers to a nucleotide sequence 5-prime of the GUUUU sequence motif in the guide RNA, that is complementary to one strand of a double strand DNA target site in the genome of a plant cell, plant or seed. In one embodiment, the variable targeting domain is 12 to 30 nucleotides in length.

[0093] Sequence alignments and percent identity calculations may be determined using a variety of comparison methods designed to detect homologous sequences including, but not limited to, the Megalign® program of the LASERGENE® bioinformatics computing suite (DNASTAR® Inc., Madison, Wis.). Unless stated otherwise, multiple alignment of the sequences provided herein were performed using the Clustal V method of alignment (Higgins and Sharp (1989) CABIOS. 5:151 153) with the default parameters (GAP PENALTY=10, GAP LENGTH PENALTY=10). Default parameters for pairwise alignments and calculation of percent identity of protein sequences using the Clustal V method are KTUPLE=1, GAP PENALTY=3, WINDOW=5 and DIAGONALS SAVED=5. For nucleic acids the parameters are KTUPLE=2, GAP PENALTY=5, WINDOW=4 and DIAGONALS SAVED=4. After alignment of the sequences, using the Clustal V program, it is possible to obtain “percent identity” and “divergence” values by viewing the “sequence distances” table on the same program; unless stated otherwise, percent identities and divergences provided and claimed herein were calculated in this manner.

[0094] Alternatively, the Clustal W method of alignment may be used. The Clustal W method of alignment (described by Higgins and Sharp, CABIOS. 5:151-153 (1989); Higgins, D. G. et al., Comput. Appl. Biosci. 8:189-191 (1992)) can be found in the MegAlign™ v6.1 program of the LASERGENE® bioinformatics computing suite (DNASTAR® Inc., Madison, Wis.). Default parameters for multiple alignment correspond to GAP PENALTY=10, GAP LENGTH PENALTY=0.2, Delay Divergent Sequences=30%, DNA Transition Weight=0.5, Protein Weight Matrix=Gonnet Series, DNA Weight Matrix=IUB. For pairwise alignments the default parameters are Alignment=Slow-Accurate, Gap Penalty=10.0, Gap Length=0.10, Protein Weight Matrix=Gonnet 250 and DNA Weight Matrix=IUB. After alignment of the sequences using the Clustal W program, it is possible to obtain “percent identity” and “divergence” values by viewing the “sequence distances” table in the same program.

[0095] Standard recombinant DNA and molecular cloning techniques used herein are well known in the art and are described more fully in Sambrook, J., Fritsch, E. F. and Maniatis, T. Molecular Cloning: A Laboratory Manual; Cold Spring Harbor Laboratory Press: Cold Spring Harbor, 1989 (hereinafter “Sambrook”).

[0096] Embodiments include isolated polynucleotides and polypeptides, recombinant DNA constructs useful for improving one or more agronomic characteristics in a plant, compositions (such as plants or seeds) comprising the recombinant DNA constructs, and methods utilizing the recombinant DNA constructs.

### Isolated Polynucleotides and Polypeptides:

[0097] Computational analysis of hundreds of RNA-seq libraries enabled the identification of novel transcripts in maize. Polynucleotides corresponding to the novel transcripts are provided herein, as are the polypeptides encoded by the polynucleotides. The polynucleotide sequences are represented by SEQ ID NOs:1-44,180, and the polypeptide sequences are represented by SEQ ID NOs:44,181-72,254.

[0098] An isolated polynucleotide comprising: (i) a nucleic acid sequence encoding a polypeptide having an amino acid sequence of at least 50%, 51%, 52%, 53%, 54%, 55%, 56%, 57%, 58%, 59%, 60%, 61%, 62%, 63%, 64%, 65%, 66%, 67%, 68%, 69%, 70%, 71%, 72%, 73%, 74%, 75%, 76%, 77%, 78%, 79%, 80%, 81%, 82%, 83%, 84%, 85%, 86%, 87%, 88%, 89%, 90%, 91%, 92%, 93%, 94%, 95%, 96%, 97%, 98%, 99%, or 100% sequence identity, based on the Clustal V method of alignment, when compared to any of SEQ ID NOs:44,181-72,254; or (ii) a full complement of the nucleic acid sequence of (i), wherein the full complement and the nucleic acid sequence of (i) consist of the same number of nucleotides and are 100% complementary. Any of the foregoing isolated polynucleotides may be utilized in any recombinant DNA constructs disclosed herein.

[0099] An isolated polypeptide having an amino acid sequence of at least 50%, 51%, 52%, 53%, 54%, 55%, 56%, 57%, 58%, 59%, 60%, 61%, 62%, 63%, 64%, 65%, 66%, 67%, 68%, 69%, 70%, 71%, 72%, 73%, 74%, 75%, 76%, 77%, 78%, 79%, 80%, 81%, 82%, 83%, 84%, 85%, 86%, 87%, 88%, 89%, 90%, 91%, 92%, 93%, 94%, 95%, 96%, 97%, 98%, 99%, or 100% sequence identity, based on the Clustal V method of alignment, when compared to any of SEQ ID NOs: 44,181-72,254.

[0100] An isolated polynucleotide comprising (i) a nucleic acid sequence of at least 50%, 51%, 52%, 53%, 54%, 55%, 56%, 57%, 58%, 59%, 60%, 61%, 62%, 63%, 64%, 65%, 66%, 67%, 68%, 69%, 70%, 71%, 72%, 73%, 74%, 75%, 76%, 77%, 78%, 79%, 80%, 81%, 82%, 83%, 84%, 85%, 86%, 87%, 88%, 89%, 90%, 91%, 92%, 93%, 94%, 95%, 96%, 97%, 98%, 99%, or 100% sequence identity, based on the Clustal V method of alignment, when compared to any of SEQ ID NOs:1-44,180; or (ii) a full complement of the nucleic acid sequence of (i). Any of the foregoing isolated polynucleotides may be utilized in any recombinant DNA constructs disclosed herein.

[0101] An isolated polynucleotide comprising a nucleotide sequence, wherein the nucleotide sequence is hybridizable under stringent conditions with a DNA molecule comprising the full complement of any of SEQ ID NOs:1-44,180.

[0102] An isolated polynucleotide comprising a nucleotide sequence, wherein the nucleotide sequence is derived from any of SEQ ID NOs:1-44,180 by alteration of one or more nucleotides by at least one method selected from the group consisting of: deletion, substitution, addition and insertion.

[0103] An isolated polynucleotide comprising a nucleotide sequence, wherein the nucleotide sequence corresponds to an allele of SEQ ID NOs:1-44,180.

[0104] Also of interest are fragments of the disclosed polynucleotides consisting of oligonucleotides of at least 15, preferably at least 16 or 17, more preferably at least 18 or 19, and even more preferably at least 20 or more, consecutive nucleotides. Such oligonucleotides are fragments of any of the larger polynucleotide sequences of SEQ ID NOs:1-44,180, and may find use, for example as probes and primers for detection of the polynucleotides disclosed herein.

[0105] It is understood, as those skilled in the art will appreciate, that the disclosure encompasses more than the specific exemplary sequences. Alterations in a nucleic acid fragment which result in the production of a chemically equivalent amino acid at a given site, but do not affect the functional properties of the encoded polypeptide, are well known in the art. For example, a codon for the amino acid alanine, a hydrophobic amino acid, may be substituted by a codon encoding another less hydrophobic residue, such as glycine, or a more hydrophobic residue, such as valine, leucine, or isoleucine. Similarly, changes which result in substitution of one negatively charged residue for another, such as aspartic acid for glutamic acid, or one positively charged residue for another, such as lysine for arginine, can also be expected to produce a functionally equivalent product. Nucleotide changes which result in alteration of the N terminal and C terminal portions of the polypeptide molecule would also not be expected to alter the activity of the polypeptide. Each of the proposed modifications is well within the routine skill in the art, as is determination of retention of biological activity of the encoded products.

[0106] A protein disclosed herein may also be a protein which comprises an amino acid sequence comprising a deletion, substitution, insertion and/or addition of one or more amino acids in an amino acid sequence presented in any of SEQ ID NOs:44,181-72,254. The substitution may be conservative, which means the replacement of a certain amino acid residue by another residue having similar physical and chemical characteristics. Non-limiting examples of conservative substitution include replacement between aliphatic group-containing amino acid residues such as Ile, Val, Leu or Ala, and replacement between polar residues such as Lys-Arg, Glu-Asp or Gln-Asn replacement.

[0107] Proteins derived by amino acid deletion, substitution, insertion and/or addition can be prepared when DNAs encoding their wild-type proteins are subjected to, for example, well-known site-directed mutagenesis (see, e.g., Nucleic Acid Research, Vol. 10, No. 20, p. 6487-6500, 1982, which is hereby incorporated by reference in its entirety). As used herein, the term “one or more amino acids” is intended to mean a possible number of amino acids which may be deleted, substituted, inserted and/or added by site-directed mutagenesis.

[0108] Techniques for allowing deletion, substitution, insertion and/or addition of one or more amino acids in the amino acid sequences of biologically active peptides such as enzymes while retaining their activity include site-directed mutagenesis mentioned above, as well as other techniques such as those for treating a gene with a mutagen, and those in which a gene is selectively cleaved to remove, substitute, insert or add a selected nucleotide or nucleotides, and then ligated.

[0109] A protein disclosed herein may also be a protein which is encoded by a nucleic acid comprising a nucleotide sequence comprising a deletion, substitution, insertion and/or addition of one or more nucleotides in the nucleotide sequence of any of SEQ ID NOs:1-44,180. Nucleotide deletion, substitution, insertion and/or addition may be accomplished by site-directed mutagenesis or other techniques as mentioned above.

[0110] A protein disclosed herein may also be a protein which is encoded by a nucleic acid comprising a nucleotide sequence hybridizable under stringent conditions with the complementary strand of the nucleotide sequence of any of SEQ ID NOs:1-44,180.

[0111] The term “under stringent conditions” means that two sequences hybridize under moderately or highly stringent conditions. More specifically, moderately stringent conditions can be readily determined by those having ordinary skill in the art, e.g., depending on the length of DNA. The basic conditions are set forth by Sambrook et al., Molecular Cloning: A Laboratory Manual, third edition, chapters 6 and 7, Cold Spring Harbor Laboratory Press, 2001 and include the use of a prewashing solution for nitrocellulose filters 5×SSC, 0.5% SDS, 1.0 mM EDTA (pH 8.0), hybridization conditions of about 50% formamide, 2×SSC to 6×SSC at about 40-50° C. (or other similar hybridization solutions, such as Stark's solution, in about 50% formamide at about 42° C.) and washing conditions of, for example, about 40-60° C., 0.5-6×SSC, 0.1% SDS. Preferably, moderately stringent conditions include hybridization (and washing) at about 50° C. and 6×SSC. Highly stringent conditions can also be readily determined by those skilled in the art, e.g., depending on the length of DNA.

[0112] Generally, such conditions include hybridization and/or washing at higher temperature and/or lower salt concentration (such as hybridization at about 65° C., 6×SSC to 0.2×SSC, preferably 6×SSC, more preferably 2×SSC, most preferably 0.2×SSC), compared to the moderately stringent conditions. For example, highly stringent conditions may include hybridization as defined above, and washing at approximately 65-68° C., 0.2×SSC, 0.1% SDS. SSPE (1×SSPE is 0.15 M NaCl, 10 mM NaH2PO4, and 1.25 mM EDTA, pH 7.4) can be substituted for SSC (1×SSC is 0.15 M NaCl and 15 mM sodium citrate) in the hybridization and washing buffers; washing is performed for 15 minutes after hybridization is completed.

[0113] It is also possible to use a commercially available hybridization kit which uses no radioactive substance as a probe. Specific examples include hybridization with an ECL direct labeling & detection system (Amersham). Stringent conditions include, for example, hybridization at 42° C. for 4 hours using the hybridization buffer included in the kit, which is supplemented with 5% (w/v) Blocking reagent and 0.5 M NaCl, and washing twice in 0.4% SDS, 0.5×SSC at 55° C. for 20 minutes and once in 2×SSC at room temperature for 5 minutes.

### Recombinant DNA Constructs:

[0114] Recombinant DNA constructs comprising polynucleotides disclosed herein are also provided.

[0115] In one embodiment, a recombinant DNA construct comprises a polynucleotide operably linked to at least one regulatory sequence (e.g., a promoter functional in a plant), wherein the polynucleotide comprises (i) a nucleic acid sequence encoding an amino acid sequence of at least 50%, 51%, 52%, 53%, 54%, 55%, 56%, 57%, 58%, 59%, 60%, 61%, 62%, 63%, 64%, 65%, 66%, 67%, 68%, 69%, 70%, 71%, 72%, 73%, 74%, 75%, 76%, 77%, 78%, 79%, 80%, 81%, 82%, 83%, 84%, 85%, 86%, 87%, 88%, 89%, 90%, 91%, 92%, 93%, 94%, 95%, 96%, 97%, 98%, 99%, or 100% sequence identity, based on the Clustal V method of alignment, when compared to any of SEQ ID NOs:44,181-72,254; or (ii) a full complement of the nucleic acid sequence of (i).

[0116] In another embodiment, a recombinant DNA construct comprises a polynucleotide operably linked to at least one regulatory sequence (e.g., a promoter functional in a plant), wherein said polynucleotide comprises (i) a nucleic acid sequence of at least 50%, 51%, 52%, 53%, 54%, 55%, 56%, 57%, 58%, 59%, 60%, 61%, 62%, 63%, 64%, 65%, 66%, 67%, 68%, 69%, 70%, 71%, 72%, 73%, 74%, 75%, 76%, 77%, 78%, 79%, 80%, 81%, 82%, 83%, 84%, 85%, 86%, 87%, 88%, 89%, 90%, 91%, 92%, 93%, 94%, 95%, 96%, 97%, 98%, 99%, or 100% sequence identity, based on the Clustal V method of alignment, when compared to any of SEQ ID NOs:1-44,180; or (ii) a full complement of the nucleic acid sequence of (i).

[0117] In another embodiment, a recombinant DNA construct comprises a polynucleotide operably linked to at least one regulatory sequence (e.g., a promoter functional in a plant), wherein said polynucleotide comprises (i) a nucleic acid sequence that is transcribed into an RNA molecule that suppresses the level of an endogenous polypeptide having an amino acid sequence of at least 50%, 51%, 52%, 53%, 54%, 55%, 56%, 57%, 58%, 59%, 60%, 61%, 62%, 63%, 64%, 65%, 66%, 67%, 68%, 69%, 70%, 71%, 72%, 73%, 74%, 75%, 76%, 77%, 78%, 79%, 80%, 81%, 82%, 83%, 84%, 85%, 86%, 87%, 88%, 89%, 90%, 91%, 92%, 93%, 94%, 95%, 96%, 97%, 98%, 99%, or 100% sequence identity, based on the Clustal V method of alignment, when compared to any of SEQ ID NOs:44,181-72,254.

[0118] It is understood, as those skilled in the art will appreciate, that the disclosure encompasses more than the specific exemplary sequences. Alterations in a nucleic acid fragment which result in the production of a chemically equivalent amino acid at a given site, but do not affect the functional properties of the encoded polypeptide, are well known in the art. For example, a codon for the amino acid alanine, a hydrophobic amino acid, may be substituted by a codon encoding another less hydrophobic residue, such as glycine, or a more hydrophobic residue, such as valine, leucine, or isoleucine. Similarly, changes which result in substitution of one negatively charged residue for another, such as aspartic acid for glutamic acid, or one positively charged residue for another, such as lysine for arginine, can also be expected to produce a functionally equivalent product. Nucleotide changes which result in alteration of the N terminal and C terminal portions of the polypeptide molecule would also not be expected to alter the activity of the polypeptide. Each of the proposed modifications is well within the routine skill in the art, as is determination of retention of biological activity of the encoded products.

[0119] The recombinant DNA construct may be a suppression DNA construct and may comprise a cosuppression construct, antisense construct, viral-suppression construct, hairpin suppression construct, stem-loop suppression construct, double-stranded RNA-producing construct, RNAi construct, or small RNA construct (e.g., an sRNA construct or an miRNA construct).

[0120] “Suppression DNA construct” is a recombinant DNA construct which when transformed or stably integrated into the genome of the plant, results in “silencing” of a target gene in the plant. The target gene may be endogenous or transgenic to the plant. “Silencing,” as used herein with respect to the target gene, refers generally to the suppression of levels of mRNA or protein/enzyme expressed by the target gene, and/or the level of the enzyme activity or protein functionality. The terms “suppression”, “suppressing” and “silencing”, used interchangeably herein, include lowering, reducing, declining, decreasing, inhibiting, eliminating or preventing. “Silencing” or “gene silencing” does not specify mechanism and is inclusive, and not limited to, anti-sense, cosuppression, viral-suppression, hairpin suppression, stem-loop suppression, RNAi-based approaches, and small RNA-based approaches.

[0121] A suppression DNA construct may comprise a region derived from a target gene of interest and may comprise all or part of the nucleic acid sequence of the sense strand (or antisense strand) of the target gene of interest. Depending upon the approach to be utilized, the region may be 100% identical or less than 100% identical (e.g., at least 50%, 51%, 52%, 53%, 54%, 55%, 56%, 57%, 58%, 59%, 60%, 61%, 62%, 63%, 64%, 65%, 66%, 67%, 68%, 69%, 70%, 71%, 72%, 73%, 74%, 75%, 76%, 77%, 78%, 79%, 80%, 81%, 82%, 83%, 84%, 85%, 86%, 87%, 88%, 89%, 90%, 91%, 92%, 93%, 94%, 95%, 96%, 97%, 98%, or 99% identical) to all or part of the sense strand (or antisense strand) of the gene of interest.

[0122] A suppression DNA construct may comprise 100, 200, 300, 400, 500, 600, 700, 800, 900 or 1000 contiguous nucleotides of the sense strand (or antisense strand) of the gene of interest.

[0123] Suppression DNA constructs are well-known in the art, are readily constructed once the target gene of interest is selected, and include, without limitation, cosuppression constructs, antisense constructs, viral-suppression constructs, hairpin suppression constructs, stem-loop suppression constructs, double-stranded RNA-producing constructs, and more generally, RNAi (RNA interference) constructs and small RNA constructs such as sRNA (short interfering RNA) constructs and miRNA (microRNA) constructs.

[0124] Suppression of gene expression may also be achieved by use of artificial miRNA precursors, ribozyme constructs and gene disruption. A modified plant miRNA precursor may be used, wherein the precursor has been modified to replace the miRNA encoding region with a sequence designed to produce a miRNA directed to the nucleotide sequence of interest. Gene disruption may be achieved by use of transposable elements or by use of chemical agents that cause site-specific mutations.

[0125] “Antisense inhibition” refers to the production of antisense RNA transcripts capable of suppressing the expression of the target gene or gene product. “Antisense RNA” refers to an RNA transcript that is complementary to all or part of a target primary transcript or mRNA and that blocks the expression of a target isolated nucleic acid fragment (U.S. Pat. No. 5,107,065). The complementarity of an antisense RNA may be with any part of the specific gene transcript, i.e., at the 5′ non-coding sequence, 3′ non-coding sequence, introns, or the coding sequence.

[0126] “Cosuppression” refers to the production of sense RNA transcripts capable of suppressing the expression of the target gene or gene product. “Sense” RNA refers to RNA transcript that includes the mRNA and can be translated into protein within a cell or in vitro. Cosuppression constructs in plants have been previously designed by focusing on overexpression of a nucleic acid sequence having homology to a native mRNA, in the sense orientation, which results in the reduction of all RNA having homology to the overexpressed sequence (see Vaucheret et al., Plant J. 16:651-659 (1998); and Gura, Nature 404:804-808 (2000)).

[0127] Another variation describes the use of plant viral sequences to direct the suppression of proximal mRNA encoding sequences (PCT Publication No. WO 98/36083 published on Aug. 20, 1998).

[0128] RNA interference refers to the process of sequence-specific post-transcriptional gene silencing in animals mediated by short interfering RNAs (siRNAs) (Fire et al., Nature 391:806 (1998)). The corresponding process in plants is commonly referred to as post-transcriptional gene silencing (PTGS) or RNA silencing and is also referred to as quelling in fungi. The process of post-transcriptional gene silencing is thought to be an evolutionarily-conserved cellular defense mechanism used to prevent the expression of foreign genes and is commonly shared by diverse flora and phyla (Fire et al., Trends Genet. 15:358 (1999)).

[0129] Small RNAs play an important role in controlling gene expression. Regulation of many developmental processes, including flowering, is controlled by small RNAs. It is now possible to engineer changes in gene expression of plant genes by using transgenic constructs which produce small RNAs in the plant.

[0130] Small RNAs appear to function by base-pairing to complementary RNA or DNA target sequences. When bound to RNA, small RNAs trigger either RNA cleavage or translational inhibition of the target sequence. When bound to DNA target sequences, it is thought that small RNAs can mediate DNA methylation of the target sequence. The consequence of these events, regardless of the specific mechanism, is that gene expression is inhibited.

[0131] MicroRNAs (miRNAs) are noncoding RNAs of about 19 to about 24 nucleotides (nt) in length that have been identified in both animals and plants (Lagos-Quintana et al., Science 294:853-858 (2001), Lagos-Quintana et al., Curr. Biol. 12:735-739 (2002); Lau et al., Science 294:858-862 (2001); Lee and Ambros, Science 294:862-864 (2001); Llave et al., Plant Cell 14:1605-1619 (2002); Mourelatos et al., Genes Dev. 16:720-728 (2002); Park et al., Curr. Biol. 12:1484-1495 (2002); Reinhart et al., Genes. Dev. 16:1616-1626 (2002)). They are processed from longer precursor transcripts that range in size from approximately 70 to 200 nt, and these precursor transcripts have the ability to form stable hairpin structures.

[0132] The terms “miRNA-star sequence” and “miRNA* sequence” are used interchangeably herein and they refer to a sequence in the miRNA precursor that is highly complementary to the miRNA sequence. The miRNA and miRNA* sequences form part of the stem region of the miRNA precursor hairpin structure.

[0133] In one embodiment, there is provided a method for the suppression of a target sequence comprising introducing into a cell a nucleic acid construct encoding a miRNA substantially complementary to the target. In some embodiments the miRNA comprises about 19, 20, 21, 22, 23, 24 or 25 nucleotides. In some embodiments the miRNA comprises 21 nucleotides. In some embodiments the nucleic acid construct encodes the miRNA. In some embodiments the nucleic acid construct encodes a polynucleotide precursor which may form a double-stranded RNA, or hairpin structure comprising the miRNA.

[0134] In some embodiments, the nucleic acid construct comprises a modified endogenous plant miRNA precursor, wherein the precursor has been modified to replace the endogenous miRNA encoding region with a sequence designed to produce a miRNA directed to the target sequence. The plant miRNA precursor may be full-length of may comprise a fragment of the full-length precursor. In some embodiments, the endogenous plant miRNA precursor is from a dicot or a monocot. In some embodiments the endogenous miRNA precursor is from Arabidopsis, tomato, maize, soybean, sunflower, sorghum, canola, wheat, alfalfa, cotton, rice, barley, millet, sugar cane or switchgrass.

[0135] In some embodiments, the miRNA template, (i.e. the polynucleotide encoding the miRNA), and thereby the miRNA, may comprise some mismatches relative to the target sequence. In some embodiments the miRNA template has >1 nucleotide mismatch as compared to the target sequence, for example, the miRNA template can have 1, 2, 3, 4, 5, or more mismatches as compared to the target sequence. This degree of mismatch may also be described by determining the percent identity of the miRNA template to the complement of the target sequence. For example, the miRNA template may have a percent identity including about at least 70%, 75%, 77%, 78%, 79%, 80%, 81%, 82%, 83%, 84%, 85%, 86%, 87%, 88%, 89%, 90%, 91%, 92%, 93%, 94%, 95%, 96%, 97%, 98%, 99%, or 100% as compared to the complement of the target sequence.

[0136] In some embodiments, the miRNA template, (i.e. the polynucleotide encoding the miRNA) and thereby the miRNA, may comprise some mismatches relative to the miRNA-star sequence. In some embodiments the miRNA template has >1 nucleotide mismatch as compared to the miRNA-star sequence, for example, the miRNA template can have 1, 2, 3, 4, 5, or more mismatches as compared to the miRNA-star sequence. This degree of mismatch may also be described by determining the percent identity of the miRNA template to the complement of the miRNA-star sequence. For example, the miRNA template may have a percent identity including about at least 70%, 75%, 77%, 78%, 79%, 80%, 81%, 82%, 83%, 84%, 85%, 86%, 87%, 88%, 89%, 90%, 91%, 92%, 93%, 94%, 95%, 96%, 97%, 98%, 99%, or 100% as compared to the complement of the miRNA-star sequence.

[0137] A recombinant DNA construct may express a guide RNA targeting a genomic sequence that encodes a polypeptide having an amino acid sequence of any of SEQ ID NOs:44,181-72,254.

### Regulatory Sequences:

[0138] A recombinant DNA construct as disclosed herein may comprise at least one regulatory sequence.

[0139] A regulatory sequence may be a promoter.

[0140] A number of promoters can be used in recombinant DNA constructs disclosed herein. The promoters can be selected based on the desired outcome, and may include constitutive, tissue-specific, inducible, or other promoters for expression in the host organism.

[0141] Promoters that cause a gene to be expressed in most cell types at most times are commonly referred to as “constitutive promoters”.

[0142] High level, constitutive expression of the candidate gene under control of the 35S or UBI promoter may have pleiotropic effects, although candidate gene efficacy may be estimated when driven by a constitutive promoter. Use of tissue-specific and/or stress-specific promoters may eliminate undesirable effects but retain the ability to enhance drought tolerance. This effect has been observed in Arabidopsis (Kasuga et al. (1999) Nature Biotechnol. 17:287-91).

[0143] Suitable constitutive promoters for use in a plant host cell include, for example, the core promoter of the Rsyn7 promoter and other constitutive promoters disclosed in WO 99/43838 and U.S. Pat. No. 6,072,050; the core CaMV 35S promoter (Odell et al., Nature 313:810-812 (1985)); rice actin (McElroy et al., Plant Cell 2:163-171 (1990)); ubiquitin (Christensen et al., Plant Mol. Biol. 12:619-632 (1989) and Christensen et al., Plant Mol. Biol. 18:675-689 (1992)); pEMU (Last et al., Theor. Appl. Genet. 81:581-588 (1991)); MAS (Velten et al., EMBO J. 3:2723-2730 (1984)); ALS promoter (U.S. Pat. No. 5,659,026), the constitutive synthetic core promoter SCP1 (International Publication No. 03/033651) and the like. Other constitutive promoters include, for example, those discussed in U.S. Pat. Nos. 5,608,149; 5,608,144; 5,604,121; 5,569,597; 5,466,785; 5,399,680; 5,268,463; 5,608,142; and 6,177,611.

[0144] In choosing a promoter to use in the methods disclosed herein, it may be desirable to use a tissue-specific or developmentally regulated promoter.

[0145] A tissue-specific or developmentally regulated promoter is a DNA sequence which regulates the expression of a DNA sequence selectively in the cells/tissues of a plant critical to tassel development, seed set, or both, and limits the expression of such a DNA sequence to the period of tassel development or seed maturation in the plant. Any identifiable promoter may be used in the methods disclosed herein which causes the desired temporal and spatial expression.

[0146] Promoters which are seed or embryo-specific and may include soybean Kunitz trypsin inhibitor (Kti3, Jofuku and Goldberg, Plant Cell 1:1079-1093 (1989)), patatin (potato tubers) (Rocha-Sosa, M., et al. (1989) EMBO J. 8:23-29), convicilin, vicilin, and legumin (pea cotyledons) (Rerie, W. G., et al. (1991) Mol. Gen. Genet. 259:149-157; Newbigin, E. J., et al. (1990) Planta 180:461-470; Higgins, T. J. V., et al. (1988) Plant. Mol. Biol. 11:683-695), zein (maize endosperm) (Schemthaner, J. P., et al. (1988) EMBO J. 7:1249-1255), phaseolin (bean cotyledon) (Segupta-Gopalan, C., et al. (1985) Proc. Natl. Acad. Sci. U.S.A. 82:3320-3324), phytohemagglutinin (bean cotyledon) (Voelker, T. et al. (1987) EMBO J. 6:3571-3577), B-conglycinin and glycinin (soybean cotyledon) (Chen, Z-L, et al. (1988) EMBO J. 7:297-302), glutelin (rice endosperm), hordein (barley endosperm) (Marris, C., et al. (1988) Plant Mol. Biol. 10:359-366), glutenin and gliadin (wheat endosperm) (Colot, V., et al. (1987) EMBO J. 6:3559-3564), and sporamin (sweet potato tuberous root) (Hattori, T., et al. (1990) Plant Mol. Biol. 14:595-604). Promoters of seed-specific genes operably linked to heterologous coding regions in chimeric gene constructions maintain their temporal and spatial expression pattern in transgenic plants. Such examples include Arabidopsis thaliana 2S seed storage protein gene promoter to express enkephalin peptides in Arabidopsis and Brassica napus seeds (Vanderkerckhove et al., Bio/Technology 7:L929-932 (1989)), bean lectin and bean beta-phaseolin promoters to express luciferase (Riggs et al., Plant Sci. 63:47-57 (1989)), and wheat glutenin promoters to express chloramphenicol acetyl transferase (Colot et al., EMBO J 6:3559-3564 (1987)).

[0147] Inducible promoters selectively express an operably linked DNA sequence in response to the presence of an endogenous or exogenous stimulus, for example by chemical compounds (chemical inducers) or in response to environmental, hormonal, chemical, and/or developmental signals. Inducible or regulated promoters include, for example, promoters regulated by light, heat, stress, flooding or drought, phytohormones, wounding, or chemicals such as ethanol, jasmonate, salicylic acid, or safeners.

[0148] Promoters that can be used in the context of the current disclosure may include the following: 1) the stress-inducible RD29A promoter (Kasuga et al. (1999) Nature Biotechnol. 17:287-91); 2) the barley promoter, B22E; expression of B22E is specific to the pedicel in developing maize kernels (“Primary Structure of a Novel Barley Gene Differentially Expressed in Immature Aleurone Layers”. Klemsdal, S. S. et al., Mol. Gen. Genet. 228(1/2):9-16 (1991)); and 3) maize promoter, Zag2 (“Identification and molecular characterization of ZAG1, the maize homolog of the Arabidopsis floral homeotic gene AGAMOUS”, Schmidt, R. J. et al., Plant Cell 5(7):729-737 (1993); “Structural characterization, chromosomal localization and phylogenetic evaluation of two pairs of AGAMOUS-like MADS-box genes from maize”, Theissen et al. Gene 156(2):155-166 (1995); NCBI GenBank Accession No. X80206)). Zag2 transcripts can be detected 5 days prior to pollination to 7 to 8 days after pollination (“DAP”), and directs expression in the carpel of developing female inflorescences and CimI which is specific to the nucleus of developing maize kernels. CimI transcript is detected 4 to 5 days before pollination to 6 to 8 DAP. Other useful promoters include any promoter which can be derived from a gene whose expression is maternally associated with developing female florets.

[0149] Additional promoters for regulating the expression of the nucleotide sequences disclosed herein may include stalk-specific promoters such as the alfalfa S2A promoter (GenBank Accession No. EF030816; Abrahams et al., Plant Mol. Biol. 27:513-528 (1995)) and S2B promoter (GenBank Accession No. EF030817) and the like, herein incorporated by reference.

[0150] Promoters may be derived in their entirety from a native gene, or be composed of different elements derived from different promoters found in nature, or even comprise synthetic DNA segments.

[0151] In one embodiment the at least one regulatory element may be an endogenous promoter operably linked to at least one enhancer element; e.g., a 35S, nos or ocs enhancer element.

[0152] Promoters for use herein may include: RIP2, mLIP15, ZmCOR1, Rab17, CaMV 35S, RD29A, B22E, Zag2, SAM synthetase, ubiquitin, CaMV 19S, nos, Adh, sucrose synthase, R-allele, the vascular tissue preferred promoters S2A (Genbank accession number EF030816) and S2B (Genbank accession number EF030817), and the constitutive promoter GOS2 from Zea mays. Other promoters include root preferred promoters, such as the maize NAS2 promoter, the maize Cyclo promoter (US 2006/0156439, published Jul. 13, 2006), the maize ROOTMET2 promoter (WO05063998, published Jul. 14, 2005), the CR1BIO promoter (WO06055487, published May 26, 2006), the CRWAQ81 (WO05035770, published Apr. 21, 2005) and the maize ZRP2.47 promoter (NCBI accession number: U38790; GI No. 1063664),

[0153] Recombinant DNA constructs as disclosed herein may also include other regulatory sequences, including but not limited to, translation leader sequences, introns, and polyadenylation recognition sequences. In another embodiment, a recombinant DNA construct disclosed herein may further comprise an enhancer or silencer.

[0154] An intron sequence can be added to the 5′ untranslated region, the protein-coding region or the 3′ untranslated region to increase the amount of the mature message that accumulates in the cytosol. Inclusion of a spliceable intron in the transcription unit in both plant and animal expression constructs has been shown to increase gene expression at both the mRNA and protein levels up to 1000-fold. Buchman and Berg, Mol. Cell Biol. 8:4395-4405 (1988); Callis et al., Genes Dev. 1:1183-1200 (1987).

[0155] Any plant can be selected for the identification of regulatory sequences and genes to be used in recombinant DNA constructs, other compositions (e.g. transgenic plants, seeds and cells), and methods as disclosed herein. Examples of suitable plants for the isolation of genes and regulatory sequences and for compositions and methods disclosed herein may include but are not limited to alfalfa, apple, apricot, Arabidopsis, artichoke, arugula, asparagus, avocado, banana, barley, beans, beet, blackberry, blueberry, broccoli, brussels sprouts, cabbage, canola, cantaloupe, carrot, cassava, castorbean, cauliflower, celery, cherry, chicory, cilantro, citrus, clementines, clover, coconut, coffee, corn, cotton, cranberry, cucumber, Douglas fir, eggplant, endive, escarole, eucalyptus, fennel, figs, garlic, gourd, grape, grapefruit, honey dew, jicama, kiwifruit, lettuce, leeks, lemon, lime, Loblolly pine, linseed, mango, melon, mushroom, nectarine, nut, oat, oil palm, oil seed rape, okra, olive, onion, orange, an ornamental plant, palm, papaya, parsley, parsnip, pea, peach, peanut, pear, pepper, persimmon, pine, pineapple, plantain, plum, pomegranate, poplar, potato, pumpkin, quince, radiata pine, radicchio, radish, rapeseed, raspberry, rice, rye, sorghum, Southern pine, soybean, spinach, squash, strawberry, sugarbeet, sugarcane, sunflower, sweet potato, sweetgum, switchgrass, tangerine, tea, tobacco, tomato, triticale, turf, turnip, a vine, watermelon, wheat, yams, and zucchini.

### Compositions:

[0156] A composition as disclosed herein may include a transgenic microorganism, cell, plant, or seed comprising the recombinant DNA construct. The cell may be eukaryotic, e.g., a yeast, insect or plant cell, or prokaryotic, e.g., a bacterial cell.

[0157] A composition disclosed herein may be a plant comprising in its genome any of the recombinant DNA constructs disclosed herein. Compositions also include any progeny of the plant, and any seed obtained from the plant or its progeny, wherein the progeny or seed comprises within its genome the recombinant DNA construct. Progeny includes subsequent generations obtained by self-pollination or out-crossing of a plant. Progeny also includes hybrids and inbreds.

[0158] In hybrid seed propagated crops, mature transgenic plants can be self-pollinated to produce a homozygous inbred plant. The inbred plant produces seed containing the newly introduced recombinant DNA construct. These seeds can be grown to produce plants that would exhibit an improved agronomic characteristic, or used in a breeding program to produce hybrid seed, which can be grown to produce plants that would exhibit such an improved agronomic characteristic. The seeds may be maize seeds.

[0159] The plant may be a monocotyledonous or dicotyledonous plant, for example, a maize or soybean plant. The plant may also be sunflower, sorghum, canola, wheat, alfalfa, cotton, rice, barley, millet, sugar cane or switchgrass. The plant may be a hybrid plant or an inbred plant.

[0160] The recombinant DNA construct may be stably integrated into the genome of the plant.

[0161] In any of the embodiments described herein, the recombinant DNA construct may comprise at least a promoter functional in a plant as a regulatory sequence.

[0162] In any of the embodiments described herein, the at least one agronomic characteristic may be selected from the group consisting of: abiotic stress tolerance, greenness, yield, growth rate, biomass, fresh weight at maturation, dry weight at maturation, fruit yield, seed yield, total plant nitrogen content, fruit nitrogen content, seed nitrogen content, nitrogen content in a vegetative tissue, total plant free amino acid content, fruit free amino acid content, seed free amino acid content, free amino acid content in a vegetative tissue, total plant protein content, fruit protein content, seed protein content, protein content in a vegetative tissue, drought tolerance, nitrogen uptake, root lodging, harvest index, stalk lodging, plant height, ear height, ear length, salt tolerance, early seedling vigor and seedling emergence under low temperature stress.

[0163] One of ordinary skill in the art would readily recognize a suitable control or reference plant to be utilized when assessing or measuring an agronomic characteristic or phenotype of a transgenic plant in any embodiment described herein in which a control plant is utilized (e.g., compositions or methods as described herein). For example, by way of non-limiting illustrations:

1. Progeny of a transformed plant which is hemizygous with respect to a recombinant DNA construct, such that the progeny are segregating into plants either comprising or not comprising the recombinant DNA construct: the progeny comprising the recombinant DNA construct would be typically measured relative to the progeny not comprising the recombinant DNA construct (i.e., the progeny not comprising the recombinant DNA construct is the control or reference plant).
2. Introgression of a recombinant DNA construct into an inbred line, such as in maize, or into a variety, such as in soybean: the introgressed line would typically be measured relative to the parent inbred or variety line (i.e., the parent inbred or variety line is the control or reference plant).
3. Two hybrid lines, where the first hybrid line is produced from two parent inbred lines, and the second hybrid line is produced from the same two parent inbred lines except that one of the parent inbred lines contains a recombinant DNA construct: the second hybrid line would typically be measured relative to the first hybrid line (i.e., the first hybrid line is the control or reference plant).
4. A plant comprising a recombinant DNA construct: the plant may be assessed or measured relative to a control plant not comprising the recombinant DNA construct but otherwise having a comparable genetic background to the plant (e.g., sharing at least 90%, 91%, 92%, 93%, 94%, 95%, 96%, 97%, 98%, 99%, or 100% sequence identity of nuclear genetic material compared to the plant comprising the recombinant DNA construct). There are many laboratory-based techniques available for the analysis, comparison and characterization of plant genetic backgrounds; among these are Isozyme Electrophoresis, Restriction Fragment Length Polymorphisms (RFLPs), Randomly Amplified Polymorphic DNAs (RAPDs), Arbitrarily Primed Polymerase Chain Reaction (AP-PCR), DNA Amplification Fingerprinting (DAF), Sequence Characterized Amplified Regions (SCARs), Amplified Fragment Length Polymorphisms (AFLP®s), and Simple Sequence Repeats (SSRs) which are also referred to as Microsatellites.

[0164] Furthermore, one of ordinary skill in the art would readily recognize that a suitable control or reference plant to be utilized when assessing or measuring an agronomic characteristic or phenotype of a transgenic plant would not include a plant that had been previously selected, via mutagenesis or transformation, for the desired agronomic characteristic or phenotype.

### Methods:

[0165] Polynucleotides presented herein can be used to improve agronomic characteristics by providing for enhanced protein activity in a transgenic organism, preferably a transgenic plant, although in some cases, improved properties are obtained by providing for reduced protein activity in a transgenic plant. Reduced protein activity and enhanced protein activity are measured by reference to a wild type cell or organism, and can be determined by direct or indirect measurement. Direct measurement of protein activity might include an analytical assay for the protein, per se, or enzymatic product of protein activity. Indirect assay might include measurement of a property affected by the protein. Enhanced protein activity can be achieved in a number of ways, for example by overproduction of mRNA encoding the protein or by gene shuffling. One skilled in the art will know methods to achieve overproduction of mRNA, for example by providing increased copies of the native gene or by introducing a construct having a heterologous promoter linked to the gene into a target cell or organism. Reduced protein activity can be achieved by a variety of mechanisms including antisense, mutation or knockout. Antisense RNA will reduce the level of expressed protein resulting in reduced protein activity as compared to wild type activity levels. A mutation in the gene encoding a protein may reduce the level of expressed protein and/or interfere with the function of expressed protein to cause reduced protein activity.

[0166] The polypeptides may be involved in one or more important biological properties in plants. Such polypeptides may be produced in transgenic plants to provide plants having improved agronomic characteristics. In some cases, decreased expression of such polypeptides may be desired, such decreased expression being obtained by use of the polynucleotide sequences provided herein, for example in antisense or cosuppression methods.

[0167] Methods include but are not limited to methods for improving at least one agronomic characteristic in a plant, methods for determining an alteration of an agronomic characteristic in a plant, and methods for producing seed. The plant may be a monocotyledonous or dicotyledonous plant, for example, a maize or soybean plant. The plant may also be sunflower, sorghum, canola, wheat, alfalfa, cotton, rice, barley, millet, sugar cane or sorghum. The seed may be a maize or soybean seed, for example, a maize hybrid seed or maize inbred seed.

### Methods Include but are not Limited to the Following:

[0168] A method for transforming a cell (or microorganism) comprising transforming a cell (or microorganism) with any of the isolated polynucleotides or recombinant DNA constructs disclosed herein is provided. The cell (or microorganism) transformed by this method is also included. In particular embodiments, the cell is eukaryotic cell, e.g., a yeast, insect or plant cell, or prokaryotic, e.g., a bacterial cell. The microorganism may be Agrobacterium, e.g. Agrobacterium tumefaciens or Agrobacterium rhizogenes.

[0169] A method for producing a transgenic plant comprising transforming a plant cell with any of the isolated polynucleotides or recombinant DNA constructs disclosed herein and regenerating a transgenic plant from the transformed plant cell is also provided. A transgenic plant produced by this method, which may have at least one improved agronomic characteristic, and transgenic seed obtained from this transgenic plant are also provided. The transgenic plant obtained by this method may be used in other methods disclosed herein.

[0170] A method for isolating a polypeptide disclosed herein from a cell or culture medium of the cell, wherein the cell comprises a recombinant DNA construct comprising a polynucleotide disclosed herein operably linked to at least one regulatory sequence, and wherein the transformed host cell is grown under conditions that are suitable for expression of the recombinant DNA construct is provided.

[0171] A method of altering the level of expression of a polypeptide disclosed herein in a host cell is provided herein. The method comprises: (a) transforming a host cell with a recombinant DNA construct disclosed herein; and (b) growing the transformed host cell under conditions that are suitable for expression of the recombinant DNA construct wherein expression of the recombinant DNA construct results in production of altered levels of the polypeptide in the transformed host cell.

[0172] A method of selecting for (or identifying) an alteration of an agronomic characteristic in a plant, comprising (a) obtaining a transgenic plant, wherein the transgenic plant comprises in its genome a recombinant DNA construct comprising a polynucleotide operably linked to at least one regulatory sequence (for example, a promoter functional in a plant), wherein said polynucleotide encodes a polypeptide having an amino acid sequence of at least 50%, 51%, 52%, 53%, 54%, 55%, 56%, 57%, 58%, 59%, 60%, 61%, 62%, 63%, 64%, 65%, 66%, 67%, 68%, 69%, 70%, 71%, 72%, 73%, 74%, 75%, 76%, 77%, 78%, 79%, 80%, 81%, 82%, 83%, 84%, 85%, 86%, 87%, 88%, 89%, 90%, 91%, 92%, 93%, 94%, 95%, 96%, 97%, 98%, 99%, or 100% sequence identity, based on the Clustal V method of alignment, when compared to any of the SEQ ID NOs:44,181-72,254; (b) obtaining a progeny plant derived from said transgenic plant, wherein the progeny plant comprises in its genome the recombinant DNA construct; and (c) selecting (or identifying) the progeny plant that exhibits an alteration in at least one agronomic characteristic when compared to a control plant not comprising the recombinant DNA construct.

[0173] In another embodiment, a method of selecting for (or identifying) an alteration of at least one agronomic characteristic in a plant, comprising: (a) obtaining a transgenic plant, wherein the transgenic plant comprises in its genome a recombinant DNA construct comprising a polynucleotide operably linked to at least one regulatory element, wherein said polynucleotide encodes a polypeptide having an amino acid sequence of at least 50%, 51%, 52%, 53%, 54%, 55%, 56%, 57%, 58%, 59%, 60%, 61%, 62%, 63%, 64%, 65%, 66%, 67%, 68%, 69%, 70%, 71%, 72%, 73%, 74%, 75%, 76%, 77%, 78%, 79%, 80%, 81%, 82%, 83%, 84%, 85%, 86%, 87%, 88%, 89%, 90%, 91%, 92%, 93%, 94%, 95%, 96%, 97%, 98%, 99%, or 100% sequence identity, based on the Clustal V method of alignment, when compared to any of SEQ ID NOs:44,181-72,254, wherein the transgenic plant comprises in its genome the recombinant DNA construct; (b) growing the transgenic plant of part (a) under conditions wherein the polynucleotide is expressed; and (c) selecting (or identifying) the transgenic plant of part (b) that exhibits an alteration of at least one agronomic characteristic when compared to a control plant not comprising the recombinant DNA construct.

[0174] A method of selecting for (or identifying) an alteration of an agronomic characteristic in a plant, comprising (a) obtaining a transgenic plant, wherein the transgenic plant comprises in its genome a recombinant DNA construct comprising a polynucleotide operably linked to at least one regulatory element, wherein said polynucleotide comprises a nucleotide sequence, wherein the nucleotide sequence is: (i) hybridizable under stringent conditions with a DNA molecule comprising the full complement of any of SEQ ID NOs:1-44,180; or (ii) derived from any of SEQ ID NOs:1-44,180 by alteration of one or more nucleotides by at least one method selected from the group consisting of: deletion, substitution, addition and insertion; (b) obtaining a progeny plant derived from said transgenic plant, wherein the progeny plant comprises in its genome the recombinant DNA construct; and (c) selecting (or identifying) the progeny plant that exhibits an alteration in at least one agronomic characteristic when compared to a control plant not comprising the recombinant DNA construct.

[0175] A method of selecting for (or identifying) an alteration of an agronomic characteristic in a plant, comprising (a) obtaining a transgenic plant, wherein the transgenic plant comprises in its genome a suppression DNA construct comprising at least one regulatory sequence (for example, a promoter functional in a plant) operably linked to all or part of (i) a nucleic acid sequence encoding a polypeptide having an amino acid sequence of at least 50%, 51%, 52%, 53%, 54%, 55%, 56%, 57%, 58%, 59%, 60%, 61%, 62%, 63%, 64%, 65%, 66%, 67%, 68%, 69%, 70%, 71%, 72%, 73%, 74%, 75%, 76%, 77%, 78%, 79%, 80%, 81%, 82%, 83%, 84%, 85%, 86%, 87%, 88%, 89%, 90%, 91%, 92%, 93%, 94%, 95%, 96%, 97%, 98%, 99%, or 100% sequence identity, based on the Clustal V method of alignment, when compared to any of SEQ ID NOs:44,181-72,254, or (ii) a full complement of the nucleic acid sequence of (i); (b) obtaining a progeny plant derived from said transgenic plant, wherein the progeny plant comprises in its genome the suppression DNA construct; and (c) selecting (or identifying) the progeny plant that exhibits an alteration in at least one agronomic characteristic when compared to a control plant not comprising the suppression DNA construct.

[0176] A method of producing seed comprising any of the preceding methods, and further comprising obtaining seeds from said progeny plant, wherein said seeds comprise in their genome said recombinant DNA construct (or suppression DNA construct).

[0177] A method for introducing any of the polynucleotides disclosed herein into a target site in the genome of a plant cell is also provided. The method comprises (a) introducing into a plant cell one recombinant DNA construct capable of expressing a guide RNA and another recombinant DNA construct capable of expressing a Cas endonuclease, wherein said guide RNA and Cas endonuclease are capable of forming a complex that enables the Cas endonuclease to introduce a double strand break at said target site; (b) contacting the plant cell with a donor DNA comprising a polynucleotide of interest, wherein said polynucleotide of interest is any of the polynucleotides disclosed herein; and (c) identifying at least one plant cell that has the polynucleotide of Interest integrated into the target site.

[0178] Other methods to modify or alter the host endogenous genomic DNA are also available. This includes altering the host native DNA sequence or a pre-existing transgenic sequence including regulatory elements, coding and non-coding sequences. These methods are also useful in targeting nucleic acids to pre-engineered target recognition sequences in the genome. As an example, the genetically modified cell or plant described herein, is generated using “custom” or engineered endonucleases such as meganucleases produced to modify plant genomes (see e.g., WO 2009/114321; Gao et al. (2010) Plant Journal 1:176-187). Another site-directed engineering is through the use of zinc finger domain recognition coupled with the restriction properties of restriction enzyme. See e.g., Urnov, et al., (2010) Nat Rev Genet. 11(9):636-46; Shukla, et al., (2009) Nature 459 (7245):437-41. A transcription activator-like (TAL) effector-DNA modifying enzyme (TALE or TALEN) is also used to engineer changes in plant genome. See e.g., US20110145940, Cermak et al., (2011) Nucleic Acids Res. 39(12) and Boch et al., (2009), Science 326(5959): 1509-12.

[0179] In any of the preceding methods or any other embodiments of methods disclosed herein, in said introducing step said regenerable plant cell may comprise a callus cell, an embryogenic callus cell, a gametic cell, a meristematic cell, or a cell of an immature embryo. The regenerable plant cells may derive from an inbred maize plant.

[0180] In any of the preceding methods or any other embodiments of methods disclosed herein, said regenerating step may comprise the following: (i) culturing said transformed plant cells in a media comprising an embryogenic promoting hormone until callus organization is observed; (ii) transferring said transformed plant cells of step (i) to a first media which includes a tissue organization promoting hormone; and (iii) subculturing said transformed plant cells after step (ii) onto a second media, to allow for shoot elongation, root development or both.

[0181] In any of the preceding methods or any other embodiments of methods disclosed herein, the at least one agronomic characteristic may be selected from the group consisting of: abiotic stress tolerance, greenness, yield, growth rate, biomass, fresh weight at maturation, dry weight at maturation, fruit yield, seed yield, total plant nitrogen content, fruit nitrogen content, seed nitrogen content, nitrogen content in a vegetative tissue, total plant free amino acid content, fruit free amino acid content, seed free amino acid content, amino acid content in a vegetative tissue, total plant protein content, fruit protein content, seed protein content, protein content in a vegetative tissue, drought tolerance, nitrogen uptake, root lodging, harvest index, stalk lodging, plant height, ear height, ear length, salt tolerance, early seedling vigor and seedling emergence under low temperature stress. The agronomic characteristic may be abiotic stress tolerance, such as for example, tolerance to nutrient deprivation (e.g. nitrogen) or to drought.

[0182] In any of the preceding methods or any other embodiments of methods disclosed herein, alternatives exist for introducing into a regenerable plant cell a recombinant DNA construct comprising a polynucleotide operably linked to at least one regulatory sequence. For example, one may introduce into a regenerable plant cell a regulatory sequence (such as one or more enhancers, optionally as part of a transposable element), and then screen for an event in which the regulatory sequence is operably linked to an endogenous gene encoding a polypeptide disclosed herein.

[0183] The introduction of recombinant DNA constructs disclosed herein into plants may be carried out by any suitable technique, including but not limited to direct DNA uptake, chemical treatment, electroporation, microinjection, cell fusion, infection, vector-mediated DNA transfer, bombardment, or Agrobacterium-mediated transformation. Techniques for plant transformation and regeneration have been described in International Patent Publication WO 2009/006276, the contents of which are herein incorporated by reference.

[0184] The development or regeneration of plants containing the foreign, exogenous isolated nucleic acid fragment that encodes a protein of interest is well known in the art. The regenerated plants may be self-pollinated to provide homozygous transgenic plants. Otherwise, pollen obtained from the regenerated plants is crossed to seed-grown plants of agronomically important lines. Conversely, pollen from plants of these important lines is used to pollinate regenerated plants. A transgenic plant disclosed herein that contains a desired polypeptide can be cultivated using methods well known to one skilled in the art.

### EXAMPLES

[0185] The present invention is further illustrated in the following Examples, in which parts and percentages are by weight and degrees are Celsius, unless otherwise stated. It should be understood that the Examples, while indicating embodiments of the invention, are given by way of illustration only. From the above discussion and the Examples, one skilled in the art can ascertain the essential characteristics of this invention, and without departing from the spirit and scope thereof, can make various changes and modifications of the invention to adapt it to various usages and conditions. Thus, various modifications of the invention in addition to those shown and described herein will be apparent to those skilled in the art from the foregoing description. Such modifications are also intended to fall within the scope of the appended claims.

### Example 1

### Prediction of Novel Transcripts

[0186] In order to discover and map novel transcripts in maize, 94 paired-end RNA seq libraries were constructed from 5 week old leaves of three B73, three Mo17 and 88 intermated B73×Mo17 (IBM) Syn10 double haploid (DH) lines. The IBM mapping population was originally created through ten generations of B73 and Mo17 intermating, followed by double haploid generation and resulted in a population containing highly recombinant fixed alleles (Hussain et al. 2007. Journal of Plant Registrations 1:81). More than six billion genome-matched reads were obtained (Table 1).

[0187] Transcript discovery was also augmented by the inclusion of 142 publically available B73 RNA seq libraries originating from 14 different tissue types, totaling over two billion genome-matched reads (Table 2). All libraries were genome matched using Tophat2 (Kim et al. 2013. Genome Biology 14(4):R36), followed by novel isoform discovery using the Cufflinks pipeline (Trapnell et al. 2010. Nature Biotech 28(5):511-515) with a working set of 137,000 annotated public maize (Gramene release 5a).

TABLE 1
Summary statistics for B73, Mo17, and IBM RNA seq libraries

| Description | Genotype | Libraries | Total Reads | Genome Matched |
|---|---|---|---|---|
| B73 | B73 | 3 | 252,961,366 | 249,428,288 |
| Mo17 | Mo17 | 3 | 405,071,583 | 393,962,382 |
| IBM | IBM | 88 | 5,795,253,356 | 5,599,170,515 |

TABLE 2
Summary statistics for RNA seq libraries

| Description | Genotype | Libraries | Total Reads | Genome Matched |
|---|---|---|---|---|
| Anther | B73 | 1 | 38,074,756 | 36,554,492 |
| Ear | B73 | 4 | 104,293,259 | 98,987,393 |
| Embryo | B73 | 7 | 60,710,425 | 55,861,189 |
| Endosperm | B73 | 13 | 144,540,885 | 131,347,944 |
| Leaf | B73 | 42 | 664,025,044 | 618,671,115 |
| Ovule | B73 | 1 | 36,964,181 | 35,379,281 |
| Pollen | B73 | 1 | 38,623,695 | 37,342,145 |
| Root | B73 | 18 | 296,713,582 | 272,807,740 |
| SAM | B73 | 10 | 148,544,984 | 135,325,790 |
| Seed | B73 | 20 | 346,866,162 | 320,235,834 |
| Seedling | B73 | 2 | 23,661,408 | 22,675,374 |
| Shoot | B73 | 14 | 136,391,616 | 121,490,509 |
| Silk | B73 | 1 | 24,398,322 | 23,372,552 |
| Tassel | B73 | 8 | 175,790,705 | 166,472,788 |

[0188] Isoform prediction from public data and the IBM population were initially carried out as two separate analyses, yet generated a novel isoform set with a high degree of overlap. Merging of the two predicted novel isoform sets resulted in 92,079 potential novel isoforms of annotated transcripts and 11,524 new transcripts (length>50) originating from intergenic regions.

### Example 2

### Comparison of Novel Transcripts with an Artificial Randomly Generated Set

[0189] In order to assess the quality and ideal abundance cutoff for novel isoforms, a set of artificial isoforms based on known transcripts was created. One artificial isoform was randomly generated for each annotated transcript by modification of the known transcript based on alternative splicing categories: intron retention, exon skipping, alternative donor, alternative acceptor and alternative position. The 137,000 artificial transcripts each differed from a known transcript by one random splicing modification, making them an ideal set to compare against.

[0190] To determine an abundance cutoff for novel isoforms, known and randomly generated transcripts were quantified using Cuffdiff (Roberts et al. 2011. Bioinformatics 27(17):2325-2329) in the fourteen public libraries, as well as B73, Mo17 parents and IBM DH lines. Cutoffs ranging from 0.01 to 10 FPKM (Fragments Per Kilobase of transcript per Million mapped reads) were applied and the fraction of transcripts having expression above each cutoff in at least one tissue was determined. At an extremely low expression cutoff of 0.01 FPKM, 72% of known transcripts were expressed in at least one tissue, while 57% of artificially generated transcripts were similarly expressed. Taking 0.01 as the basal expression level, the loss of known transcripts as the abundance cutoff increased (false negatives) was then plotted against the loss of artificial transcripts (i.e. false positives). In order to maximize the retention of known transcripts and minimize the retention of artificial ones, 1.3 FPKM was chosen as the expression cutoff. After application of this strict abundance filter to the novel transcripts generated via Cufflinks, 7,524 isoforms arising from completely novel genes and 36,656 novel isoforms of known genes were discovered; the cDNA sequences corresponding to the novel transcripts are represented by SEQ ID NOs:1-44,180. The 28,074 novel proteins encoded by the newly identified isoforms/genes are represented by SEQ ID NOs:44,181-72,254. Table 3 provides the isoform identifier associated with each SEQ ID NO.

### Example 3

### Effect of New Transcripts on Maize Proteome

[0191] In order to determine their effect on the maize proteome, proteins encoded by novel isoforms of known genes were compared to proteins generated by their most similar annotated transcript.

[0192] Most frequently (35% of new transcripts), the novel proteins were truncated at their N or C terminus. Such is the case for 3BETAHSD/D2 (GRMZM2G149224), which encodes an endoplasmic reticulum-localized enzyme involved in sterol synthesis. The annotated protein contains both the catalytic and ER association domains, while the newly identified isoform lacks the ER domain.

[0193] Seven percent of the novel proteins were extended by 10% or more from either terminus, gaining new functional domains. This group included Ire1 (GRMZM2G162167), a highly conserved gene which is crucial for the unfolded protein response (UPR) under stress (Shamu and Walter. 1996. EMBO Journal 15(12):3028-3039; Bernales et al. 2006. Annual Review of Cell and Developmental Biology 22:487-508). It has been shown in yeast and mammalian systems that IRE1 is activated when it forms homodimers via the interaction of its luminal dimerization domains. After activation, IRE1 catalyzes splicing of a transcription factor that activates UPR genes. In maize, the annotated IRE1 homologue lacks the dimerization domain; however, a newly identified isoform was found to have an extension at the 5′ end of the gene and thus encodes the missing domain.

[0194] Novel proteins also had internal domains added, removed, or substituted without shifting their reading frames. The annotated WALL ASSOCIATED KINASE 3 (WAK3, GRMZM2G050536), for instance, lacks an EF hand calcium binding activation domain in the middle of the protein, which a novel transcript encodes. Another new transcript (GRMZM2G099355) codes for a new isoform of PRP8 which differs from the annotated version because it retains a nuclear localization signal, core spliceosome interaction domain and DEAD-box binding domain, but lacks RNA and U5/U6 interaction domains.

[0195] Eleven percent of the novel proteins had less than 25% identity with any portion of the protein generated by their most similar annotated transcript and could have completely distinct functions. GRMZM2G119248, for example, encodes two annotated transcripts which translate into an asparagine synthase, but two new isoforms were discovered which instead encode a putative bromodomain-containing transcription factor. Although both transcripts share a large amount of overlap, differences in translation start site cause the 3′ UTR of the annotated transcripts to become the coding region of the novel transcripts, resulting in entirely different proteins. In most tissues the asparagine synthase transcripts predominate, but in pollen and anther one of the transcription factor-encoding isoforms is exclusively expressed.

[0196] Finally, 14% of the novel transcripts encoded proteins which were identical to those generated by their most similar known transcripts. However, the transcripts possessed different UTRs, which may affect their stability and regulation by miRNAs.

### Example 4

### Effect of New Transcripts on the Maize microRNA Target Landscape

[0197] In order to assess how known miRNAs interact with the new isoforms and genes, miRNA targets were first predicted against all annotated transcripts using previously described methods (Fahlgren et al. 2007. PloS One 2(2):e219). Using a miRNA/target pairing score cutoff of 3.0, 393 known genes encoding 1719 known isoforms were predicted targets of at least one annotated maize miRNA. Inclusion of the novel transcripts resulted in 50 new genes and 72 new isoforms which are potential miRNA targets. Most genes which gained miRNA complementarity were the result of novel transcripts with IR, such as GRMZM2G357595, which produces two novel transcripts with miR159-sensitive retained introns. Both novel isoforms are expressed at lower levels than the annotated transcripts arising from this gene, but other transcripts which gained miRNA target sites were actually the predominant isoform in specific tissues. Interestingly, this set included two SPX domain-containing genes (GRMZM2G086430, GRMZM2G018018). MiR827 has a very well-established role in nutrient level-based regulation of SPX domain proteins in many other systems (Hsieh et al. 2009. Plant Physiology. 151(4):2120-2132; Lin et al. 2010. Plant and Cell Physiology 51(12):2119-2131), but in maize, the known annotated transcripts for the two SPX domain-containing genes did not include regions of miR827 complementarity. Novel transcripts were discovered for both genes that include UTRs which are targets of miR827. The new isoform for each gene codes for the same protein as the annotated transcripts, with the only variation occurring in the 5′ UTR where miR827 binds. The relative expression levels of the GRMZM2G086430 isoforms varied by tissue, with some tissues predominantly expressing the miR827-sensitive isoform and others the miR827-insensitive isoform.

[0198] Novel isoforms that were similar to known transcripts with established miRNA target sites were also examined for the loss of their target site. Thirty novel isoforms were found to have lost a miRNA binding site relative to their most similar annotated isoform, potentially altering their expression pattern significantly. Interestingly, this group included another SPX domain-containing gene, GRMZM2G166976, which was found to produce a novel miR827-insensitive transcript with broad tissue expression. GRF5 (GRMZM2G034876), a member of the well-conserved growth regulating factor family whose regulation by the miR396 family is crucial for development (Debernardi et al. 2012. PLoS Genetics 8(1):e1002419), was also found to produce a novel insensitive target. Three annotated isoforms of GRF5 were known in maize, two additional novel isoforms were identified herein. The exon targeted by the miR396 family is skipped in one new isoform, completely removing the ability of miR396 to regulate it. This miR396-insensitive isoform is expressed at its highest levels in silk and ovule, while miR396-sensitive isoforms predominate in most other tissues. Several completely new genes were also found to be targets of known miRNAs, one of which is a predicted target of both miR164c and miR164h. Examination of the expression of this gene revealed that it is exclusively expressed in pollen, where the miR164 family is thought to play a developmental role (Valoczi et al. 2006. The Plant Journal: for cell and molecular biology 47(1):140-151).

### Example 5

### Mapping of Genotype-Specific Alternative Splicing QTLs

[0199] In order to examine genes which were differentially spliced in a genotype-dependent manner, Cuffdiff was run using B73 and Mo17 parent libraries. The initial analysis revealed 328 statistically significant (q<0.05) alternatively spliced genes. The majority of the genes had isoform expression patterns that segregated cleanly in the IBM population. Both parents and 88 IBM DH lines were then genotyped with an Illumina MaizeSNP50 DNA Analysis Kit (Illumina) in order to enable subsequent mapping. The relative percentage that each isoform represents of total gene expression was mapped using Spotfire (Kaushal and Naeve. 2004. Current protocols in bioinformatics/editoral board, Andreas D Baxevanis [et al] Chapter 7: Unit 7 9), with a minimum of 5% of total gene expression in at least 10 IBM lines required. In total, the relative expression of 623 isoforms was mapped using this method, covering 235/328 (72%) of the genes which Cuffdiff determined to be differentially spliced between B73 and Mo17 genotypes. The isoforms included 320 computationally predicted novel transcripts, further increasing confidence in their annotation.

[0200] The relative isoform expression patterns of the majority of genes, with differential splicing between B73 and Mo17 genotypes (87%), mapped to the region surrounding their gene's annotated location with a median p-value of 1.1×10-12. Some of the genes with cis-acting QTLs were putative splicing factors, including GRMZM2G154278, whose human ortholog (CWC15) has been implicated as a component of the spliceosome that plays a role in cell cycle control (Hegele et al. 2012. Molecular Cell 45(4):567-580). GRMZM2G154278 has two known isoforms, and two novel isoforms were identified herein. Of the four isoforms, one annotated and one predicted isoform were abundant enough in the IBM population to attempt mapping. While B73 predominantly expresses the annotated isoform, Mo17 exclusively expresses a novel isoform which translates into a truncated and likely non-functional splicing protein, potentially contributing to the differential splicing. This expression pattern segregated very cleanly in the IBM population, and both isoforms mapped to the region surrounding GRMZM2G154278, indicating that splicing of this gene is under the control of strong cis-acting elements.

[0201] A smaller number of isoforms (13%) mapped to a location distant from the gene that encodes them with a median p-value of 9.7×10-8, representing possible trans-acting alternatively spliced QTLs. The trans-acting QTLs were distributed evenly across the genome, and 53% of them were within 10 MB of at least one of the 79 genes falling into GO categories associated with splicing. In Arabidopsis, more than 200 proteins are thought to be involved in spliceosome assembly and regulation (Reddy et al. 2013. The Plant Cell 25(10):3657-3683; Staiger and Brown. 2013. The Plant Cell 25(10):3640-3656). The other 47% of trans-acting QTLs that did not map near known splicing factors likely represent unidentified maize splicing genes, which could be further examined in the future by fine mapping. Genes with trans-acting QTLs are exemplified by the conserved myosin tail binding protein GRMZM2G136455, which is thought to be involved in Golgi vesicle-mediated transport (Hashimoto et al. 2008. Journal of Experimental Biology. 59(13):3523-3531). Maize encodes two annotated isoforms which have identical protein translations but different 3′ UTRs. Both isoforms are expressed in all B73 tissues surveyed, but GRMZM2G136455 isoform two has no detectible expression in Mo17. GRMZM2G136455's isoform expression segregates nearly as cleanly as genes with cis-acting QTLs, and both isoform expression patterns map to the same location the genome (Chr1: 208,941,992). Manual examination of the markers surrounding this region reduced the interval to a 2.2 million base pair region centered on Chr1: 209,301,649. There are 115 annotated genes within this region, many of which have unknown functions and could represent novel splicing factor candidates for future fine mapping efforts.

[0202] Although the majority of isoforms in the IBM population had expression patterns similar to either B73 or Mo17, a small number of transcripts which were significantly expressed in both parents were not present in some IBM lines. 144 transcripts which had expression at or above 1.3 FPKM in all six parent libraries but had expression below the cutoff in at least ¼ of the DH lines were mapped using SpotFire. In total, 42 (30%) were able to be mapped, with 17 cis-acting QTLs and 25 trans-acting QTLs. Examination of the genes encoding these transcripts revealed that nearly half expressed other isoforms in the DH lines which lacked expression of the transcript of interest, indicating that the loss of expression was the result of differential splicing. Interestingly, three different transcripts had identical mapping profiles, with two trans-acting peaks located on chromosomes 5 and 7. These transcripts were expressed at a high level in both parents, but were nearly absent in some DH lines.

[0203] A small number of transcripts were not expressed in either parent but were abundant in many IBM lines. The abundance of isoforms which had no expression in B73 and Mo17 but expression above 1.3 FPKM in at least 10% of the IBM lines was mapped using Spotfire. In total, the expression pattern of 44 out of 165 isoforms was mapped successfully. Only 7 of the 44 transcripts appeared to be the result of differential alternative splicing, with the majority coming from genes which were also only expressed in the IBM lines. The mapping pattern of the IBM-specific transcripts differed substantially compared to isoforms which had parental expression. While only 13% of isoforms with parental expression had significant trans-acting QTLs, 75% of the IBM-specific isoforms had strong trans-acting QTLs.

[0204] The majority of the 45 transcripts mapped to three distinct QTLs, with 11 transcripts from 9 different genes all mapping to the same location on chromosome 4. A detailed examination of DH lines with recombination in this region narrowed the potential interval to a 6 MB region centered on chr4:29,639,340. All but 5 DH lines with the Mo17 allele at this locus expressed the 11 transcripts to some degree while no lines with the B73 allele did. Given that the parents did not possess any of the 11 isoforms whose expression was tied to the Mo17-dependent trans-acting QTL, this allele alone could not be sufficient to explain their presence. The interval surrounding each of the genes encoding these transcripts was examined to determine any bias towards B73 or Mo17 markers. This analysis revealed a slight but consistent bias, with all lines expressing the isoforms having a higher ratio of B73 to Mo17 markers than those that did not express the isoforms (average 1.6 fold). The small magnitude of this difference implies that there are likely multiple factors leading to the expression of these isoforms, with the Mo17 chromosome 4 trans-acting QTL being the strongest and individual B73 cis-acting QTLs playing more minor roles.

### Example 6

### Novel Isoforms of Genes that are Alternatively Spliced Under Low Nitrogen Stress

[0205] B73 and Mo17 plants were grown hydroponically to five weeks under either 10 mM nitrate (control) or 1 mM nitrate (low nitrogen). Leaves were harvested and RNA was extracted and then used to create RNA seq libraries. The RNA seq data was analyzed using the Tuxedo pipeline and Cuffdiff was used to detect statistically significant alternative splicing comparing control to low nitrogen in B73 and Mo17. Genes with significance values of q≦0.05 were considered differentially spliced. 2,283 new transcripts coming from 647 genes were implicated in low nitrogen splicing; the transcripts are identified in Table 4.

### Example 7

### Novel Isoforms of Genes that are Alternatively Spliced Under Drought Stress

[0206] Four different inbreds (B73, PHR03, PH17RM and PH1CJB) were grown under both drought and well-watered conditions. Four biological replicates from both ears and leaves at four different stages (V10, V14, V16, R01) were harvested from each genotype. RNA was extracted and used to create RNA seq libraries. The RNA seq data was analyzed using the Tuxedo pipeline and Cuffdiff was used to detect statistically significant alternative splicing comparing control to drought in each genotype. Genes with significance values of q≦0.05 were considered differentially spliced. 16,537 new transcripts coming from 7,326 genes were implicated in drought splicing; the transcripts are identified in Table 5.

The application's sequence listing, which the Patent Office published only in electronic form, follows.

SEQUENCE LISTING (72254 sequences)

SEQ ID NO: 1 - DNA, 2651 bp, Zea Mays
ggcagttctctccacgggtagcatgttcaggaagatcgtaaaggatgtcgtcataaagtttcaggtgctgaaaccaagatggttaatttcggtaagaaattgatggcagaccagttggaggagtggcgagagtactatattaattataagatgatgaagaaaaaggtaaaacagtatgtacagcagacccaaactggtggaaaaaatcgtgaccaggttcttaaggagttctcaaggatgcttgatgatcagattgaaaagattgtgctatttcttctgcaacaacaaggtcatcttgctaggaggatcgagaatttaggagaacagcgtgtcgtgcttatggaacggtctgatgtatcccaaatttgtcaaatacgccaggcttacagggaagttggatatgatcttgtgaagctacttaggtttcttgattcgaacgctactggtatccggaagatacttaagaagttcgataagcgctttggctataagtttacagattattacgtctctactcgagcaaaccatccttattctcagctccagcagatcttcaagcaagtgggagtcgtggctgttgttggtgctttgtctcgcaacctttcttatctacaagatcatcaaggaagcctagcaaatatctatgattacccatcactcatcttgaaggatcccgtcatagaacaaataaatcactcagtacagaaactcacacactccacaagctttctgcaatttctagggcagcatgcacttatcgttccgggggatatgcagagcggctcagatctcggtgatgacaaggattaccatttcctgtcactgctgctgaacctagtaaacacgtttctgtacatggttaacacatacatcatcgttccaactgccgatgactattcagtaagcctcggagctgcagcgactgtttgcggtgtgattatcggatcaatggcagttgcacaaatcttctcctcggtatatttcagtgcctggtcgaacagatcgtacttcagacccctcgtatttagctgcatcatgttgtttctggggaacctattgtatgctttggcatacgatctgaattccctaactgttcttattgctggccggctactgtgcggtttgggttcggccagagccgtgaaccgccgctacatcagcgactgtgtacccctgaaaaccaggctgcaggcgtcggctgggtttgtcagcgctagcgctcttggaatggcatgtggtcccgctcttgccggtctgctgcagacaaagtttaagatttatgggcttacattcaatcagaacaccttgcctgggtgggtcatgtgccttgcttggattgcatatttgttctggctgtggatttcattcaaagagccgggccacattgccacagagaattcagtcagcacgcaatcatctgattctggccgtcgagtaagcggtaacttggagggtggcctcggagagcctttgctcatagacgcaaaggcagggcaggatgaggacgacgaggacaatgacgaccccgaagaatctcatacacctgccacatcgcttgctgcagcatacagattgctgacaccatctgtgaaggttcagctactgatctacttcatgctcaagttcgccatggaaatcctactctcggagtcgagtgtcgtgaccacgttctatttcaagtggacaactagtaccgtggcgatctttctggcagttcttggtctgacggttctcccagttaatgtcatcgttgggagctacgtcaccaacctgttccaggacaggcaaatcctggtggcctccgagatcatggtgttgatcggcatcgtcatgagcttctgcttcacccctcactactccgtcccccagtatgtcacgtcagctctcatcacgttcgtgttcgccgaggtgctcgaaggggtgaacttgtccctcctctcccgcgtgatgtcgtcgaggctctcccgcgggacctacaacggcgggctgctctcgacggaggccggcacgctggcccgcgttgccgctgacatgaccatcacggccgctggctatctggggcagggccgcctcctgaacgccaccctcctgccgtccttggtgatctgtctagcatctatcgtcgcgacgttctgcacttacaactcactctactgattaccggtcgatgaactcctctccctcttatacaagttgccgaattgcgtcttgcagtgacgctgaaaattttcgggctgctgctgctaatgtaaactgctgcggcctgcgggtggacgagcggtccatgtgtatcgacgcctgtagtgttgcgaacttgctacggctgtaacatgacacgtgcgcgttaaataaaatgccctactgaagtaccctgtcatcgctcctcatgtgtcggcccagcccaacaattgcattaccaggaaggcaggaagagctctcgtcctcggactgcaagaatcctgtcctcacccccacatcgccttcctgctattctccccttcggttgctgacatggcaagttcaaaattgccgttagggtttcaagttcagaaattcatttgccagattccttgaataggatatactagcactgaacaccatacatgtttgagtgttgatgcgaggcaccgcgcgaacacaaggttgttgcg

SEQ ID NO: 2 - DNA, 545 bp, Zea Mays
agccaactgccaacccgaccgcgtcgcctctctcctcctttcgcgtcgtctccctcctccactctcctctcctctcgcgtccgcagcttcccttgccggctagggtttgcagatgacgacggcggcgcgccccacctgggcgccggccaagggcggcaacgagcaagggggcacccgcatcttcggcccctcccagaagtactcgtcccgcgacctcgccgcgcatacctcgctcaagctcagaaaagacggtcaacagacccaagaggagttacagaagaggaatctcagggaggaacttgaggaacgtgagcgcaagcactactcttccaaggataagtcctatgctgaaagagaccggcggaaaagctcaagccagctactcctagaaggttcaaagagagaggcagaggataagatagttccacgagaaatcgatgcagatgactccgatgtggagcctaaaagtgatgatgagagagaagacaacacggcatctttcttgacattgtttaggcaaatatcttatttcggccgtagttcca

SEQ ID NO: 3 - DNA, 1428 bp, Zea Mays
gcgcgaggcagacagcgacgcagagagagacaaagcgggcaataaaggcagccgcgcgcgagcgagggaagggagcgaagcaaagcacatcacgagcccagcctgcgcctgcggagggagggggctcattaaagagggggcgcgagcgcgaccggccgcggggagcaagcagcgcgcgagagagacaggttgagatggcgatgccgtatgcctctctttccccggcaggcgccgccgaccaccgctcctccacagccacggcgtccctcgtccccttctgccgctccactccgctctccgcgggcggcgggctgggcgaggaggacgcccaggcgagcgcgaggtggccggccgcgaggccggtggtgccgttcacgccggcgcagtaccaggagctggagcagcaggcgctcatatacaagtacctggtggcgggcgtgcccgttccgccggatctcgtggttccaatccgccgcggcctcgactccctcgcaacccgcttctacggccaacccacacgtacaacgcttacggaataagatctctggcggacgagcacaaccagctgatcgcagaagccatcgactcgtcgatagagagccagtggcgcctccccagctcgtcgttcccgctctcgagctacccacatctcggggcgctgggcgacctgggcggccagaacagcacggtgagctcgctgccgaagatggagaagcagcagccgccctcgtccttcctagggaacgacaccggggccggcatggccatgggctccgcctccgcgaagcaggagggccagacgctgcggcacttcttcgacgagtggcccaaggcgcgggactcctggccgggcctctccgacgagaccgccagcctcgcctcgttccccccggcgacccagctgtcgatgtccatacccatggcgtcctccgacttctccgtggccagctcccagtcgcccaacgatgactaatggtgcgtggatcgtcgcgttctggccctttgtctgtcttccctccagtcctccacccaccgcgcagtagtagctgcggaaacagcccatgctcctgtatatttgtcggtcattttccgtgtcagatctgtgtaccaaaccaagcggcggcggccgtcgtctctccccgcctccgcctcgcctcatgtgggtgggtgaacatgagaccgttttgcttaggctcaaagctttgtgtgaccccactgatcggttgtctgcgtactacctgaaagcctgctgcttttgtagcattactgtgacacatcgaccgaagaaaggcaggaacgaacagtggagcaacatgacgcgtccatgcttctcttgtgctgcctgttccccgatctgcatggatgagagctttactgttaccatcatcaccaccatcaatatgcgtgcgcctgtagctgagatgagct

SEQ ID NO: 4 - DNA, 1863 bp, Zea Mays
ctgagaccctgacctgatcgcgcgagctataaatacccaccactgtcccggcgggccttcctcccgcccgctcgcctcctgtcttggactggacagcagcacgggcgcgcgcacggcagtagctgcgccattgcacgcctccggccggccgctgctgtgctgccgccgcacacccgtcctcgcaccgcactgtgtgtgcctcgtcctccacgcggcagaaggtgctgatccgttgcaggtttggcgcgccaccgcgtatgctcgctcgcgtttgctgatgttcatctaattctatccgcggccgaaagagcaattgtccgcgcgcggaggggcggccggcggccggcggcggcgaagggagagatttctactcaaggctatcaaattctttatcttcagtttcagactgttatttgtgacgtcaagatggttaatttcggaaagaaattgatggccgatcaagtggaagaatggaaaggatactacatcaattacaagctgatgaagaaaatgttaaagcaatatgtccaacagacccagcatggtgggaaagatcgtgaacaagttcttaaagagttttcaaggattcttgatgaccagattgaaagaatcgtgctttttctgctacaacaacaaggccatcttgccagtaggattgaggaattgggagaaaaacgctctgctctggaagagtatgacatatcacaagtttatcagctacatgatgcatacagagaagtcgggcttgatcttataaagcttctccgctttgttgacgtgaatgctaccggtatacgcaagatactaaagaaatttgataaacgctttggctacaagttcactgattattatgtcaccactcgcgcaaatcatccttattctcagcttcagcaagtctttaagcaagtgggaattgtagctgttgtaggtgcattatcgcgcaaccttgaatatctgcaacatcatgaaggaagctttgtatccatctatgatcgtccagcagttactttgaaggaccctattatagaccaagtaaaccatgcagtacagaagctcacgcatgccacgaattttatgcaattcttgggacaacactcgcttattgtccaggaagatgcacaaagcgggtcagaggaccttgttgatgatcagagctaccatttcatgtcgctgatgcttaatctagtgaacacattcctttacatggtgaatacatatatcattgtgccgactgcagatgactatgcagtaagccttggggctgctgcaactgtctgtggtataattattggatcgatggcagtcgctcaagttttctcctcagtctacttcagcgcctggtcaaataagtcctacttcaaacctcttgtattcagtagcattgtgctgtctcttggaaacctgctgtatgcattggcatttgatctaaattcactgtcagttctcctaattggacgactgttatgcgggttaggctctgcaagagcagtgaaccgtcgctatatcagtgactgtgtgcctctcaagatgaggctacaagcctctgccgggttcgttagtgctagcgctcttggcatggcatgtgggcctgctctggctggttttctccagactaaattcaagatatactcgatcacttttaatcagagcacattgcctggatgggttatgtgcattgcttggcttatttacttactgtggctatggtttacattcaaggagccggaacacttcactaaaactttggtcaatgaacatccatcagaatcaggtcgccaaggaaattctaacttggaggaaggtctagctcaaccattgcttctaggtgtagaacagaggcaggatgagaactcagacgataga

SEQ ID NO: 5 - DNA, 2630 bp, Zea Mays
ctgccctgcacgcggctataagtacccaccgccatctcactttgcccagcagcacggcagtagctgcgccattgcacgcctccggccggcggctgcttgtcttgctgcttctgccgcacatccgtgatccggcagaaggtgcttcgttcgttgcaggcctggcgccacgccgtaccgtgcaagcgcgtttgctgatgttcatctaattactgtataataatatctccgggcgaaagagctagcaatcgtcggcgggggaggaggggctcgattgctgctcaagactcagttatttgaaacatcaagatggttaatttcggaaagaaattgatggctgatcaagtggacgaatggaaaggatactacatcaattacaagctgatgaagaaaatgttaaagcaatatgtccaacaaacccaacatgatgagaaagatcgcgaacaagttcttaaagacttttcaaggtttcttgatgaccagattgaaaggattgtgctttttctgctacaacaacaaggccatcttgccagtaggattgagaaattggcagaaaaacgcactgctcttctggaagagtatgacatatcacaagtttatcagctgcatgatgcatacagggaagtcgggcttgatctcataaagcttctccgctttgttgatgtgaatgctactggtatacgcaagatactaaagaaatttgataaacgctttggctacaagttcactgattattatgtcaccactcgtgcaaatcatccttattctcagcttcagcaagtatttaagcaagtgggaattgtagctgttgtaggtgcattatcgcgcaaccttgaatatctgcagcatcatgaaggaagctttgtatccatctatgatcgtccagcagttaccttgaaggaccctattatagaccaagtaaaccatgcagtacagaaactcacgcatgccacgaattttatgcaattcttgggacagcacgcgcttattgtccaggaagatgcagaaagcgagtcggaggatcttgttggtgatcagagctaccatttcatgtccctggtgcttaatctagtgaacacattcctttacatggtgaatacatatatcattgtgccgactgcagatgactatgcagtaagccttggggctgctgcaactgtatgtggtataattattggatcgatggcagtcgcccaagtattctcctcagtctacttcagtgcctggtcaaataagtcctacttcaaacctcttgtgttcagtagcattatgctgtttcttggaaacctactgtatgcattggcatatgatctgaattcactaatagttctcctgactggacgactgctatgtgggttaggttctgcaagagcagtgaaccgtcgctatatcagtgactgtgtgcctctcaagatgaggctacaagcctctgccgggttcgttagtgctagcgctcttggcatggcatgtggccctgctcttgctggttttctccagattaaattcaagatatactcgctcagttttaatcagagcacattgcctggatgggtcatgtgcatttcttggcttatttacttattgtggttgtggcttacattcaaggaaccagaacacttcactaaaactctggtcaatgaacagccgtcagaatctggccgccaaggaaattctaacttggaggcaggtctagctgaaccattgcttcaaggtatagaacgaaggcaggatgagaactcagaagttaatgatgatactgaagtagagtcagaaagctctcatgaaccagcaacatcaattgcttcagcatacagattgctaactccatctgtgaaggcccagctactgatatacttcatgctcaagtacgcaatggaaatactactatcagaatcgagcgttgtcaccacatactattttagctggtctacaagtgctgtggctatctttctagcgattcttggattaacggttcttccagtaaatgccattgttggaagctacgttacaaatttattcgaggataggcaaattttgttggcatctgaagtcatggttctcatcggtataatcatgagcttttgtttcacacctcactactccatcccgcaatatgttctttcagctttcatcacatttgtatttgctgaggtgcttgaaggagtgaatctgtccttgctctcacgagtaatgtcatcgaggctttcccgagggacctacaatggtggactcctttcgacagaggccgggacgttggcccgtgtagttgcagatgccacgattactgcagccggttatctcggcacggacctccttctgaatgtcactcttctcccatcccttgtgatttgcatagtctccatcgcagcagcactctacacttacaacaatctctattgaagctattgttgctgtacaagtgtacaacaatgttcctaagctaaaatgttcctgcccacaacgggtttgtatatctgttcaagcatggtttgtaaacattttgatcaagtttgtatgcaaaatttcttgtatttagtgcatttatgtaaagattcatcctgtaaagaattataaactatgagacgctattgccatttatgatcatttatgtttatctttttagccttatgtta

SEQ ID NO: 6 - DNA, 1497 bp, Zea Mays
ccaccggcgagtccaccatcccattcccatccacccgctccttccaactcccaggcgttgctggctgctgctaccgaaactgctccgcctcccggccaatgcgcagttgcgctcgcgcagacgcgcacggacagcgccacatcggccttgattagcgaagtgttcccttgccctacctctccctcccctgttccgacgcggcggccggtgagcacctgcccggtcgctagcttctgccatggctcacgaagttggcgacaacggcggcgaactcccgccgcccgcgaagaagaagtcgcccgccgaggaggaggccgagaagaggaggaagaagcttacacctgggagcttgatgaagggcatcatacggtctgggagtggtgatgccacccctgcagagggcgatcaggttatacttcattgcactactcggacgatggatggtattattgtcaattctacaagaagggagcacggaggtaaaggaatcccactcagatttgttttagggaagagcaagatgatcctaggctttgctgaaggcttcccaacaatgctgaagggtgaaattgctatgttgcagctccagatggcttcccgaaagatgatgaacttcaatttgagattgaaatgttggatttctttaaagccaaggttgtggcagaggatttgggggtggtaaagaagatagttgaagaaggcaagggatgggaaacacctagagagccatatgaaataacagcacggataactgtaagaacagcagatggaaaagaaattattccaagtaaagaagaggcatatttctttactattggtaaatctgaggtacctaaagggcttgaaatgggcattggaacaatggctcgcaaggaaaaggcaattgtttttgttagcaatacttatttgacgaagtcctcactaatgccagagcttgaaggccttgaagaagttcatttttacattgaattggttcagtttatccaggtgagagacatgcttggtgatggtcgtctaataaaacgacgtgtagttgatggaaaaggtgaatttccaatggactgtcctcttcatgacagcttattaagagtgcattataagggtattctccttgatgaaccaaagtcagtgttttatgatacacgtgccgataatgatggtgaaccgttggaattctgttccggagaaggcttggttccagagggatttgaaatgtgtgttcggctaatgcttcctggtgaaaaatctgttgtcacctgcccaccagattttgcatatgataagttcccaaggccagcaaatgttcctgaaggagctcatgttcagtgggaaattgaactacttgggtttgaaatgcccaaggattggactggcttaactttcgaagaaatcatggatgaggcagacaaaataaagaacacgggtaacagactgtttaaagaaggaaagttcgaacttgcaaaggcgaaatatgataaggtatggcttccactggat

SEQ ID NO: 7 - DNA, 1543 bp, Zea Mays
ccaccggcgagtccaccatcccattcccatccacccgctccttccaactcccaggcgttgctggctgctgctaccgaaactgctccgcctcccggccaatgcgcagttgcgctcgcgcagacgcgcacggacagcgccacatcggccttgattagcgaagtgttcccttgccctacctctccctcccctgttccgacgcggcggccggtgagcacctgcccggtcgctagcttctgccatggctcacgaagttggcgacaacggcggcgaactcccgccgcccgcgaagaagaagtcgcccgccgaggaggaggccgagaagaggaggaagaagcttacacctgggagcttgatgaagggcatcatacggtctgggagtggtgatgccacccctgcagagggcgatcaggttatacttcattgcactactcggacgatggatggtattattgtcaattctacaagaagggagcacggaggtaaaggaatcccactcagatttgttttagggaagagcaagatgatcctaggctttgctgaaggcttcccaacaatgctgaagggtgaaattgctatgttcaaaatgcagcctaaaattcactacgctgaggttgattgtccagttgcagctccagatggcttcccgaaagatgatgaacttcaatttgagattgaaatgttggatttctttaaagccaaggttgtggcagaggatttgggggtggtaaagaagatagttgaagaaggcaagggatgggaaacacctagagagccatatgaaataacagcacggataactgtaagaacagcagatggaaaagaaattattccaagtaaagaagaggcatatttctttactattggtaaatctgaggtacctaaagggcttgaaatgggcattggaacaatggctcgcaaggaaaaggcaattgtttttgttagcaatacttatttgacgaagtcctcactaatgccagagcttgaaggccttgaagaagttcatttttacattgaattggttcagtttatccaggtgagagacatgcttggtgatggtcgtctaataaaacgacgtgtagttgatggaaaaggtgaatttccaatggactgtcctcttcatgacagcttattaagagtgcattataagggtattctccttgatgaaccaaagtcagtgttttatgatacacgtgccgataatgatggtgaaccgttggaattctgttccggagaaggcttggttccagagggatttgaaatgtgtgttcggctaatgcttcctggtgaaaaatctgttgtcacctgcccaccagattttgcatatgataagttcccaaggccagcaaatgttcctgaaggagctcatgttcagtgggaaattgaactacttgggtttgaaatgcccaaggattggactggcttaactttcgaagaaatcatggatgaggcagacaaaataaagaacacgggtaacagactgtttaaagaaggaaagttcgaacttgcaaaggcgaaatatgataaggtatggcttccactggat

SEQ ID NO: 8 - DNA, 4262 bp, Zea Mays
cctgccctctccatttccccttcccttttcactccgaagtccgacctctctcgaacacacaccacaccaccccgcttgacgacgcttaaaccctagcggcagttgcgggaggccgccgcgccgcgccgcgccgccccgtcgccgatgtggaacggcgcgccgcctccgccgccgccgcagatggcggcggccccgcctccccctggcacgacggtgcccggggcaggccaacctccgcccccgccgccgccggccggggcgccgttgggcggcaagccgctgacgccggccgagctcgaggctcagctggtggagaaggcccgcaagtggcaccagctcaactccaaacgctacggcgacaagcgcaagttcgggttcgtcgaggcacagaaggaggacatgcctcctgagcacgtccgcaaaatcatcagagaccacggagacatgtcttccaagaagtacaggcatgacaagcgtgtttatcttggtgcactcaaatttgtgccccacgctgtgtacaaacttctagagaacatgccgatgccttgggagcaggttcgccatgtgaaaatcttgtatcacatcactggggctatcacttttataaatgaaatcccatgggttgttgaaccaatatacctcgcacagtggggtacaatgtggattatgatgcggcgagagaaaagggataggcggcattttaaacgaatgcgctttcctccatttgatgatgaggagcccccactggactatgctgataatttgttggatgttgaaccacttgaagctatacagttggagttggatgaggaggaagatgcagctgtctatgaatggttctatgatcacaaacctctaatgaagacaaaacttataaatggtcccagttacaggaaatggcatctatctcttcccataatggcaacactatatcgccttgctggccagctgctgtcagatctgatcgataggaattatttctacttatttgatatggagtccttctttacagccaaggcccttaatatgtgcattccagggggtccaaagtttgagccattgtaccgtgatatggagaagggtgatgaggactggaatgagtttaatgacataaataagctcatcatacgtcagccacttcgaactgagtacaggattgctttccctcacctgtacaacaacaggccaaggaaagtgaaacttggtatctatcatacccccatgataatgtacatcaagactgaagatccagacttgccagcgttctactatgatcctctgataaatcctatcacttcaaccaacaaggttgatcgtcgggagaggaaagcagctgaagaggaagatgatgaagatttttgtctcccagaagatgtagagcctctcttgaaacagactgaactctacactgatacaacagctgctggtgtgatgattggaatcgatctagcgtataatttgcactctgcttttggcaactggtttcctggatcaaagccactacttcagcaggcaatgaacaagatcatgaagtcaaatcctgctctgtatgtcctgagggagagaataaggaagggtctgcagttgtactcttctgaacccactgaaccatacctgtcttcacagaactatggagagatattcagcaatcaaatcatatggttcgtggatgatacaaatgtgtatcgagtcactattcacaaaacatttgagggtaacttgaccaccaaaccaattaatggtgctattttcattttcaatccaagaacgggtcaactttttcttaaggttatccacacaagtgtatgggcggggcagaagcgtcttgggcagctggccaagtggaaaaccgctgaggaggttgctgcattggttcgatctcttcctgtagaagagcagccaaagcaaattattgtgacaaggaagggcatgttggatcccttggaggtccatctacttgacttccctaacattgttattaagggcagcgagctgcagcttcctttccaggcttgcttgaagattgagaagtttggtgatcttatactgaaggcaactgaaccacagatggttctttataatatatatgatgattggttgaaaagtatatcatcatacacagcattctcccgcattgtgcttattctacgtgcacttcatgtgaataatgagaaggcaaagatgttgctcaaacctgacaaaacaattgttactgaaccacatcatatatggccatctctgaatgatgaacagtggttgaaggttgagtgtgcactaagggacctcatcctttctgattatgcaaagaaaaacaatgttaatacttctgcactgacacaatctgaaatgcgagatatcattcttggagctgaaattgctccaccatcacagcagaggcaacagattgctgaaattgagaaacagtcaagagagactactcagttaactgctgtaaccacaaggacgacgaatgtgcacggagatgaactcattatcacaaccacaagtccatatgagcaacaagcattcgcatcgaagactgattggcgtgtcagagccatctctgccacaaacttgtatctacgtgtaaatcacatttatgtcaattctgatgatataaaggaaactggctacacttacattatgccaaagaacatattgaagaaattcatatgcgtagcagatctgcgtacacaaatcgctggattcttatatgggctgagtccacaggacaatcctcaagtcaaagagattaggtgtatagccatccctccgcagcatggaacacaccagatggtgactctgccatcaaatcttcctgaacatgagttccttaatgatcttgaacccttgggatggatgcatacacagccaaatgaagctccacagctatcaccacaggacctgacatcacatgccaagattctggagaacaacaaacaatgggatggtgagaagtgcatcattctgacatgcagcttcaccccaggatcttgctcgttgactgcttacaagctgacaccaagtggttatgagtggggacgcagcaacaaggacaacggaagcaacccacatggatacctcccaactcattacgagaaggtccagatgcttctgagcgaccgcttccttggtttctacatgattccggataacaccccttggaacttcaacttcatgggagtgaagcacgacccacagatgaagtacaacatgaagctgggcatgccccgggacttctatcacgaggaccacaggccgacacacttccttgagttcagcaacatcgaggagggagaggtcgctgaaggtgatagggaggacacattcacgtagggcgctgggcgcctgttttagaaactcagtatctcaaacgcactttagctctgttttgaatggcaatgtgtgaaaggctgaaagctgtaacctgactcgacgggtgtcatctgtttttttggcttaatcctgtatcataccttgttgtaagacagccctggagaggggtaaaaattgtacaagtgcacgccatggcaacagtaaagattttacttagtagctatgctattctaagatggctcctcccaagctttaattttctcataatccctgctggacagcagaccgaagggttaaaaggaatatctcccacgccactctttgtgtgctatgggatcaggaagagaaaactatttagcaccttctagctggttgtgtttttgctagataattctggttctactttctgcaaaggctagatctgtttgtcctcaacccgggttggagttaatggattggtgcagcaggccatgtctgtggatgataaagctttgaagaatgggctaaactctcatcattttaagggcatggaccttatggaaacataggaacgacgttatctttaatagaggggtcccgcatctctcaacttctgtctccaatgctggagaggaagcttggtgttggagtaaagctagtgctaaaggcctccagcttcagttggcgcaacatgatgatgatgtaagtgttttgtcttaagagtcatttggtttgctggtttcctaaccggctaactgtaatcttagccttgtggttttgtgtgtgcctctgtgtgcctaagcctatggctaggcgttttgtactctctttcctttctttttaatgaaaagactagtggatggcgcgcgccctgcgcgcgttgtaaaattcaattctagagtatttggatatatctaaatttaaattattgcattttacaatcaata

SEQ ID NO: 9 - DNA, 3247 bp, Zea Mays
tccgcttcgggaaatcctcctcccatgtcccgtttcctatccccttcttcgccaagcaatcctctccccctttcagaaaaaaaagtaatcctctccggagtccaagctccgaccagatccggacccccccccccccctccgaacaagctcgggcatgcccagcagctgatgaggtcgctccgcggggtcctcatcccgctcgtcctcctcgcggggctcgccttccgcgtggacgacggcggcgccgcgctcctcccgctcccgccacccgcgcttcccgcttccccgtcccgcctcgcgctccccggaggcactccgaaggatgatggggcggcggcttcgcgctccacggaggtcgtcacggcgggggtgcgctccaccgagatcgtcgccccagtggggcccaagaagcagagcctccgggagctccttgtccggccgcagcctgcacgtcacgagccgtctagcttggttagcggcgaggcgaaagccgaaaccagatctgtgctccagttttacgacaatggcacgattcagcttgtggacaagctgtctcaatctcctctgtgggagattgccacagggcctccactctcagaccatattactaccactgagtctggtccgaattacctcatttatcctttcaatgggaacgagaacatgaatgggaatagtactgaactttgggaggtttataatgggaacagcgtgaggctcccatggaaattggaggaattcgttgccaggagcccatatattcgggattctgttgttactatcggatcaaaagtttcaactgtttttgtagttgatgctgatagtggtgagattatttacaggcatagtatcccatctgcgttaaaggaattggaaggaccaggggttgaaggagcaccatccaagctaaatgtccgtactagtgatgacagtgataatatcatagtgcttgtgagaactgactattctctcagtgcatcagaccttggcaatcatttatttaactggacaagaacttctttcactgcaaactactatgtgaaatacaagcaccctgacatgcttgatcagtcatcttgcctgcaaggagacattccatgcattagaactgagggtttgccacttgctttacctgatttaaattcagctaatgtaattgtcttgaaagatggtaccccttttgtttctatgcatggttctgatgctttggaaccagttcaaaccccaaggaagctaccaaacactgctgggaagtcaaatatcctattggatgattctcaaaatcaaactcatgatgttgctcgatctcatgccatctctgccgatcctgaagctaccctaaaccccactaggaacacttctggatggctattccctttgtttcccatatttttggtcactggttatctgttgagcttgatatctgcaagcaagtcatgcaggcagtttatgattcaacttattgagccattcacgcacaacaagaaaacggtggacattagaggcaggtcggagggaactcccaaaaaaagaaaaacacggaagaaggatggacttgtcaatagctctgagaccttgacagcatctgacaaggagtgcagtgatactggtgggtcaactgaggcaccaatgaaaaattctgcgctaacagatgcccttggtggtcgtcagattggtaaggtatatgtctccaataaagaaattggcagagggagcaatggcacaattgtttttgaaggatcttatgatggtcgtcaagttgccgtgaaacgtctgctgcgttcccacaatgacatagccgaaaaggagactcgaaatcttattatatcggatcatgatcctaatattgttagactctacggttgtgaccatgacagtgattttgtttatatctcccttgagaggtgccactgcagcttggctgacctaatccaaaaacagtcatatttgtcttctggagagtctatttctaacaatgaggtcagtatgagcatcaactcaaagatttcaaatgttaagggaatagacgtggagttgtggacgcaggatgggcttccttcagcacaactcctgaagctgatgagagatgtggttgctggccttgtgcatttgcataacttgggaattattcatcgtgatttgaagcctcagaatgtcttaataagcgcagaaggacctattagagcaaagctttctgatatgggtatcagtaagcacctgcaagatgacatgacttctgttagccatcatggtacaggaattggaagctctggctggcaagcacccgaacagcttcgtcatggtcgtcaaactcgtgcaatggatctttttagtttgggctgccttattttctattgtatcactaaaggcaagcatccgtttggtgaatactatgaacgggatacaaacattgtaaacaatcgctttgatctctttgtggtggactacataccagaagcagtacatcttatatctcaactgttacaaccaaacccagagacaaggtaagaactaaaaactaagaccaacggcagtatacgtcatgcatcatcctctcttctggagccctgaattgcgcctttcgtttctaagggataccagtgacagaattgagaaaaccagtgaaacggacctcataaacgcactggaaagcataggaccagtggcgtttggtgggaaatggggagagaaactggatgctgctttagttacagacatgggtcgttatagaaaatataactttgagtctactcgtgatcttctgaggtatatcagaaataaatcgggtcattacagagaactttcaaatgatctcaagggcatacttgggtcattgccagagggatttgatcactattttgctagccgatttccaaagttgctaattgaggtgtacaaggtcttgtgggtgcactgcaaggacgaagaagctttcagtaaacatttcaatggaagctccttatagctggagaggattgccttttcctactgtaaatactaaccctgatgtagaagttgtatgtacatttgatatgtataccatattacccgttttatagaataaagagagctcagtctgtacattatgtagcatattactgtgttgcctataaatccaagctttactgttgaatggtgaacaatggtaacacaatctgctggatggaaaccagtggtatgtataatacccactttgtaagaaaagtctaaaaagaaaaattatattactttgtatctgtatgtgtta

SEQ ID NO: 10 - DNA, 3002 bp, Zea Mays
cacacagcacacaggaaagcacaccatcttctgtctccataaacaagctacctgcagcgatgtgctccactgcagtgctgctagttcgcacatgcgttgtgcttgtgtgtttggccgccttggcgcgagcgccggccaaggtccatgctgcctccggcaccggggatgggctccttgctatccctaccaacgcctccctgtcgcactgcccctcttggtgcggggatgtccaaatctcgtacccgttcgggatagggccgggctgcttccgtcaaggcttcgagctcacctgcgatcaaacagctccttctcccaggctcttcttcgtgtcgcggaacagctcgatccaggtgacttctctatatgtcggcagcagtgtggttttggcttcagctgttgggttcaacgtcaccatgagcgcaggcgtggacacctacaccaagtcttgggaggcccctactgccactggtgtcagtttttatgcagatcataattttctgtacactgttggatgtggtgtctacgtctacgtgttcggtgataatatgacagatatcattggttattgcacgagtatttgcacagataacagagagatcatggagagcgttggtgcctgtgaagggttaggctgctgcagcattctaatgcgtggcggccaaggcttcactctcaaactaggtcgcctcaatagtaccattccacagttcggtgaagcgctctccagtgtcaagattatcttttcggaatactatgaattcgttactgatgatgtttatgcaagttgggtgaatacaagcaatgttcatggcatagtacttgacattgcaatcacggaccaaccaagctgcgcgagtgcccggtcccaagagaacaaggatacctacgcatgcactagtgaaagcatctgcgacgacgttcaaggaggctacagttgcgtctgccctggtcaaatagagggcaacccctatattaaagatggctgcatagcatattacaacccagaggcaccgagtattaggaactgtacgagattatgtggaaacataagcgttccatttccttttgggatcgaagaaggctgttacgcaaatgataacctacgactcaactgcacaattaacgacactactcttattcttgatcgagggtacgcacagtattgtgtgaccaatttgtcacttgatgatgggcttttgatggttacaaacatgctgaatgccacaagcttcaacaatatggagagggtagtcatcactaactatgacggttactaccagaacggcttctattcaaccgatgaggacgttgtggatggtaattatgatttctctcaggaggatacaacaataaaatggtttatagcaaacataacttgtcagaaagcaatgcaaaataatgctacatatgcgtgcgtaagtgacaacagtatatgcaaagatgtcatgcgagggaatatacgtgacgggtaccgctgcaagtgttccgatggcttccaaggaaacccataccttcaaaataattgtacagatattaatgagtgctttattccaaataaatgcaatggaatatgccacaattttgatggaggcttcaattgtacaagttgccctcatgggaaagagtatgatccaaaaaatcaaaaatgtgtcatgtcagctaagcagcgtattctaatttttgggattgtaattgggcttgtttgtggtcttggatccataagttttgcacttggtgcaattgtactcaccggtaagtggaaaaaaggtatccaaaggagaattcgaagagagtacttcaagaaaaatcaaggtctactcttggagcaactaatatcgaatgaaaatgctacaaacaaaacaaagatattcactttggatgaattagaggaagcaaccaacaagtttgatgctactcgtgttctaggtcatggtgggcatggcactgtttacaaagggattttggctgatcagcgtgtcgtggctataaaaaaatctaaaatagtggagcaaatagagatagatcagttcatcaatgaggttgctattttatctcaaatcattcaccgcaatgtggtgaagctttttggttgttgcctagaagatgaggtacccttgctagtctatgagttcatatcaaatggcactttgtatgacattcttcatgaaaatattgcaacaaaatgcttgttctcatgggatgatcgaattaggattgcaacggaagcatcaggagcacttgcttatctacactcagctgctgcaataccaattttccatagagatgtgaagtcttctaatatactcttggacgacaacttcactgtaaaggtttcagattttggtgcttcaagatctctatcccttgatgaaacacatgtggtgacaattgtccaaggaacatttggttatttagatccagagtactattatactggttctctaactgagaagagtgatgtgtatagttttggagtgatacttgtggaacttttgacaagaaagaaaccaatttttatcaatgaatcgagtgccaaacaaaacttatctcattacttcattgaaggactacaggaaggggctctcatggaaataatagattctcaagttgtggaagaggcagaccaagaagagattaatgatatctcctcacttatagaaacgtgcttaagatccaaaggagggcatagaccaagcatgaaagaagtagatatgagattgcaatgtctaagaacaaagaggctacggaataaaacacatcttttgattgaaaagggtggagaaatggaacctttgttatgcgtagaagctcagcacccacatgaacgtatcaatccaatttataatgaggaacatttaacaattccaatgatgtctgggtgctacagtttggagcaagaacttgcggcagcatccagtatggttcgctaacttggtatttgcttggatgttggacacatctatagtaaccatctattttcagagaggaactatatggtatat

SEQ ID NO: 11 - DNA, 2446 bp, Zea Mays
gcttaaacatctgatacatttcggttcaaggatagcgagggagtcgaaccgcaagaacttcggcagcaacagagccgcgaaccaggcatcagcaggcagcgtgcagattcaccagagtccagcttctccagtggcgtcggccacacgccagccatttcttaccaacaatcagccatgaacacgcttagctgtgacaagtgccgcatggtttggttgatggagcatcattatcagttgttacggttcatcacaaattttcaaacgattcattgtcagctggatggagcatccatcatttgttatgtatactagccctgaatcctgatcatgtaacagcaacttggacgtggttgaaacctaaaagtggccggctgctttgtgtcaggctgatgtggcgcctgcgttgggccggtttagacgagtaggtccaacctggatctgaccccacatgtcagtgactcaactgcaggggatctttctccggtctggacctgaccaaacaatgctggatgtaaagcagtcgtcggtgtcaatattttttaaaaaatcctatatttctttagaatcagctcgtacttctataatctcttatctactactataataaaaatatttatataaaaaataagtatataaaaataagtatttaaacattgatggttggctccatatttatacacttaatcaatagaaaatatatattttgtgttaatgttataccccggagtcgagtggcgagtccaatctcagactagccacgtgtacggcgtgcagtccttgctacgcgcacccctcctaccgcacacgcgaatccagccagcccacccaccgccgccgcctgctcgtccgcctctataagatgagacctgcccaccgccatggcgccatcccctccgtctctgacccgcctacccatccccaccatttgccgcccaatccgccccgccgcgctccgccttgcctcgactcgaattcttaccaaccgtttgtggcttgaatttgaattccagctcgaatcactcaggcggccagccgggagcgagagcgagctggaggagctcgattcgatgcgttgctgagcgtgggtcaatcgattcgggtcgggcggtggcgcagtccgagagatctgaaccctagcggccgtctgcccgtccggatctgtgaccagccctgctcggtgcttcggcggcatgagtgcctggaaggcgtggggaggagaagcggcggagatatgagcggaggaggcagcggcagcggggacgagttcgggcgggcggtggcacgcgccgcggttgcgcaggcgctggaggccgcggggttcgactgcgcgcaccgctccgcggtggacgcggtcgtcgacgtcctcttgcgctacatcacccacctgggccggtccgccgccttcaacgccaacctcgccggccgcgcgctcgccaacgaactcgacgtcatccaggtgctcgaggaggtcggcgccgacacggacggcttcgcgggcgcggcggacacgggccgctgcctcgttggttccggcgtcgtcagggacctcatggcgttcgtcgactccaaggacgaggtgccgttcgcgcggccgctgcctaggttccccgtccagcgcgtgcagccgcagccctctgccagcccggctgcggcggcggcggggagggagactgggttgaagcacgtgccggagtggctgcctgcgttcccggatccgcacacctatgtgagcacggaggtgtgggatgagccttcggcgaccaaggacagggtggacaaggtggagcaggtgcggcaacggaggaaggccgagaaatccctgctcagcttgcagcgaaggctggctatggcaggcgcggatgggtttcatccagcggttgcattggcggaggatagcgcagagaaggggaaggagatacaggcagctgggacaaagagaaacccgtttcttgagccagcattgccgcctggggagaaggatgtatctgaggttggtatgcctccggaaaagaagaaactatctgtcctcgaggcatttgcgccagctatgcaatctagaaccatcgtcagggatgttgatgctggggcaggattggatgaaaaccaaaggagcattgttcccaaagagagggctccggtgcaccttaagattggatttggaaagaagccgttggcagcagctctgaattcaagaaccctggacctgagagaagatccatccttcttgaaagaggaagcaaaggatgacaagaagcggagagcaggcatgatattaagggcatcaatggagaacccacaagagcttcctcagctctaaagttgtttgcggaggaagtgccgtacccagagtggagttgcatcatggtgtaattgtggaacttcagtttccagaatcttgaggttttaatatgaattatttattccttaatgagtcatcaaggcattg

SEQ ID NO: 12 - DNA, 3714 bp, Zea Mays
gacctgcgtaggaaggtcttattctacatacaacgtccgggtgctgtcttatcccccataggatttgaacattggtattgcactctggttggctgctggtggtgatggttgggtggatggaagtatatgtcgtatgcaagatggttctcgctataagtacaggtcgagatctagagtccttatagtgggttctggggctgatgagcagtgtgctggttatggtagacatcggactaaatataggcttggagggtggaacgcattggatcaggagatgagactagatgtgcagagaatatggaaaaggaatatgggaagagatgataggtgcatctctgatcatggcaaggaggcccgtttcccatttcttgacgagaacgtgataaaaactttgttggaaattccgttatgggaaattgctaagcttgatgaacctgttggaaggggtgacaagaagatcttgagagaggttgcaaggctgctgggcctacaagaagctgctcttcagccaaagcgcgcgatccagttcggttcaaggatagcgagggagtcgaaccgcaagaacttcggcagcaacagagccgcgaaccaggcatcagcaggcagcgtgcagattcaccagagtccagcttctccagtggcgtcggccacacgccagccatttcttaccaacaatcagccatgaacacgcttagctgtgacaagtgccgcatggtttggttgatggagcatcattatcagttgttacggttcatcacaaattttcaaacgattcattgtcagctggatggagcatccatcatttgttatgtatactagccctgaatcctgatcatgtaacagcaacttggacgtggttgaaacctaaaagtggccggctgctttgtgtcaggctgatgtggcgcctgcgttgggccggtttagacgagtaggtccaacctggatctgaccccacatgtcagtgactcaactgcaggggatctttctccggtctggacctgaccaaacaatgctggatgtaaagcagtcgtcggtgtcaatattttttaaaaaatcctatatttctttagaatcagctcgtacttctataatctcttatctactactataataaaaatatttatataaaaaataagtatataaaaataagtatttaaacattgatggttggctccatatttatacacttaatcaatagaaaatatatattttgtgttaatgttataccccggagtcgagtggcgagtccaatctcagactagccacgtgtacggcgtgcagtccttgctacgcgcacccctcctaccgcacacgcgaatccagccagcccacccaccgccgccgcctgctcgtccgcctctataagatgagacctgcccaccgccatggcgccatcccctccgtctctgacccgcctacccatccccaccatttgccgcccaatccgccccgccgcgctccgccttgcctcgactcgaattcttaccaaccgtttgtggcttgaatttgaattccagctcgaatcactcaggcggccagccgggagcgagagcgagctggaggagctcgattcgatgcgttgctgagcgtgggtcaatcgattcgggtcgggcggtggcgcagtccgagagatctgaaccctagcggccgtctgcccgtccggatctgtgaccagccctgctcggtgcttcggcggcatgagtgcctggaaggcgtggggaggagaagcggcggagatatgagcggaggaggcagcggcagcggggacgagttcgggcgggcggtggcacgcgccgcggttgcgcaggcgctggaggccgcggggttcgactgcgcgcaccgctccgcggtggacgcggtcgtcgacgtcctcttgcgctacatcacccacctgggccggtccgccgccttcaacgccaacctcgccggccgcgcgctcgccaacgaactcgacgtcatccaggtgctcgaggaggtcggcgccgacacggacggcttcgcgggcgcggcggacacgggccgctgcctcgttggttccggcgtcgtcagggacctcatggcgttcgtcgactccaaggacgaggtgccgttcgcgcggccgctgcctaggttccccgtccagcgcgtgcagccgcagccctctgccagcccggctgcggcggcggcggggagggagactgggttgaagcacgtgccggagtggctgcctgcgttcccggatccgcacacctatgtgagcacggaggtgtgggatgagccttcggcgaccaaggacagggtggacaaggtggagcaggtgcggcaacggaggaaggccgagaaatccctgctcagcttgcagcgaaggctggctatggcaggcgcggatgggtttcatccagcggttgcattggcggaggatagcgcagagaaggggaaggagatacaggcagctgggacaaagagaaacccgtttcttgagccagcattgccgcctggggagaaggatgtatctgaggttggtatgcctccggaaaagaagaaactatctgtcctcgaggcatttgcgccagctatgcaatctagaaccatcgtcagggatgttgatgctggggcaggattggatgaaaaccaaaggagcattgttcccaaagagagggctccggtgcaccttaagattggatttggaaagaagccgttggcagcagctctgaattcaagaaccctggacctgagagaagatccatccttcttgaaagaggaagcaaaggatgacaagaagcggagagcaggcatgatattaagggcatcaatggagaacccacaagagcttcctcagctctaaagttgtttgcggaggaagtgccgtacccagagtggagttgcatcatggtgtaattgtggaacttcagtttccagaatcttgaggccatgttccctgatacaaccttctcaggatcaccatgccctgatacaacctgcaccggactctcctgcctccacctaccgttttcctaaaacaccatgcgctgatagattctgcagcactgtaactgaagttggaagttccaccatctcactgcgttgaagttggtggttgtgctggtatttcacctttaactgtaaggactaatttgggaacccaatttttccactggattttcattttcctaaggaaaattagttcattttcccttgagaaaataggaatcccttagaaaaatatagtttccaaactagccctaaaattaaaagtgggttgtggttcaaacggagctgatttttgtgaggccatgttcctcatccccagacatggcatccaaaagaaagtttagttcttgtagctgtactccctggtagaatgagagaggtttgtacaaaaggtaacctgattgttcttaccaagacttgtcatagaaaggattgatgtatctagtggctactcaagggacagcttcataatgccgtatgtgttggcacgcgcacgcaccccgccgttgtgtttgggacgaaaacacttcctagaattcctagataactgttgaaggacttttatgaggatttattgattgattcgagttcatgtccttaatgacttgatgtagtgcttcatagttggaggctggggttgtataacagtgtaccatatggttctttcgacttttgcccccatctaacttgagtatttaagattgaacttgtaaagattttattttaaaaggaagcatgttgaaa

SEQ ID NO: 13 - DNA, 1469 bp, Zea Mays
cttttattcccattacaacgtgcgcacaaaaagtggcaccaaaactttgaacggtggccatgctggagcgcttccctgtggccaactggccaatggaggagaaatatgaaccaaccaatgacaagtcggacccactggattgacagcctctgacgccgaaaaagccacagatcggatcgcggcgggcagaggccacctccggattcgggcgctcggcgtagccgcgcagtggtgtgtctgcctccctccttgtatcctcctcgaattcgagcggcggcgacggcgggaagggagatggaggcggttagaggcgatgggaggtggtgcgtggtgactggcggccgcgggttcgccgcgaggcatctggtgacgatgctgctccgctccggcgagtggcgggtgcgcgtggccgacctgggccctgccatcacgctcgaccgcgacgaagaagagggtttcctgggtgctgctctccgcgaaggccaggccgtctacgtgtccgccgacctccgtgacaaggcccaggtcgccagagcttttgaaggggcagaagtagttttccatatggctgctccagattcatccatcaacaacttccaccttcattatggagtcaatgtcgatggaacaaagaatgttattgacacttgtatccgttgcaaggtgaagagactcatctatactagttcacctagtgtcgtgtttgatggagttcatggaatttttaatgcagatgaatcaatgccttacccagataagtttaatgattcatattcagaaacgaaagcggatgcagaaaagcttgtgatgagagctaatggtagggaagggcttcttacatgctgtatacgcccaagtagcatttttggccctggtgataagctaatggttccatctttggttgctgctgcaagggcagggaagtccaaatacattattggtgatgggaacaactactatgatttcacctacgtggaaaatgtggcatatggccatgtttgtgcggagaaaactctatcatctgaagatggtgcaaagatagccgctggaaaaacctatttcataacaaatatggagcctataaaattctgggagttcatgtcattgattttagaaggtcttggatatgaaaggatcccattacgtcccaatgcttatggagatctccgttggacatgcccaaaccacctcaactgatgttggacaagcttttcttcagttggtgctacccgtagcgtatcacatatatcatcatcccgaacttgatcccttcatgccaaaattctttttgaaggacaagccaggtgtagtggtgagaactgtctcactaagtcaccatgttgtgtgttcgaagcagcctctctgcatttacgggggaaggcttgcctcgactcttccttctcctagaccccactcacgcgagagcctgatttgtctttttttagcttctgtgttaccctcttgtcaca

SEQ ID NO: 14 - DNA, 1572 bp, Zea Mays
cgaagcagatagtttagttaaattttacactctgatcgagtggccaatattgaatcgatcaagtgcatccatttctctatgcgcaaaatccaagatggtcatgcagatgacttcatggttataaggttatttttttagtaccgatgatgtgctcaaaacatattgtactgtaagtaacatgaagttcccctatggaacttctctgtagcgtttgaacaaatgaagtattgctagtaggctatctcactctcaagactttcgatgtaacagtggcacatagtttggtaatggtaatgatgccttttgggcaatcctgtttgctggagtttggatccagctgggtactgattctgtgtgatttgatattcttaacttgatcttcgtagtcaaaacaatttgtgcaagattttcatataccattttattcaagccatgagacgaatgtttcttcattcgtgtgaccttaaaaggccagtgctaacttgtgttccttttcctctccctttttctgactagtacgaagcacacctatatcagattcagtatttcctttctatgtcctgtacagtctgcttttcttgataaaaatatgctaatttctgtttctgccctttcaggacccaaggaatttacttctgtgttttacagtcttcagaactggagagcaatatttgagaggtttgatcgtgatcgaagtggcaggatcgacatgtcagaactgcgcgatgctcttctcagtctcggatattctgtgtctccaactgtccttgatctgcttgtgtctaaatttgacaagactgggggcaagagcaaagcaatcgaatatgacaacttcattgagtaaggacctcccttcaatctaactgctgctcgtttcttaacaatgtttgctgcaccttatcagtaaggaaattattgtattttcgcagtgttgttgtcatggatgttcataactggcctgatatcatcagcctatgagtaataaagttattttataactagttaaaggattactttgactgatatgtcaatgaactgccctgctaagttcagctatggtttctgatgcaagactattgacatgtctaaaactgattttttttatgtcctatctgcattcagtttgccctgtacctcaactactgaccgtgttttcttttttctttctttacctatgcagatgctgcctcactgttaaggggctgacagagaagttcaaggagaaggacaccgcctactctgggtcggcgactttcacctacgaggccttcatgctgaccgtgctgcctttcctcattgcgtagtggcagtccactccgccgctcaaaacaagctttataagcttttccaatagtactgtaatattatgcctgctgtaaagagatttatgttcgcagagttgtttttagacgagttgttttgattctggatttaacttgtgttgtgaatcataaagttgctctgaaatggagaatgtacctgttggttgaacagatgctttgtggttgtggtatgtggttggtattggtggctctagggatggcaatgggtaagctatctactggacacaca

SEQ ID NO: 15 - DNA, 1655 bp, Zea Mays
aaggaaacctgcccgttgctttgctccccccttcggcatctctacctgcgtgcgtcaccggcatttaatcccgcgttccattccgaacagcgagcacaaccaccgctgctgcgatctcgccgtctccctcctccacgccgtctcggtctccctcccatggccggctacccgcctcccggctccggctacccctacggtcccggcgggggctacggcgccccgccgccgccctacggctcctcgcccgcgccctccgccccgccgtacggcgagaagccgcccaaggaaggcaagacctcgacctcctccgcgcccccctactacggcgcgcctcccccatcctacggcgcgccgcccccctcccagccctacggcggcgggggcgggggcgggggcgggtacgggtacggcgcctcgcagccgccgccctacggcggcgccccgcagcagcagcccccgtacgggggcggggccccggcagggttcggcagcccgttcgcgtcgctggtgccctccgcgttcccgcccggcaccgaccccaacgtcgtggcctgcttccaggcggccgaccgcgacggcagcggcatgatcgacgacaaggagctgcagtccgcgctgtccgggtacaaccagagcttcagcctccgcaccgtccacctcctcatgtacctcttcaccaacaccaacgtccgcaagatcggacccaaggaatttacttctgtgttttacagtcttcagaactggagagcaatatttgagaggtttgatcgtgatcgaagtggcaggatcgacatgtcagaactgcgcgatgctcttctcagtctcggatattctgtgtctccaactgtccttgatctgcttgtgtctaaatttgacaagactgggggcaagagcaaagcaatcgaatatgacaacttcattgagtaaggacctcccttcaatctaactgctgctcgtttcttaacaatgtttgctgcaccttatcagtaaggaaattattgtattttcgcagtgttgttgtcatggatgttcataactggcctgatatcatcagcctatgagtaataaagttattttataactagttaaaggattactttgactgatatgtcaatgaactgccctgctaagttcagctatggtttctgatgcaagactattgacatgtctaaaactgattttttttatgtcctatctgcattcagtttgccctgtacctcaactactgaccgtgttttcttttttctttctttacctatgcagatgctgcctcactgttaaggggctgacagagaagttcaaggagaaggacaccgcctactctgggtcggcgactttcacctacgaggccttcatgctgaccgtgctgcctttcctcattgcgtagtggcagtccactccgccgctcaaaacaagctttataagcttttccaatagtactgtaatattatgcctgctgtaaagagatttatgttcgcagagttgtttttagacgagttgttttgattctggatttaacttgtgttgtgaatcataaagttgctctgaaatggagaatgtacctgttggttgaacagatgctttgtggttgtggtatgtggttggtattggtggctctagggatggcaatgggtaagctatctactggacacaca

SEQ ID NO: 16 - DNA, 213 bp, Zea Mays
gttggccacatccagaaccgccagatgcattgaccgtcgatgagcacttgattggtaaactgcatgtcacggttcgaatttgtatacgcgggtgcaggtcagttcaggtcaccgtgcattcggctgcatgagcggggaagtgagatgcgcgcgttcgaaccgatgcaggccctcgtgagccaggaggctaggctgccgccaaccaatcacgcg

SEQ ID NO: 17 - DNA, 942 bp, Zea Mays
agacccgttactctacccggtaaatatctcctgcggcatttttgactccatatccgcgcggcgcctatctggcatcggtgaagagcgggcgctagagcagagtgagcgtgcggttcttggtcatggagcgcggtgccgtcgtccttccgctccagggcgccggggttgggcgcgtcctcctccccgtgcaagtgcgggtacggtcgttcttgaggagcaggagggcgacggagcggcggcgccggctcgcgagttccgcggcgccggcgaggtgcagcaagatgtacgttcccggctttggggagggttcaccggagcggaaggcggcgatcaacctccagcacttctttaactacatcgctgtcagcattgtcctagcacagcttgagagttacaatagggaagcgtacttggagctgaaggagttcatcagccgcacctccctgaacgacgccgagattttctgcgaaaagctcatgcgcgagtctccaaggctcaagggactaggtccgatctgcatatgtgaagaacgagttcgagtgggacaatttgaaggaattatccttcaagatggttgatgaggccaacacaaagctcatgagggattacgtcgtcgaggtcagccacattgaagacgaaaactaaaacatcaagtggtttctctttgaactactatattttataggcgaacgataacatcaaatgctttctcttgaaccttgcctacagcattttataagaggcttgcatgtatatatagaagatgtataggttatgaagcgcactagcttgatcctgaaactttgtatgtagcataggtactaaacatagtaagcgcattagcagtgatacaccgtagatgtttagcattacttgaataaaactcggcacgcatacaccgtgttactttcttgatcatcaataggagtgagaacaaaaacg

SEQ ID NO: 18 - DNA, 1867 bp, Zea Mays
aggaatcggagctgaatggcggcccacctttcgtctgatgtgaaattatgccgacagcaaatatgcaattggggaggcttgacatatttcagaagtcccattgtgtaaaggtcaatcctgacacacctcagaagcaagttcggttcttaacattgtcaggagagtgcgagccatttattgaacaggaaagagtatccaagtgtacaacaccactcacacaagacagtaggtcctagaaaaggtttcaaatgtccctatagccctgactccctgagtgcgcactgtaaggctccctcctctgctgttcacaccagcaagcttgtgctcagagaaaaattaccaaagagttaagtcttcctctatgctgtttgtccaccatcttgattgcatggcaccaccatcatggaagctaactctgtcagtttgaaaatctagtgcttttaagaccaatttttgcagaataagtaaccacacctgcacctcccttgaagttgcgccaggttactgtagttgcttttctggtgtaaggtcgtatgatcaagcgtgctctgaattagtcagtggagcatgatatactaggtcgattcatgcttattgctgcatagttaatttctcgttgtaatgcaccagtatgtaattgtatcattctgtttcctgattaacttcataagttaatagcacttgatctctcaatgaatttcatgctgcaaaccaaagcatatactggttggttagtgtttcaggttttctgtacattttttctagctttcgatcagatgtacccattctattaaggacaaacactgcaatcatgctaaacttcttgcctgagaatttgaaaatgatttgtttgcttctccttttgattcggtgctactttttgtcatctaggtgataaaaagctgttgactccgcaacctcggctaaggacaggatttttctcagttatggactctcagatgatacctgttgggtgcattcctgaagcatgcacttctgttggtgcagctaaatatgggaggccaattggtttagatgaaagccttaaggtggatttgattgtgattgggtcagtggcagttgatccaagttcaggagcacggttagggaagggagagggatttgcagagctggaatatggaatgcttcgctatatgggagctatagatgattcaaccatgatagtaactactgtgcatgacaagcagttagttgatgacattccagtggagaagctgctagttcatgatgtgccagttgacattatctgcacccctactcaggtcatcttcacgaagactacgatcccaaagccacaagggatttactgggaaaagttatctccagaaaaattgggccaaatccgaattctaagagagctgaagcaacgtatagagcaagagacaggaactatgcttccttgtggaccttcggagaagctaccgccaacagctcagagaaagcagaggtggcagcggcgacgatgagacttttaaatgactgccccgtgcgttgcgacggcttacaacaatacccatgtaaactatccaccaaaaaaatttcaatattttttgtttattgtctccgctctccgtgtaatatttttttttgatttggctaactggtgttattatttactctatccaatatatcttgttacaacacaaccaatgaaatgagcgattagaagagagttcacaacgactgactgaacgaacaaatattataaaatgatataattccaccatacaaagaccaaataagaaaaaatttgtaagctcaagtttctaaaataagtcacatgaactcaaacttataaaaaagataaatcaaaatatggagtgattactaaagtcagacatcaata

SEQ ID NO: 19 - DNA, 1566 bp, Zea Mays
acacgagtatgaacagacgggggctcttgggtgggtctgggcagggcatctccggactcccacacagctcctcttggtggcgccctctgacatctcctttttcctcgccttcgatcggtggccgccgccctcctcgacttccgtcccgccgccatgaagggacccggcctcttctccgacatcggcaagaaggaaggatctactcacctacgactagaagctgtccatctccaccgccagcgcctctggagtgaatccgttcgtcgcagaggccatgagctcggcgcaggatccgttctacatcgtccgggaggagatccaggagtcgattgataaattgcaaagtaccttccaccgctgggagcaaactgcttcaaacacaggagaatatgttcatctgacaaaggagcttctgatcagctgtgaaagtatcgagtggcaggtagatgagctagaaaagacaatctcagttgcatcaagggatccggcatactatggacttgatgaagttgagctttccagacgaagaaactggactggttcttctcataagcaggtcggtacagtcaagagagctattgaaaagggcaagagcaatgcagcaacttcaaaataccaggatacaagcaggaccaaccactattctgcccaagataatgatgactttctttcttcagaatcagatagacagcttctactcatgaggcagcaggatgaagaacttgatgagctcagtgaaagtgtccaaaggattggtggcgtgggactaaccatacacgaagagctgtctggacaggaaaggatcctaaacgacctaagcttggagatggagactacttccaacagacttgatttcgtgcagaaaagagtggccatggtgataaagaaggccggcatcaagggtcagatcatgctgatcgtgttcctgattgttctgttcatcattcttttcgttttggtgttcttgacatagccaagtgcaccagggtcctcggttttctctctcatttgttgtgcctccctagtacgaacactagtaaattggtcgcgctccgcgtgagttgttgcttgatgtgcttacataagatgtagaatcttgttgctataggcatgtatcaacaggtgctagcagcttgcagttctcctaacagaaacaggtcgaagcagattttttgttctccaagtgatcagtttgtccaaggttgttaggctttccgtaatcgcttcgagtttgcttttcaagatcatcattcacatgttgcttgttagactttggctcaacataaggaggcagcatggttagtgccctgtccaggtctccttgtcctttttgcactggatatctgtcatggtcgggcgcacgtatgtgaggcgacatcgtgcccgtgacgtgcgccgcgccctagagcaagcagcggccaggcaggacagctaagggataggataggatagcctgctgttatccagttccttagattgtggagtgctgttattcagttccttagattagggagttccttagattatggagtttgttgctcctttcggttgggcctctggccatat

SEQ ID NO: 20 - DNA, 1986 bp, Zea Mays
agagaactccgacttcttcactcacacacacatggcgctgatgagccttggcgccgccgggtacaccacggccaccgcgccgcctcgtccccgaagatgtaccctgccgtttcgcgccgccgcctcccctgcggcactggaccgccggcgacggccgcataatgtggctggcgacttcttcgtcgaccaccgctgcatcgactgccagacctgccgatggatggcgccggaggtgttcaagagggtggatggcaaggccgccgtagcggcgcagcccagctccgaggaggagaggaccaaggccctgcaggcgctgctatcctgtccaacatcctcaattcacactgagaaacctccaaaagacattcttaaagtgcaaaacatgtttcctctaccaatcgacgacaagctactcccaggtgtttatctctgtgggtataattctgaagactcatatggggcaacatcgtacctggtaattcatccacaaggaaacatactgattgacagcccaaggtatactccaaagctggccaacaatattgaaaagcttggtggagcgcgctacatgtttttgacccacattgatgacgtagcagatcacaggaagtgggctgagcagctaaaatgtgaaagaataatacattcaggagatgtggaggaggctaccgcagatgttgagtggaaacttgaaggaaatggtccatggaacttaggaacagattttgaacttattacttaaaaataaatatctaggcgagaattctctttctcaagtttctagaagacagggggattctcaattctggtcgggcctaatgaatattaaggaccagctccttagaggggggcacttcaaagtgggaaatggtcaagctaccagattctggaaggacaaatgggtaaccagtcgacctcttagttattttcagatgtactcactggttaagattctggagactgctacaaaaggaggaatcgcaacaacaaatcctcattgcttcgcaagttttggaagtggtggcgatggaagtcttcgcaaaccatggatggcgctcaaattcaagaattgagtatggctagtgttagtcatagtattgtaatttagttcctttgagttagtatcactattcatgcaacagttcttaattgtaataatcgacttgtattggctgtacgcattatcatgctaaagccggaactcttgtttccattatcaaaaaaaaaatacgccaggccataccccagtaagaaattcaacttgattgacttggatctagtaacaatcaatttttagcaacacgggtttagcaccttgctcattacattcattgcatctagtttgagaatcgagtcaaacatttttctagggctcagtgtgcttgtacttcaaaccgctaaaggtgctgttcactggagaccatgttgcaaagtcagaagaatcagacgatctgaacctctttctgatgtacagcaagcagtcagtgagccttcagctggaaagcatcaggaagctactggagctagagttcgagtggcttttacctggacatggctatcgaatcaagtacaaagatgtgcgtgccaagaatgtagccatggagtccctcctagctaattacacaagctaggagcctatgagcatcttacttgagttagtgctcgcaaataagcattccaggaggctgaatgttgatgctatgtttccagagaatagtgtgcatgatgctcatcagctcttgaatgtgcatttgttaccagagactgtaccttgtgctgcacaccaagcaagtgaatgaatcaagcatacatgactcggcccaatgaatgctttttccagaaatcttgcaagaccatatgattgatttgttatatgcatgatgatatattcgacaaatgcagcacaactgaaagccccctgcttcacatcatcacctagctctgctcttctggttaatcaatccattttgtaaagataataacagc

SEQ ID NO: 21 - DNA, 1115 bp, Zea Mays
tttctccatgccgctcagcctcctctctgtttcagtcgtggagcatcagcaatccacatcatctccgttggccgagcggttccctcgcggcgcccaggatccttcccagacgcgctcggctccctggtctgtctgtcaccttgccgacgcctcctctgctcctccacctgtagctcgcccctatctcctcctctccccatggcggctccccctggatccctccctgcgcgaaccctctcctgcagcacgccagtgccgaccacaatctcccatggcgcaggagctccccattctcctcttgctagggcgccgtcgctgggctcgcccagtctctcgctttctctgctccagcagcaaccgtctcaaggtattccagttcgtgagcagcagcaatcgatatagctcctccgcaccgtggcgcagccagccgtcgatgccatgtccctgcaacctcgtgtcgtcgtcgtgcccgccttgattaggtggagaagaaggttcagttcaacactccctaagtgttcgatgatatgctccggtggccatcgtcgttcttgcaaaaaaatcaagtcggatcatgatgtggtgaggtacgttaattgatcacggagtgggagaacaagagctgagttgatctcaagggatactgatgaatgaacttgaagatttgcgtgatcgaatcaagcgccaggataagagatgctccccaagcggacgtcatctaacaacactgacttagtgttatctcaggcaagccccggtgcatttgccacctccttgctgtttttaaacttttatcacttatatgatgcattaggtggtaggagttgaatgattaaacctttgttgcataacttccttgaactattggttaccatccttgatacctgttttaaaaagctagatgtgcttagtatgctcatagactaagaacaaaatgttttgatctatgaatcatgtttttacaaagaaaagaggctggagtgatgaaggtatcaaaggccttgatgactccatcatttcagtagggtacctctgacaggtaccagattttcagaaataacttaatatgagaccagacgttgagcaggaaatgtcgcccgtctgtgtcgcttaag

SEQ ID NO: 22 - DNA, 640 bp, Zea Mays
catactccgtcctgtcgcccccacgctagtcgcccaaactacgcaaccgatatattccccagcacccccgttccagccgtccaaccgagacaccgcgtgcgaaccaagcagaccccagcagaagaagcgaagtcgtcgccggagcaggaggaagagcgagcagcaagatgtcgtggcaggcgtacgtcgatgaccacctgctgtgcgacatcgaaggccagcacctcagcgccgccgccatcgtcggccacgacggcagcgtctgggcacagtccgagaacttccccgagttaaagcctgaggaggttgctgggatgataaaggactttgatgaacctggaactcttgcaccaactggtctttttgttggaggtacgaagtacatggtgatccaaggtgaacctggagttgtcatccgaggaaagaagggcactggaggcattactatcaagaaaactggcatgtccttgattatcggtatctatgatgagccaatgactccagggcaatgcaatatggtggtggagaggctcggcgattacctgatcgaacagggcttctaagtttgtcataatgctattttggtcattgggcacttaactttgttagactacattgcaatttttacttgaatgacatg

SEQ ID NO: 23 - DNA, 1946 bp, Zea Mays
ctgtcacctaaaatctaggatatattattcccccaaaacaaacactaaccggccggcccaattctcacgcgctcgccgcctaggagcattcacgttggtggcgggcggtggctcggttcctctcctccaccgcacctccaagaatccacctccacgactaagctgacggctcggcggcgccatggcggttcaccggctccaaccttccctctctggcctacagtgctccaccgcccggtcgccagtgctcctccatgggccacggctgacgggtgcacgcaccggtatgcatcccttgctgctctaattcccgacgctctagctcgtgtaccagatgtgcagactgtcgcctagccctgctccggcgtgaaggacttctgcttctgcccctgcgcatcccgcccttggtcgcgcacctcggcatgttcctcggcccgacggctactgtcttgaggcatacggtggccgcccacctcgtacccagtcaccagatctcaagttccacctcaaaatccagatcaagtgaatgccatgtttcatccttggtccaatcggttcttactggaatttgttggcaggcaacgagcacccaccaccggttaagtctctccccttcggtccttcctccctttcttctgtgttaagccaccgagcacccaagcggtttggcctgatgccacatctctggtagctacaaacctacaagctttgacaaaagatgctatgattaggccgatacaaagttgtttctgcttctttatctctgtatcatactagcacttattaggttgcaactcgattgtttaggtactagatttgatctgattgtgaattaccagatggttggtgcaggcaggagaggtggatttggtggacctagattcgatgtgcagagagcgacttggaggtggctgacatcttcaagcactgcaacatgcagttacaactactgttggccatacagggaaatgctgggcctattataccaattgttcaaagcatggaccttgttatttttccagcacttgacattcgagtgaaaaatgtcgcagggacatattctcttgaacataaaggagaaaattatctcttcgcacatcagacaaggcttctactctttcagaagaaagtcattttcaagagaatcttgaacaaaatgaccagatgtttaggcctggttggaaggacatttttcgaatgaatcagagtgagctcgaggctgagattcgaaaaggtctctcgagattctactcttgatccaaggaggaaggcctatctgatccaaaatctcatgaccagccgttggatagctgctcagcagaaatcaccacaaccaagcgtcgaaggacataatggatgtacacgacgacctggatgtgttccttcgtaccgagacccagggaaacaaatatttggctgtaactcaagaggtccacttattgactcttatgaccatgtaattggtgttaatacaactacattaacacgtaaaggttggtagatctggaaggtcttgatggtctaatacctgtctatgagtacgaaagaaaaggcgggagaagtcggtctctgcagcatcgcgcgtgaaaaaaaatcagccaattccatgagcattgatgttgtcatgacttcaaggagagaccatgctaagaataatgcattatgacatttgtcaggcttacatatcgattgtttgatatggatagatgtataggtttatgaccaatccagttcaaagcaatttgagtacaaaagaaataaggagcaggaaagctctgtacatcttgcattttgctgtttttttgtcgaagtttcaatgtctgtcgcgtgacaaaatatagttgtaatttatattttggcatgcacgaaacatgtgtatttattcatttttgaacgaaattttacgtcaaatcctctattgcgttatatacgaaattttaacgcgg

SEQ ID NO: 24 - DNA, 1352 bp, Zea Mays
ctgacgctgaagtgtgctccgctccgcctccgcccgcggccgtacgctcccgagctccacccgtcgcgccccgaccgagatcgtccccggcgatggcttccgcggtggccgcttcgaccgctacgcggttcctgccgcggcttccggacccgtggtggacgcgtcgtgcgcgagcggcgctcccgccgccgccgctcacgtggcggcctctcccgttcacggtgtccgccgcgtcgtcccgccctggggaagcggaaggaggacggcgcgggaggatgcggaggcggcgcgccaggagggcggaacaggaggaaggcgtctcgctaagctctgaaaaggagacggtaaattctactccacgtgctcaacccaaaaagggtgcagaacccgtagcggtgtccagcacgagtgggaaaggctctgccattagaagggtgacacttgtgattcttgctgccgtgctttttggagttagcattgccttgaaggacggggccgagaaggcatcggagtattttgctgggtgtatttattggaacagagtttgtcggtggacaatctctttgtttttgttctggtctttaagtatttcaaagtgccaaatgaataccagaatcgagtactttcttatggtattgctggagctgtggtcttccgggctgtgatgatcatcctaggaacagctaccatccagaaatttgaggcggtgaatttgttgttggctttgatcctgttattcacttcttacaagctctttgctgaagaagaagaagaatctgatctatctgataacttcattgtgaaaacatgccaaaagttcattccagtcactgattattatgatgataatcgttttttcacaaatcaagatggtgtatggaaagctacaccattgctcttgactttggcagtgattgagctgagtgatattgcctttgctattgactcaataccagcagtttttggcgtcacaagggatccacttataatactatcatcaaatatttttgctatttctggtttgcggtcgctctatgtgctcgtttctgaaagcatgggtgaattggagtatctacagcctgccattggtattgtgttgggcttcattgggacaaagatgatctttgacttttttggttatcatataccaacagaagcttcgcttgcaattgtaactacatgtcttagtggaggcgtcatattaagtcttaggaaagcatcaaaagagaagggggacaagtagactgatgcaacaacacatgcaggttagctgcacatgacatggtgcctttattgcctccacagggtttgccatgttgctgcgaacaggattgcctaaagtgtagttcggg

SEQ ID NO: 25 - DNA, 2735 bp, Zea Mays
ctaaataatgaactagtagtggttttgtttggttacatgttggcataaaatgggtgatctacatgttgtttacacttcagaaagaaaatgttgctaatgttttgaaccgttctaccatcgaaaccaccgatacttctcaagcgcttgaagggacccacaatcttgcaatggaagcacttcagccaaacatccaggctgggatccatactcgtaacctcccagtaaaacagcttggagggatgatctttggttgcaagcctgatacaattgaagaatgcttcaaaaaacagctctttggtctgcctgcagtccattattcatatgtgaagaatgtaaaacctggtatgcctttgtttctattcaattatattgacagaagactccatggtatttttgaggctgcaagtcttggtcagatgtctattgatccatatgcttggagtaatgaggacttattaaagacaccttttcctgctcaggttcgtatttgcataaggactcggtatccaccaatgttagagagcagatacaaaacagtgcttggtgctaactattatgatcgtcatctattctactttgagctggaccatacacagacagaagctttaatttctttgttcaagttgctgccccttgttaataatcaagttccagctgctccaagagaaaggagtattgctgtgtctttaccaccaactaaaaggaaggcaccagttcttcctgacccaaagaaagtcaaagaaaattcaaaggatatcaatccatttagtgttttatcaaatgcaagtgatggtgctcaagaaaactgggttgattttgattctgacgtggaaaatgctagcatcaatgaaaattcacacagtgacactgatgagaaggaatttgaggagccagtttctgattgggaagatttggatgacaatgctcttcaataccaattcagtccttattcaaattcagatgaggtcagtcaaaactcctcatacaaaacagtttgccaagaagtggagcttgctgaatgcattcctccagttgtcaatcctgcgagtgaagaaaaactcaccatgcttgtacataatgagcataaagctgctgtgtgtattggcaaaatagagagtgaagttaacagtatcatggatggtgttgggctacagcctgaaagacacactatcctgaaaaagctgaaagagttattttccatgcgacagcaaggggtttcttcgcaggattgtgttgagtcaagcccagatcaatgtgtacctgaagaaaccctttcctgtgacccattagatgtcactgtggaagacaaaacctcttttcaggaacaccttggagaatttgatgagcttcgacaaatcattgctgatttatccaagagggctgaagcattggagaagaagcagaaaggatcagatcaagatctactttttttgagggaagttgttaaagattcaggaagaaaagtacagcaactggaatatcttgtagatgagttacaattccgatttgactcttcattgtctcttcctggaagcatgcacaatactttagccaagccatcgatatttctgatcggtggctacaatggtggcaagtcatcatggtataacacagtggaatgctatagttcgaggaataacgagtggatagaatgcccctcgttgaaccgcaagaaaggaagtctcgctggtatcagtcttaatagcaaaatatatgctattggtgggggagatggaaatgaaactttttcagaagttgagatgtttgatccataccttgggaaatggttatgtggtccatctatgctgattcctcgatttgctcttgccgtggctgaattgaatggaacaatctacgccactggtgggtatgatggaagcatgtacttacaatcagcagaacggtatgaccaaagggagggtgtctgggtccgtcttcgaagcatgaacacaaagaggggatgtcatgcccttactgtccttggagaaagcctatatgcaatgggcggatacaatggagacaagatggtttctagcgttgagatcttcgaccctcggctcaacgcctggaggatgggagatcccatgagcgccccaagagggtacgccgctgcagttactctggatggaagcgcgtacttaatcggtggcctggagtccaatgtgcagatcctagctaccgttgaagtttacaacgcgagctccggctggtcagttctcggtttgagttcactcgggaagaggtcctttgcatctgccgtagtcatgtagttactgatcacgatgttaactactgtcgataacatcaggtttaacatagtcgctgcgttatgcaaggagtagttagggtaaggtgggtggggctagatcacccttccgatgtgtaatgtgttgagatcttcatcaggggaaattcgcatggtatgggagactacggcccgtatacctttgaaccctcgtaggaagtcttgagaacccttgcatgcattcgctgttgtatgcgtgccatgctgttgaatttagctgtactacaccagatagtgatacccgaactcacggagtttaatggaaccggatagaaagctgcccatgtagtttggtgtttgttgcttacgttgtggattttactgtagtgacttgtctaatgctccgtttctccgtttggttatcgaccatattggagggcatggaattaaaataagttcaataccaaatcaaatatagtattgaaatagt

SEQ ID NO: 26 - DNA, 1820 bp, Zea Mays
gtacatgcatttgtattctattaatttttagagtgatttattatttatcaaatcatgtcattaatgtacagaaatcacttctactgagtatgagaaacaaagggcagcaaatgtgatgaggaacaatcagatgttccaacggcttgggattaatcagttacgcacaatgatgactgctacaagagtaaagagcaaatatgatggtccagaggaatcagggtctttgtttgatggcgaggatagtgaaggctctgagccagaggaggattcccatgttgcacaaggtgtacgtagccacaacccaactcatgttgctgacaaacctacacaacaaacacgagattccaaaagggttgtggcccctgatgttcatggacaacagattagattcactaggcaaaggagtgctgccataaatcaacaatcctccctaagcctaactactactacacaagctggttcaagagccaccacaaaccaagaatccacccaaaacttggctgctgcaacacaatttacttcaagtgttgccactgagcaagattacaccgcaggcctgactactactgcacaacctacttctcccacacaagctgaggtcaatgacaacaatagagatgaagaattggtaccaaggcaaagaagtaggggcaaacaacttgaatccttgagcagagggttaggcactaagattccaatccaaatctctaatgggaagcgaaggccagagccacctattcagactgcaaagtttgcatcggagggtgggatcatattgaggcaacacattccaatatttccgcactggaaggagtacaagaagcaagagaacgagggtaaaattacagactacattgggaagcttgctggtcaattcaccatggatgttgagagtaatgcagtaaaagatgcatgtgttgatatgctaaagggtggacagcgccaaatgaggtataggctgaaaaaaaagtacttcactggagttcctgcaaatcaagtgaggactacatcacctaacaattgtgtgaagaacaaacttaatcgtgagaaggtgcaatttccacagtgcacaggatctcaatcatatgttgcaaaagcttatgtagtgagacaagaaaaatataaagatgtcgaacctagtgcaattgatcttttcaaggagatgcattgcagcaagaaaaaaggatttagtgaagttgttcagaaagccataggtgatatggaagcaatggtggcaacaccagctgaagatggacagcttacaaagtctgcaacagaagttgtttccaatgtactgcctggttcaagtaaatttcttcacaatgctggccttttgccctcctccaagagaagcaacacagggactgtttcagcaagaatgcaagagcttcagtctcaattggacaatgagaggcgagaaaaagatggacttcgagaagatatggataccttaaaagccaagtcacaagcatctgaggcaaccattgctaatcaatcaactgagattgcagatttaaagaagtccttagcagaaaatagcatcctacttcgacagatattaagtattagtcgtgatcagctgaatccttaagcatgcttgctaagatgctggtgtcaaccatcctgaatacacatctcacaaaactgtggacctctttttatccttatgtttgctatatggaactgcaacttacagtctattatatgtgttctcttgctatagagttttagtacttgtctggttaaagaattatgaaccatgttcttttgtgtgttggacatattatgcttgaaatatatggatgttggaaaaagttgtg

SEQ ID NO: 27 - DNA, 3162 bp, Zea Mays
gcaaaatcctccgacctcgctcgcgccaccgaaaaccaaacgaggaaaaatgccgtccccgtccctcctcctccgcgctcctcctctctgcccctccccgtcccaccccccgcgccgcttcgctcccccctccctcatcacctcgtctccgcctgcccgcctcctccctctgcgcctgccctccgccgcgtcccgccacacgcctcgcgccggtgacacgcgcgtgcccgacgacctcatcccgatcgcgcgctgctacgagggccgccttgctcgactcgagctcgccggcgccgcgcgccgggaacaggccgtcgcggcagcggccgcggccggcggaggggcttcggcggaggaccacctcgccgccggctccgacgccatggtcgtcgaggcattcctccccgggccccatggcggtgggacgaccgcttcctccacgcgagtgattttgcaagccaaggaagttaaagataaggccagtaagatagagaaacagttcggatctgattttttctttgcaaatcaacctgattcagagagtatgttggctatggcctttaagcaagttgtaattcagcggctctcaaactttcggctcgaggtcttccccccaggttcagagagagacttccaagattttggcaaaccccgaaagtatcagctcatcagatggaaaacttctgtcttctcttgctgaggccattttctcctgtgtcattgaggatgtcagaaaaaatcattttgggagcataggcagtttttttcagaagcgacagctcaactgctcaatggattcctcagtttgtatacacaaaacttctgaggcagaagtagtgaaaaatgctaagaggtgtctggagatcgttagtttaatgaagtcttctcatgaagtacgtgaaacaaagaatggatggtggccacctccacatcatgaaagtttggtgaagattgggggtcctgagttagtgctttgggccaatgagtacattcctacttataagctgcaaattaatgccaacgcattggagaattctaatcttgaagttgaaggtctttatgagttagaaagtaataggcgggaagttctcttaacccactcacaactggtggaactagggaacgttctagacatgtactttgaagatcaattcacattaccaggcaaaacattccatccttattggaatccagatctgtcaaagattaaaaagaacaatggttacttgaacaaccttttcacttttttggctgggacctgtatttttctttttgtcaccatctttgctcagttatgctggcctcaatcctttagagacaaaaggctattcaaggaaagttcaaatgcctcattatctcagaactattgttccgatatcaagtctctttataacagtgaggtacttagttatctagttatgggggaatttgttgtttgcccaaggtagattgatgataattttagtgttggagtgcttcttgtgatatgctataaacatttcacataacattgacactgcaacgatatttcgactaatacctgaaggaaagttcctcatgccattttacatagtttaatttttttctcaattgcttattcatacttctcgcaatgaccaaacaaacacctactgcacctaacttctgtcagaagttggaactcgggaatattctgtcgggctgcatctcatttgtttctgccccccttgaaaattagtactatcaggatgtgacacttcatttataaatattaaacaagttgagttgaagtcaagcttgttatatttgtctagggaatactgaattaatatgcctgcataactggattgtagcataactaccctattcaatatttatgtgtgctgcatagtttgtctgatttactcttcaggtacaagcttattgcatgtcacttgttaagaaaatgaaagactcgtatggctgccctggtgatgtaatggttgattctcacattggagcatgggttggagaactacctaactgcttcaaggcaatcagtagtgaggatgctgctgcttctggctcttttcagtatcctgacactcttagccaagaaaatcaatcccagccagtgccagttaatactaagatgtctcatttggaacaaaatgatagaacccaggaatttcctctgcagaatattgctagttttcaggtggtcatgtcagaagaaggtaaagtagtgggatttcagccaactaacctcccagctgtgaaccattgggcaacaaacccactagcaacacttctgtatcaaggacggtcactttctccaggcattatagaacccaggctcaaaatttctcgtccagctaaggctgccccgatcgaattattgatgtcagtaaatcaagattccttttttgctttggcaaggcctgttgaagacccaaggtagcagagcgagcttcctcagattgattctactgcaagattgtgaacagttccaaagatgtgaaacgaaacaaatagtggcagctgagcctgaacaggatttaacaaggtgcctgagttatgagaaagaaatcgactaatgggccccatcattttaagtaagatgccggaggagtggtggtggctgacgtgaagaagaaattccactagtatcccgtcggagtgcaggaggagcgatcggaggggcacaacaaacgtgggaaattgggcacccggagactatgacccataagccctccagctctctatggttgaacacttgaactataaagtcttatattcagaagtatctaccgagtaggatcaaacaccattcgagtactttcttgggagaaaccatgaccactcttcaaatcttcaagtcttctatatttgtcaccatactatgaagagtctgttgtgcaattctgatgtttttttcgaagaactttgaacgcatcgtgatgatatctatcccgtggcacctaagcctaaaattggcttacaccaagccaattatagggtctcctaagttaattatagggtcttgaacatccttcaaattggctaccctgtgtcagctacagggtcttacatccttagtgatattgatgagtaatgatcgcttgttattttttttttttttggtaaaaataacccttggcaatttcatacgttggtctttcaatgttgaataacagttcccga

SEQ ID NO: 28 - DNA, 2813 bp, Zea Mays
caactaaataacattaaatatagggcattatatggtataactataaccaaattgactcaggtaacatgctaacaaaggcaaaggctacctgtgaccaatcaacccttccatccttagtagcaggaatatctttgagtagagaaccaccttcagcgctatttgaaagctatattatagaagtggacaaaaatattaaacgtattcaaaccagaatgcaacaagaaaaaccaaggagcaagaaggcaaaatggatggctacataaaggaaaagttgcggaaagaccgatgccacaagtaatcatgaacttagttatattcttatacatatatgcattaaaacacatatggataatgactgaaagattctgatatgactgttatagtatagtttcaatgattacatttacaattctcctgcttgcaacctgatgatgataaattgatacttctatgacttccatacatcagaatatcagatacctgataggcacaactttgaggaagttctataaggctataagcaatattggtaaaaaaaattgcaacatgtccactccaaaaatgatacagctgtattgagaagcttatcaggttgtatggtttctaattcagagaatacactctgatcgaaatatttgggtaaacacagagatgggcatagattcagtttaacatagatgaacagaacattttctatgcagcaaccaaattctaatagtgtaagtagtctatctaaagaaacatattgaagaaaaactaaccaaagtagtcacgtaaaactgctccccagctccttcacaatctgaggcagtaataattgggctcgaaacccaaacaaatccattgtcttgaaaagaatttatgagttgcgtatgccagagtatttctcactcttgcaacctaaatagcacacatatccagttccagtaagcaaatccacaagagaagcttgcataattactgaacaagaaaacttaggataaaacaataataatgttctgcttaccacagcagcagcagcgaagtattttattgtaagcaagctggggtattttattttattgtttttcaagaataaatcttagatatatccttcttcttttattgcttatttccgtatcaacttcagttttatcttcatctttttctattgttatcacgccttaaaatcctactatgcttcttcagcttggctcagtctgcttatatttcagattatcttgcaataattggatgctgtttttggctgagttagaagccccgtgcaggataaacgatgctccataaattatgaagcagatgcccccgccacctaaggatttggagattgctatagttcggagctcgagctgcccttcgatcgaaccaagaacaaccctgctgccctcacaacatcaaagtttggtatcagcaagatggagcttctcaaggcatgcttttgtagggagtgactgctgatgtagaggaactcatggatgaagatcattgatccctttcatgtcatggtctattcaaaaggaaaatccacttctgagattaacagttgagaactgtgagttgtccagtattggtgtgattatacttctggactgcctcacaaatgcgaagcaactccttgatgtgctatctattgcagacaatcatctagggagtcctgtggcagctgcattggccagattcttgggttcacatgtacgagctttaaatgctacagatatcggcttgggaacagtaggcttccaaatacttgaggaaacattgccaacagaagtagctctttcccacatcaacatcaggaggattggcctgctggtggacaaggaggcccccgccctggtcctggtgctgctgctacagctccagcaccagcaccggttgctgctcgcccataggctttagcttttcgaccgtgttgaaagtcttctgcccacgcagtttcggagttgtcgcctatgggtgaaaaacaagaagatggaaaatacaagcactctgtggatctcccgaaaacaacatttgagctgagagcgaattctgtacagcgggagctagagctccaaaaattatgggacgataatcaggttctgaaaagggtttctgaggaacactgggtgatcttcacatgggccatgcgctcaataaaatcctcaaggattttataaatcgctacaagctgcttcagaatcataaagtgtcctttgttcctggttgggattgccacggccttctaatagaactaaaaggtggcttgtgcgaacgaggcgtggcaatcgatgagcagtggcaaacccaaaaatcttcaaaagcctaggcaaaagtagtaactaaagatacatcaccttgtccagtttttctgcttttacttcgactatatgtcattgtgccacaaaaaacttgtttcatcgacttatgatgagtcttctcaattgtttcttgaatatgcttttttagaaccaaattgaattttacaaggtgcaatattgattagaaaaaggtgtgatgctgactgggaaagcgctactcccttgtatgaattagctggtcgatgattttgtttcccatcctttttaatttcttgacatccgtttgttcattggggagcacatatgtagaatgatgattaatgtttttaaatattaatagattttatcataatatattgccgccgtaacaacgtacgggcatacaactagtcattgaagaagtcaaaaagatgagagaagcacggtaagagacagagagacaccatgagaagttctttgagttcgaaaagtgtaagcttgagatggaacagactaaacttgaattggagcgag

SEQ ID NO: 29 - DNA, 1167 bp, Zea Mays
aaccccagcacagtgacgaaaaggcccaacaaccccccgacccgtcacctgacccagccgatcgagaatacccggaaggccggaacccacctgctgcgcacctgcaagcctcgagtggagctcttccacggccgcggtggagatggcggcgaatctggaggacgtgccgtcactggatctgatgcacgagctgctccgccgcatgaagtgcagctccaagcccgacaagcgcctcatcctcatcggtccacctggctctggaaagggaactcagtctcctattatcaaggatgaatattgcttgtgccatttagccactggtgacatgctgagggctgctgtggcggccaagacacctctaggtatcaaagctaaagaagctatgaataagggagagcttgtttcagatgatttggttgtgggcattattgatgaagctatgaagaaaccctcatgccagaaaggtttcattcttgatggctttcctagaactgtgactcaagcacagaagcttgatgagatgttggcaaagcaaggtgccaatgttgacaaagtcctgaactttgcaattgatgatgctgtattggaagaacggattactggtcgttggatccactcagccagtggtaggacttaccactcaaaatttgcacctccaaagtctccaggagttgatgatgtaactggagagccattgattcaaaggagagatgacaccgctgaggtcttgaagtcaaggcttgaagctttccacagacaaaccgaacctgtgattgattattactccaagaagggcttagtggtgaacctgcctgcagagaaaccaccgaaggaagtgactgctgaggtgcagaaagccctctcgtgatgaaatgtccactcttgaggttaaacatgacatctaccaaaacccctttgtttgggtttcttcaaaatttgcactaggccaacatcatgagtaacaaactgatatgattacaacaattcatctttgggaaaatttccctgcaaaccttgttccagttcttacaagactgctatgttactggctataataatcaggaagataccttgctctgtcgagccttgagcggagagattgatgtgctgcgaggtcaaataaatgtttcatgttgtatggttctgaacttgtggtgatgtttattc

SEQ ID NO: 30 - DNA, 1215 bp, Zea Mays
aacagtgacacgcgcacgactccaaccgagcaggcgcggccggttcgtcatatcagccaccgaagccaagaccaaggaacggcatggctcagctgctgcacctgccggacctcgcggcggcgcggccgccggcgcggaggaggaggggtgtggcggtggcggtggcgggggggcgcgtcaagcagggggaggcggggcgggtgatcagggtcgccgaccccgtgcgggagggccggatgccgcctcctcttcttgccgcgccggccacgccgtcggagtctccgccggtcgcggggaggcgcggggacgaggacgacgaggtgaggcagaggtactacctcaacatggggtacgcgatccggacgctcagggaggagctccccgatgtgctctacaaggagcccagctttgacatctacagagatgacattgtcttcacagaccctttgaatacattcaagggcctggaaaattacaagacgatattctgggcgcttcgttttactggccggatcttcttcaaggcattgtgggttgatatagttagtatatggcagcctgctgagaacattatcatgattcgctggatcgcccacggcattcctcgagtaccttgggatgggcatggccgcttcgatggtgcttctgtgtataaactcgacaaggatggtaagatctacgagcataaggtccacaatgttgctatgaatccaccaacgaagttcaaggtcctaccagtccatgagctaatcagatcacttggttgcccctctactgcaaaaccaacttattttgaagcttcatcacaatatctgtgcgctgggccatcttatttgagattagcttggataagatgctacatctcattgtgccgcatgctttcgctcgcaaatctgggagaaggatagcctgggtttagtgatacctccaaattttgtattttcagtatgacagcacacatgttactaagtactattgagtcatgacagttgtatatatgaacactgatagtttatagaataagacctcttagttaaggtgtacaacacttgttattgattgttataagcatcagtcagcaaactagtctgacatgtttctgttcccagtatcgagagtggtgttcttgtggccgagtttagtgagcatatttgtgtcaaccctgcacattatatttatgatgtcatatatatgctaagaaaaacagaaaaaaga

SEQ ID NO: 31 - DNA, 2558 bp, Zea Mays
ggctccaatgcgagtcgtgaacgcaaacagatagcatcccgcgtcgccgcgatggaactctcgcccttgccgatgctcgctgcctcccgcttcctgtccctgtcgccgctgctggcgccaacatgcccccagcggaccgctccttcagtccgcgtggccacgcagacgctggaagcgccggaggcgcccaaaccgccgcggccgtcccccaggcgcagcgccgtcgctgaggtcaagggggcccttgaccccatcgccgccctcaacaggtttgaggaggtactgcagacacaagactgcaacataattctgcgccactgcggggacattaggcgttgggatgacctctctaaggtctttgagtggatgcaggagcgcgagatgaccaacgctgcatcttatagcagctacttcaagtaccttggactgagccgtgaccctgcgagggtgcttcgagtgtacggtgccatcaaagaccgaacattgagggtccatgtctccgtctgtaattcagttcttgggtgcttggtgaagaatgggaggttggacagcagcttcaagctctatgacgagatgatacgggaaggtctatctcctgatccattcacctacagcaccctgttagcagggtgtatgaagttgaagcaaggttataccaaggcaatgggattgatcaatgagatgaaatctcgtggtcttcagatggatattgtaatatatggcactcttctggcaatatgtgcatctcataactactgtgaggaggctgaagtatactttcagaaaatgaaagatgaaggccatagtcctaatctgttccattacagctccctgttgaatgcatattcagaaaattctgattatggaaaagctgagctattgatgaaagatctgaggtcctctggattaacaccaaataaggttatgttgaccactttgttaaaggtgtattctaaaggtggtctctttgagaaggctaagggactgctaactgaactggaagcctcaggttttgcacaggatgagatgccatactgcatattgattgatggccttgtcaaaggtggaaagatacaggaagcaaatattctatttaacgaaatgaaagaaaaaggagtcaaatctgatggttatgcatttagcatcatgatttcagcattgcacagaggtggtcatcaccaagaatcgaaacagcttgccaaagaattcgagtctgagaatgcatcatatgatctggttatgcttaatacatcactgcgcacttactgcagcacaaatgacatggagagcgtaatgaggatgctaaagaaaatggatgaatcaaacatatcacctgataacattacatttaataccttgataaggtacttctgcaatgcaaaggtttgtcacctagcatacaaaacagttgaagatatgcatgcaaagggtcatcaattaaatgaggagctttgttctcatgtaatggtacagctaggaaaggcaggtttcccttctgaagcattttctgtgtataatatgttgagatatagtaaaagaacagttcacaaatctcttcatgagaaggtcttaggcatcttagttccagcagaacttctcaaagctgcttatatagttgttaaggacaatgctgatctgatatctccttcttctttggagaagtttgctaaatcgttcatggtctcaggcaatataaatctaattaatgatgttatgaaagccctaaaccgctccgggtggcgtatcagccaggacatctttgggagagcaattaagagatacatccaaaagcctgataagaaacagttgctgctgtgcctcttggactggatgattggacaaggctattctgtagactcgtcatcaaggaacttacttttgaagaatgcacaactttttggcgaaaaacaagttatagcagaaatcctttctaagcagcagatagcatcaaggactattggcctaagacacaaaaaatgataaaggaaagattttgtatatgtaaattgttcatatacatccaggatatgcctaggctgattgtttgaggatcaatttattgtgctctgaggggtaagttagagacaagatatcagttatcatcctcaagtgcggatatgcctaggctgcaaacaaactttattaggatttcagattatggaattttccaatgaggcatgcttgttccagtagcggtacagctgggagtggagtatgaccatgcttgctatgatatgtgtgttagattgtgttgtctgaaggcttacaataaaattgtagccatgctgaggcatccaatgtttatctgttatctctattgaaaggcttgaagttatttgtcttcatcgctaaattggtgccaatgttgaggtgaacttggagaaagaatcgtgctttagtctgacaatttatttgctggtggttacataagatgtcctttttagagatgcgtctatggcacgaactgtttgagcttagctgaacggtggggactctatgattgaacttaaccaccacaagccgcatgatcttttcaataaatattgtcctgagtctac

SEQ ID NO: 32 - DNA, 1620 bp, Zea Mays
ccacactcctccaaccaagcgttctgcttccgtcctccaatgcccacagtttctgagagaaaagaaaccgacagctcgacccggatcatctctgactccctgcagaatcaatcatcggttccacactatctcttccaaaatttcgttgataacacctgattgatccctatctatatttgattttggaagcataaaagtgcaatgcagttgggaaatgcttctcaaagtacctcagcaatattaaatttctcctgtaccatgtttgcaatatattatgtggtcataataatgaagtttggtttgtaaggttctcaaataatggaagctacctggtgtcatcttcaagtgattgcactgccataatttggaagtacatgttgctaggtggaaaatgatgatacattgaccaagaagcactgcctccagggtcacgaaaaaccaatttcctttgcttcctggagcccaaatgacagaatgctgctcacttgtggtactggtgaatcattaaaactgtggaatgttgatactggtgaatgtaaccttaaattcagaggctcagcagactgcatcatcagttcatgtgcatggtttcctaattcggagaaaatagtatgtgccagctcggagcctgcaagtgctccaaataggatcttcacttgtgatctagaaggccaaaatctggaagtatgggctggagatagaataccaaaagtcagtgatctcgctgtgacacctgatggccgacacctaatctttgtatcttgcaacgatatctggattagggaacttccaagggggcgggaatggagatttcgtgagaagcagacgatttcatctctttctctctcaggtgatgggcagtcactcattgtgaaccttaacagtcaggagattcatctgtggaaaattaatgaaagttgtactgtgcctgaaaagttcatggggcacaagcaagacaagtttgtgattaggtcttgctttggtggttcaaactcttcgttcattgctagtggcagtgaggattcacaggtctacatttggaagaggcacgtggagatgccgattaaggttctacatggccacacgatgattgtgaactgtgtaagctggaatcctgcaaggccccacatgctggcttctgctagcgacgaccgcacggttcgaatatgggtagggcgcaaaaatgcaacaaagtaaacgctgttgaagtgtgaagttttgtatgtctgtgtaaatagttgtacatctggactgcatccacaaacctgtttgggacaatgctctgttcttcacccctgatgaatatgtcgtcgtagctatttgttcagaaataaacctgcaacagccataggtagccggtgctgctgtgtccagatgtgtgcctggctaaccggtgactttgcaacctttggcatggtcaacaaatatgtataagatttgtaacagcattataattggctagaatcgtgcactagcaaactgtccagcacctcttagcacattttatgtacttgtagttttgctagacagttttggggtgatatcttttcacccttgagagaggggatgaatagatgatattgtaaattttgctcaaaacaacacaaacttggtttataa

SEQ ID NO: 33 - DNA, 6623 bp, Zea Mays
gaggccgtgcgtcaacgataacagcaccggatggtcgtgtggagcaccggccgccctagccccaggtctctctcccttgggtcgtcgtcgtcgtcgtcgtctccacggctacacccacatcttgtcttggaggcgaagaaagaaatcggccaagtatcccgcgccgcccaagtctccccaactaaccccccaaacctaccaccacccatccattttcgccttggcttgacccgcggagctctgactcagagggcatccacggcggcggcagtgcgagggtccgagggaagattggaggatgcacctctacaacgcgtggctaccgccaccggtgtcgaccgcggcgcgtggggaggcagctgcctttgcgggcgctgtgcggaccgccgcggacgcgtggctgcccggggactccgactccgcctacgccacactcaagtggatctccgtgttcgacctttttattaaagcgaagagtgacattgcttctgaggatcttcaggctcttgtaaagcttggactggaggtatttcatgcgtcacataacaagtttgttgtccagattaagtggggaggtctgctcataaggcttttaagaaagcatgggaagaggctttcacttgttgtgcaatggagaccactttatgagacgttgataaggactcatttcaagagaaacatgggccctgagggctggaaagtaaggaagcaacactttgagactgtgacctctttagtgtgtgcatctaggaatttctttactgaaggtgtggctgctgaaatttggtcagagttcaggcccttgctggaaaatccatggcataactcagcatttgaaggtgttggatttctcaggctgtttcttccagcgaactcgaggaatcaggatcactttacaactgattggattagaaattgtctggacatatgggattctgtcacaaattgtaacttctgggacatccaatgggcttccatcatagcacgttgtataaaaaattcaagatctgtgaactgggatgcttttcttcccttgttattcacaagatacttgaacatgtttgaggttcctatatcaagtggcaatggttcatacccctttccagtggaggttcctgggaacacaagatttttattttccagtaagaccagaacactttccaaggcaattgcaaagtctgttgtataccttttgaagcctaaaagtttagcatttgagtattttgagaagctcattaattttttggaacagttctatcatccgtcaaatgggggtcgttggacctactcattggaacgcttcctgcgctatcttgttgtttactttgagaaacgccttcagcatgaacaatttgttatggcagttgaggaccatgatcaatcttatctgggaaaggaagaaaggtctgtttttgtcaaagctatcttgaaattattggatcgtggtcagtacagcaaggataattctcttgctgaaacagtttccgttgcaacttcgatcctgtcttatattgaaccaaccctcgtgcttcagtttgttgcaaaaaacttccaacgagccttagagacaactacagctacccatcagttaaagaacgctgtcacatctgttgcattttctggacgtgctcttcttctatgttctttatgttcatctcagaatgatgatagcagtgttgttgattcattcagtgatcttgttgtcgcttccctttcaaatgcgttacttggcatggatgccaatgatccacctaaaactattgctacaatgcagttaattgggtctatcttttcaaatctagctgcagttagtgatgatgtgcctatattgctccaatctactactctatcgaactggctagatgaattcttttcccgactgttttctgtgcttcataatctggaatcaagtagtcccattaatgagggttaccaaagctcattcatgtcagggacttttcttgttgacagtccatattacttttgtatgcttgaaattcttctagggaagttatcaaaacccttatttaatcagtccctgaagagaattgccaagttcgttaatgcaaatatcctccctggtgctacttcagaagttgggcttctttgttgtgcctgtgttcattcttatcctgaggaggcttcagtctaccttgtaaagccaatcttagagaccatcatgtcatcctttgaggggactccaaccactggttatgtaggaagagtagttgcagataaagcatctaccaaggctgcactttctcctgctctggaaacagcaatagattactatctgagggttttggccatatccatcagttatgccggtcctaccttactcaattataaggaggaactaaatcacataataacatctgcgttccagtccccttcttggaaggttaatggagctggggatcatctccttcgctctctgctaggaaatctggtttcttattacccaattgatcagtacaagccattcacttgtcagcctattggaaatattattgaaccatgggggtgttcgaaagctcatcaggatagggaggatgaaatgcttaatttccctccaaagtggcatgatccaagtcatgatgaactctcttttgcaaatgaattactacaacttcatttccagtcagctttagaagatcttttgactatttgtcagacaaaagttcattctgacacagcaggagatgagaaggagcacctaaaaataaccctgttacgcattcattctgcattgcatggtgtaatgtcttgtttaccagaaattcgcccgtcatataaagatgggaggtccctggaagtggagtcggctttcttcatagcaggatctgctggtagcactgttggaagctcagaaatgcgtgaaaaggctgcagaatttgtgcacatagcttgcaggtacttattaaaggaaagaactgatgacagtattcttctatcccttgttgtgcgtgtcattgatgctttggtaaactatggaagcttggaataccaagaatggtcaagccatgttcaagcttggaaactagaatctgcttccataattgagcctccatgcaacttcattgttccatttcatgctcaaggaaaaaagagacctagatgggcacttgttgacaaagcaaacttgcatagtacatggaggtgttcacaatcatcatatcacagatacagaatgaatgcagatgtttcgccatctgtccccatgattaatttgatgaatgatctcttagatctctcactacacaactatgaaactgttcgatcgtatgctggaagatcgcttacaaaattgttgaaacgttggccttctctaatttctaattgtgttctcacactcacgggaaatttgcgtgacccaaaagctcctgaacatgttgttcttggttcttgcagcattctgatctcacagactgttttaagacacttgaccactgattctgtttccctctcttcctttatcatgggaattctggaaagctctcatcatgaatcgttgaagtgtcagaaagctattactgagctctttgtaacatataatatacgtttctctggaatatcaaggagcttctttaaaactcctgaaaatcaagctgacaagccaggatttctcagtctaatttctcaaattaatgctttgggctttgagactaatggactacattggaggagaactgcgcatcattaaattaagaagaaagaaggtcccagagaccaaaacatcaagagttacaaggacccattaatgaggctgaaaacacagaaaaaattgtctaatatagatcgagctatctatcaacggagatcattgcctatttgagatcggtctatccatcctagccatataggcacgctatacagtgattctaacaatcacaacagagcaacacaccaccagaacagaggaagttgatctggtggcccttctccaagtctagatgcgcacatacctctactgaatcagttgcaggcgcatgaagatggacacccgcagcaaatgcgtccagctgtcttcctatattatagaagaacagtgtgatcctgatctgatatagtcgtagcctgatatacaagcacattctattctaattcttgcagctgtgtaatttcaggtacaatttgatggccaacagagtattactattactaattttggcatccagaagcgaatctggcatatattcacaaatgcttgcaaaaattgctggtcatttcttaagaaatttaaagagtcaactgccccactcaagaatgcttgctatatctgctttgaacacattattgcaaggatcacctcataagacatctgcacaaaattctaagcaaccaatagatcaccctgaagattgcaatatttcatcaacagaagagattttgaatgagataatccgggaggaaggattcatgaatgagacactgaacagtttatctcatgttcatattatttccgacaatgatggttcgtcaaaagcgagttatggggcatcatcttttcaaagcggatctgacaaagcaataacttacttctattttgatttctctgcctcatggccacgtactcctagttggatttctttactgcgtggtcacacattctattccagttttgctaggatattcaaaaggcttatacagcaatgtggaatgccagtaatctcttctcttcagagtacactagaagagtttttaatttcaaaagagagaccaaggcaatgtgtcgctgctgaagcgatggctgggatgctgcactctgatatcattgggaatctggaatgtgagaacaactggttgatggcccagttgcataagattatgttagcaccatctgtggagtcagctcctgaatgggcagcttgtattcgatatgctgttacaggaaaagaaagagctggaactcgtgctcctgttctcaggcaaaaagtattagaatgcttatgtactcctcttcctcattccatggcaactagcgtacttgcgaagagatattcttttctgtccgttgctctaatagaaatttctccacccaaaatgtccccagcagagaagcaataccatgttaaaattcttgatgaactacttgacagcatgaaccattcatctgctcaggtaagagaagcaattggtattgccatgtgtgttacaacctcaaatatgagactttctgggttatttggcactggatgttcaccgcaaggccttcatggggatgtaagcatgattgaacaaacaggaaataaatattggtctgaacgtttgacagatggagctaatgaattagccgtaagtatacaaaatagtactcaatctaagcaactagaatcaacatcagattcggctgaagatagcatggatgatagagagcaggctgatgctaaaaggatggaaacgatatttcattttatgatcgcatctttgaagtctgggcgatcttctgttctactggacactattattaggcttgtgtacccaattctctcactacaggaaacatcaaataaagatttatcattgcttgctaagtcagctttcgagttgctgaaatggaggattctacatcggccttttcttgaaactgctattacgtctattcttcctttagtcagtgatcctaactggcgtaccagatctgcactgttatcgtatctcaggacctttacctacaggcacacattcatactttctggctcagagaaatcacaaatctggcaaacaatagaaaaattacttgtggacaaccaagttgaggttagggagcatgctgctggtgttcttgcaagcttaatgaagggtatagatgaagatctatcaaaggatttccgtgaacggtcatatgcacaagcccagcatatttttgttgcacggagaagaaatttgaagttttctgttggtaccatccatggtgcagtccttgctttgacagcttcggtcctttctgttccatacgacatgcctagctggcttccttctaatgtctcgctacttgctcgcttcatccgggagcctccccctataagatcaacagtcacgaaagctgttgcagaatttaagcgcacccatgctgacacatggagcatccagaaggacgcattcactgaagacgaactggaggttctccgtgatacatcttcctcctcgtcgtacttcgcttagattaaaatttcaaaggccataggatattctctggtactggtgttgtgtatatgaatttataactgttgaagtgtcggtgtttttcataaagtatatccttgtacgtacctagttttatttcatcaacagatgccttcgtacaactgagatgaagttatgcagtctactgtataccgtctggacatagcggaagcattatggcatgtgggatccttgcgtgggctgagaaattgttaacatccaaatcttttgcccagtcaacgacgtgaataagatgctgcctagtttaaccgcataatgcatctctggcaactctaatagcagagtcaacgggctagatataaacttgcccatgttcattagaagcaagaaagaatcagccattgacattaagaagtacatgagcacccccgatgcaaacgtctatagccctaatcatacttgtttcttgcttcctc

SEQ ID NO: 34 - DNA, 4101 bp, Zea Mays
ctcttcgttagggtttcgcgcctcttctcaccgtctgcctactactagggatagacctccggcaaggcctccctcgcgccggcggcgtcagcagcggatatgggtgttccggcgttctaccgatggctggcggagaagtacccgatggtggtggtggacgtggtggaggaggagcccgtagagatcgagggcgtcaaggtgcccgtcgacacctccaagcccaaccccaacagcctcgagttcgacaacctctacctcgatatgaacggaatcatacacccctgcttccacccggaggacaggccctccccaacaacatttggtgaggttttccagtgcatgtttgattatatcgacagactattcgtcatggttcgcccccggaggcttttgtacatggccattgatggtgttgctcctcgtgctaagatgaaccagcagcgctcaagacgattcagggctgcaaaagatgcagctgatgcggctgcagaagaagaacggttacgtgaagagtttgaaagggaaggcagaaagcttcctccaaagcagcaatcacaaacatgtgattcaaatgttattactccagggactgaatttatggctgttttatcagttgctttgcagtattacatccatcgtagattgaattatgatcctggatggaaacaaattaaagttattttgtctgatgccaatgttcctggtgaaggggaacataaaatcatgtcatatattcgtggccaacggaatctgtctggttttaacccaaatacgcgccattgcctgtatggcctggacgcagatctgatcatgctagctttggcgacacatgaagtacacttctcaatactgagagaggtagtttatacacctggacagcaggataaatgcttcttgtgtggtcaggtgggacatctagcagcaaactgtgaaggaaaggtgaaaagaaaagctggggagtttgatgagaagggtggtgctattgttcccaagaagccctatcagttcttgaatatatggaccctgcgggaatatttagaatacgagttcagaatgccaaacccacctttcaagattgattttgaacgcattgttgatgatttcatcttcatgtgcttctttgttggcaacgattttcttccacatatgccgacgctagagatccgtgagggagctattaatttgctaatggcagtgtacaagaaggaatttccctcaatgggtggatatttaactgattcttgcacgcctgatctgagcagagttgagcacttcattcaagcagttggttcatatgaggacaaaatatttcagaaaagagcacgtttgcatcagcgtcaagcggaaaggataaaacgggaaaaagctcaagcaaagcggggtgatgatctggatccccatgttagggatgaccttattgtacctattcaacgttttcaagggtctcgcctagcctctggggctgtacctgtgccatatgagcagaatggatcccataaagacaataaagaaaggaatagtcgagctcggaaagctgcacgagtatcaacgtcaggttccagcattgcctcagccttagttgaagctgaaaatgacctcgaagcccaagaatgtgaaaacaaagaagaactgaagtcaatgcttaaagatgcacttcgcgagaaatctgatatttttaattctgacaatccagaggaggataaggtgaaacttggagaaccaggatggagggaaaggtactatgaagagaaatttggggcaagaacacccgagcagattgaagaaatacgcagagatgttgttctcaaatacacagaaggattgtgttgggtaatgcactactattatgaaggggtatgctcatggcaatggttctacccttatcattatgctccgtttgcttcggatctaagtggattgggccaacttaatattaaatttgaacttgggacaccattcaaaccttttgatcaacttatgggtgttttcccagctgcaagtgcccatgcgctaccgctacagtatcgacgattgatgaccgatccaaattcaccaataattgatttttatcctacagattttgaagtagatatgaatgggaagagatattcttggcaagggattgcaaaactaccgtttattgatgaagatcgtttgttggctgagataaaaaaagttgagcatactttgacgcctgaagaagcaaggagaaacagtatcatgtgtgatatgctttttgtgaatgggtcacatccactttcgccttatatctactctctcaacagcaaatttgggcatctgcctgacaaaaggagaaatgaaattaaagaaaaacttgatccttctgctaggttaactaagctcaatattgttgttgttcgacaagtaatattattttgttaaatgtacatgtattgatgtttctgtactgacactttcttttgttgtgtggaccgggggggggggggggggttagtaaaagagcattgaaccagtttgtctgctagttaaattgagaaaatgtggctgatttccacatgtgtggggatccatgccctcctatctttaggtctcctgtggacgggctggaggatattatggacaatcaagtgatatgttcaatctacaatcttccagaccatcataagcacatagcccagccgccagttggtgttatcatgcccaagaagattgttgaagccggtgatctgaaaccacctccagtgctgtggcatgaagatagtggcaggcggcctcatgataatagcaacaggcaaaacccatctggtgccatatcaggccgtcaacttggagaggcagctcaccgacttgtcataaacagcttaaatgctcagggtagggggcaacatagtggcacatcaatgccatatcgaactataatgaatggcttgcatcatctggatgtagcgtcccctgtcagcaatcaaggcatgcgtccacaagtggggcagtctgccggacctcctggttggtatgttcctaggggtagtgtatcaaatggtcaaccaccagcttatgcatcatcaggatcaggtcattatcagtatgaaagttcggggcattcacaatatgaacaaggtaaccatggaaggcaacaatctcacccatatgcaagagatggcttccatgatacacgaggaagggttccacctgcatatgggtaccagcagagcaacatgtatccatcgggtcctggattgtatgggcaacctccatcagcatatcctggggttcatggtggaggctaccaaccccctccatatggcggaggccagcagtggcagcaacaatcatatagttcgtatgccgtgcgaggcccctacggaggcaggccaccacccacaagggctgattcagggtcacagcaaccacagaaccgttatggtgctttagacagaagtaacaaccggaggccttcatctggatacagaagataatagtttgtgacccagtttatgttataactcaaagtttgttatcagtaaagcttcgagtaactcagctaaagcataggcggaatagtctgctaagtcttgtgaccttcaagcagttagggggtggccatcaaagatattgggaggcaaaatttgtatgctagtgcagactttcaggtactagcggttttgatcgccattgaagcagctaggtttgcggcatctcagaggttttgtgaagcaagatttgtatactactgttatcaacgggccatcaggtactggtggctggtcgccattctttatctgtagctgccatttgtttagaagatgtcataaacggccctggggtttaaataggtcccattgagaatatttttgaaggacgtttactctgagacttgacaagttttgggggcattttgatatcagataaatgtatgcaggagtgcagttttgatgatgtgtgtattccaagtcattaattaaagtgtgacgtgtctattgccaggcgaggaaggaaacgttacgctttgcacttatcccgttccaaattacaagtgatttcaagaaaaaaaattcagctttcttggagagtcctaaattactacctccattctcaaatattatttgttgttcgctaatt

SEQ ID NO: 35 - DNA, 4261 bp, Zea Mays
atttttcgttgctcgactggcccgacagatgagtccgtctcgacagtgaccggacctcttcgttagggtttcgcgcctcttctcaccgtctgcctactactagggatagacctccggcaaggcctccctcgcgccggcggcgtcagcagcggatatgggtgttccggcgttctaccgatggctggcggagaagtacccgatggtggtggtggacgtggtggaggaggagcccgtagagatcgagggcgtcaaggtgcccgtcgacacctccaagcccaaccccaacagcctcgagttcgacaacctctacctcgatatgaacggaatcatacacccctgcttccacccggaggacaggccctccccaacaacatttggtgaggttttccagtgcatgtttgattatatcgacagactattcgtcatggttcgcccccggaggcttttgtacatggccattgatggtgttgctcctcgtgctaagatgaaccagcagcgctcaagacgattcagggctgcaaaagatgcagctgatgcggctgcagaagaagaacggttacgtgaagagtttgaaagggaaggcagaaagcttcctccaaagcagcaatcacaaacatgtgattcaaatgttattactccagggactgaatttatggctgttttatcagttgctttgcagtattacatccatcgtagattgaattatgatcctggatggaaacaaattaaagttattttgtctgatgccaatgttcctggtgaaggggaacataaaatcatgtcatatattcgtggccaacggaatctgtctggttttaacccaaatacgcgccattgcctgtatggcctggacgcagatctgatcatgctagctttggcgacacatgaagtacacttctcaatactgagagaggtagtttatacacctggacagcaggataaatgcttcttgtgtggtcaggtgggacatctagcagcaaactgtgaaggaaaggtgaaaagaaaagctggggagtttgatgagaagggtggtgctattgttcccaagaagccctatcagttcttgaatatatggaccctgcgggaatatttagaatacgagttcagaatgccaaacccacctttcaagattgattttgaacgcattgttgatgatttcatcttcatgtgcttctttgttggcaacgattttcttccacatatgccgacgctagagatccgtgagggagctattaatttgctaatggcagtgtacaagaaggaatttccctcaatgggtggatatttaactgattcttgcacgcctgatctgagcagagttgagcacttcattcaagcagttggttcatatgaggacaaaatatttcagaaaagagcacgtttgcatcagcgtcaagcggaaaggataaaacgggaaaaagctcaagcaaagcggggtgatgatctggatccccatgttagggatgaccttattgtacctattcaacgttttcaagggtctcgcctagcctctggggctgtacctgtgccatatgagcagaatggatcccataaagacaataaagaaaggaatagtcgagctcggaaagctgcacgagtatcaacgtcaggttccagcattgcctcagccttagttgaagctgaaaatgacctcgaagcccaagaatgtgaaaacaaagaagaactgaagtcaatgcttaaagatgcacttcgcgagaaatctgatatttttaattctgacaatccagaggaggataaggtgaaacttggagaaccaggatggagggaaaggtactatgaagagaaatttggggcaagaacacccgagcagattgaagaaatacgcagagatgttgttctcaaatacacagaaggattgtgttgggtaatgcactactattatgaaggggtatgctcatggcaatggtaatttagctgctcaagttagccaaatatatcaaattatgcagaggttctacccttatcattatgctccgtttgcttcggatctaagtggattgggccaacttaatattaaatttgaacttgggacaccattcaaaccttttgatcaacttatgggtgttttcccagctgcaagtgcccatgcgctaccgctacagtatcgacgattgatgaccgatccaaattcaccaataattgatttttatcctacagattttgaagtagatatgaatgggaagagatattcttggcaagggattgcaaaactaccgtttattgatgaagatcgtttgttggctgagataaaaaaagttgagcatactttgacgcctgaagaagcaaggagaaacagtatcatgtgtgatatgctttttgtgaatgggtcacatccactttcgccttatatctactctctcaacagcaaatttgggcatctgcctgacaaaaggagaaatgaaattaaagaaaaacttgatccttctgctaggttaactaagctcaatattgttgttgttcgacaagtaatattattttgttaaatgtacatgtattgatgtttctgtactgacactttcttttgttgtgtggaccgggggggggggggggggttagtaaaagagcattgaaccagtttgtctgctagttaaattgagaaaatgtggctgatttccacatgtggtaagagattttttccagatagtttaacacctgctattattttgtacagtggaggaatgaatggatacataacactttgcagtggggatccatgccctcctatctttaggtctcctgtggacgggctggaggatattatggacaatcaagtgataccatcataagcacatagcccagccgccagttggtgttatcatgcccaagaagattgttgaagccggtgatctgaaaccacctccagtgctgtggcatgaagatagtggcaggcggcctcatgataatagcaacaggcaaaacccatctggtgccatatcaggccgtcaacttggagaggcagctcaccgacttgtcataaacagcttaaatgctcagggtagggggcaacatagtggcacatcaatgccatatcgaactataatgaatggcttgcatcatctggatgtagcgtcccctgtcagcaatcaaggcatgcgtccacaagtggggcagtctgccggacctcctggttggtatgttcctaggggtagtgtatcaaatggtcaaccaccagcttatgcatcatcaggatcaggtcattatcagtatgaaagttcggggcattcacaatatgaacaaggtaaccatggaaggcaacaatctcacccatatgcaagagatggcttccatgatacacgaggaagggttccacctgcatatgggtaccagcagagcaacatgtatccatcgggtcctggattgtatgggcaacctccatcagcatatcctggggttcatggtggaggctaccaaccccctccatatggcggaggccagcagtggcagcaacaatcatatagttcgtatgccgtgcgaggcccctacggaggcaggccaccacccacaagggctgattcagggtcacagcaaccacagaaccgttatggtgctttagacagaagtaacaaccggaggccttcatctggatacagaagataatagtttgtgacccagtttatgttataactcaaagtttgttatcagtaaagcttcgagtaactcagctaaagcataggcggaatagtctgctaagtcttgtgaccttcaagcagttagggggtggccatcaaagatattgggaggcaaaatttgtatgctagtgcagactttcaggtactagcggttttgatcgccattgaagcagctaggtttgcggcatctcagaggttttgtgaagcaagatttgtatactactgttatcaacgggccatcaggtactggtggctggtcgccattctttatctgtagctgccatttgtttagaagatgtcataaacggccctggggtttaaataggtcccattgagaatatttttgaaggacgtttactctgagacttgacaagttttgggggcattttgatatcagataaatgtatgcaggagtgcagttttgatgatgtgtgtattccaagtcattaattaaagtgtgacgtgtctattgccaggcgaggaaggaaacgttacgctttgcacttatcccgttccaaattacaagtgatttcaagaaaaaaaattcagctttcttggagagtcctaaattactacctccattctcaaatattatttgttgttcgctaatt

SEQ ID NO: 36 - DNA, 2221 bp, Zea Mays
gtcacagggacgcacagagagagaaacagtcgaaccaagcttctgacgataaaagctcacacacaagcttccctctgtcgcagagacacgcaccgatctagagagaggagccaatgctgttgtgcttcgagccttgtgttgcgcatcggttgtagcgtcgtcgacgacctaacaagctcgttctgtcgcatcgggattcattcctcacgcgtgatcccgccagacgaaggaacagcaggggaaacacgatgacccttccatctcatagaagagaatcagatctggagatcaatggggcttcgcaagatacagtcggcgcaaagaaaactgcatgcaagacgacgcagcggcaaatattgcgatctgaaatagttagcacttttcttctcaagggtagtcgatttgcgtattcaattcaactctttgctttcggtgcatctgggtaggatctatttaaatttgaatgtctacgttggactttaaattaaaaatatgcggtgcccattgttttatatggacctgaccacctgacaggtagactttaggccccgttgcttcatttcaataattttgagtctattttagttttttctattcaaacaggtctagctgcacaagctctatctttaaaaaactgaaactagaggtcaacttcataaaatttttgaaactccttaaaaggaaaaattgaagaaccgcgtccgagcattcaccggagcattcgtagttatgatttcccccgtgctccttgccatcgtgctcaagaaagtcagcttgactggcaccggcgggaggtatcaggggaggatacgactacgagcgctggaagcattcgtcgacctcgtccaaagaaggttcgcccacctcgcagccgtgactctgcagatgggcataatgcccttcctgtgcgtgatggtcgcggaagcgtgcgccagcttgccgccgctcagctacgtcgccccaaggctggtggccgcgtgcagagtgctggtgttcctctccaacttgctgctcatggccctgggctgcgggatcctcctcctcttccacagcaacgccctgctagtgctcactatctgctccgccatggcgctcggtgtcgctgccgtgcaaattcggtacctctgccgcggcgtcgccgatgccggggccgccgacgacgcggaggcggaggagtaccacagcaagctggagcagttgcttgagctgtcggccgggatgaccgtcatgatgttcctggtgctggaattcgtggcactggagagcctgctgaggaacactcgtcaggggcaggctgtcaaaagagggcagacgttcctcggcgtcgccttgctcgtcagcttcatggccagcacgctgggcgtctcgctcatgaacgtatggaccacgccccacgtcatcagcggctgcgtcgtcttgaccgccgagttcatgagggtcctgaatttctccttccatgctctgccgatcgccgcggtggtggtcttgatcacgctggatgtgcttccgcacgcgtggaagctggcagtgtggctgccgttcttccctctggtcatagtgctcctggtgctgctggcgcggtacagccgtgaggcgatgaaacagcaggagccagcagcaagaggaagagggaagcaaggaccagaagcaacgggcagcagcacagcatcggatccatcgtcatcaggtgaaaagaagcctgatgatccaaagccggcctcgttggagttgaccaaggtggcattcacgggcttcttggccgtggcagtacccagcgtcaccagtgcttctttctgcgtcccgtctgcattctttgtgttattcagtgcagcgaccgttctcctgggcctcttgtggaggctcctcacgcacgaggcggaaccaccttcgtgtgtcctccaagctgccaatcatgcttccttctccgcgcacatgtccattttcttggccgggattgcattctgggtcatggctgcctttgctcttcattaatgctcgacgtcatcctttcacagtttaacatcgtattcacggtctgctgtaccgtacgctttttttaatggtgtaacggagaatgtggaacagcctaccaatcgagcgcaaaattctttaattatttgtattttccatacaactttgttcttactatcatcaattgattagaagtcggcaatctcgtggaccatatgatggatattctatttttttaagcactgcttca

SEQ ID NO: 37 - DNA, 869 bp, Zea Mays
cagtaaaagcagtttataattccaagataagaaattctggtgtttcagtttaggccatggagacacaccattgctgtggaattttgtttagtggtggtgctagatgcgcctggatttggagaccggaaactttatgccatttttagtgatgttgcaggctgccctttgtgctcaagttcttccgagacatcaagcatgtgcgagaacaaggagttatagatgatcgtgacactttcctccatgcagtgcgagatctcctatgttttcactcaaatgtccaagcaacatgccaacatacatgtcaccacatgcattggttcagcagatatcaacacttcaatctgacttgctttctcttcaatatgagctagagaaaaccttctagctgactagaaaagatgtatcaattaatggtaagctaacaaagcactgtctaataatttctttcctttaccttatttgctgtcaataatttctctagctcaaagagtcgggggaaattttatgcatgaacaggtcagtatggtgcccattttatttcagactcccaatcaaacactatcctacaaaaaagagcaatgcagttatcttagtgtgtaatgcaggagtactatctacttgcgtggtgctggagggttttcagactcttcacgaccatactcatatgctacctatcctgctaatcaagtttctcgcatttctattccgaattcggcaccttctgcagtatgcgacgaccagacaaagcaatcccaggcattgttatacaggccatctggggattacaatcctttgcatttagacccagatattgcacagcttgctggatgttggactgagaagcctctcagtttcaagctttcagcctc

SEQ ID NO: 38 - DNA, 818 bp, Zea Mays
gacgcaccgcacaccctagcataggaggcaaagaagtacagagggaggaggcgggcagcagatacgcggcgtgacagacacccagggccaggaagggtgctgtttatccatgctgctccggctgaagatcgtcgtcggcgtccactcggtggtgctcccggttcctgttccaggcggctatggccatggcgcctgctacgcggcagtagagccctgctggcgccgcagccggaggccagcgctagcggcggcgggtggcctcgtcgcgaggcggccgaggcagagcgccacggtggtgatggcgctgaaggaggagccggagggcagcagccgccgcggcttcgccggcggcggtccgagctgggaccccgggctggagatccaagtccccttcgagcaaagaccggtgaacgagtactctgctctcaaggatagcgccctctactcgtgggcggagctgagcccagggtccttcttcctccgcctcggcggcctgtgcctcgtgaccttcactgtgctcgcggctccaattgccgccgcaagcttcaatccaggaaaggatccactcaagttcgtgctagcagctgggatcgggacgctgcttctggtgtcactggcggttctcaggatatacctggggtggagctacgttggtgatcgcctgctgtcagcggtggtaccgtacgaagaaaccggatggtacgacggccagatgtgggtgaagccaccagaggtgttggcccgtgacaggctcctgggatcttacaaggtgaagccggtggtcaacctgctgaagcagacgctgccgctgctggtgg

SEQ ID NO: 39 - DNA, 1897 bp, Zea Mays
caagaagcgcaaacaagcgggataaaaatcccggtcccggtcgccagccgactccaccgcacacgtgcccgggcagcccggccccgccacccgcacgccacgtaacccccgtccccctcctcgagcctcccgtcgcgtgtcctgcgttgcgcttgctatttatcacccccgtcctcctccgtcccaaggcagtcgcagttcacaactgcgactaaaaaccatctttggggcccttcgccgcgatttgcttcgcttctcggactaggttaagttgccttttcgattctcagaaaaagactggctctgcactcggataattttaaaatggatagtgcacagcagcccactggggaattgaacaattcgttcgatactcttatggtttctggaggtgaccagagtcgacagcctcaggatgctggcaatgaaacgagcttcacgaattggaaagacctccccatggagctgctcctgcgtatcatttcactagttggagatgacaggatagtcattgtggcctccggtgtatgcacaggatggcgtgacaccttggggtggggggttgcaaatctttcactatcatggtgccaggaccgcatgaatgacttggtgatatcactggctcacaaattcacgaagctgcaagttctatctctacgccagatcaggcctcagctagaagacagcggcgtggaggccgtggcaaaccactgccacgacctgcgcgagctggatctcagcagaagcttcaggctgagcgaccggtccttgtacgccctggcgcacgggtgccctcagcttaccaggctcaacatcagcgggtgctccagtttcagcgacgtggcgctcgtgttcctctccagccagtgcgggaacctgagatgcctgaacctgtgcgggtgtgtgagggcggcctctgacagagcgctacaggccatcgcctgttactgtggccagctgcagtcgttgaacctgggctggtgtgatggcatcactgacaagggggtgaccagcctggcttcgggatgccctgaactcagggccgtcgacctgtgcggctgtgttcttataacagatgagagcgtggttgcgctggcgaacggctgccttcacctgcgctccctgggtctctactactgccagaacatcacggaccgcgccatgtactccctggccgccaacagccgcgtgaggagtcggggccggggctgggacgcgacagcgaagagcggcggcggtggcaaggaccgggagcgggacggactggcgagcctgaacatcagccagtgcacggcgctgaccccgcccgcggtgcaggcggtgtgcgactcgttcccggcgctgcacacgtgcccggagcggcactcgctcaacatcagcgggtgcctcagcctaacctccgtgcactgcgcctgtgcgctgcaccctcaccgggccgggcgagtcatcctctccaaccacgcctactgaacgcaatgcgtgaataggcggcgatgctcagatgtgtggataggccgttcaaccgtgagcgacggtgtccgctgtttatgtgaggtgcttgttttgtgtttatcgtctgtaaaaacatggactgtatctgactatctgttgtcatgtcttttgagatctttagcctggactctggagcagcgcggcgacggcgatagccactcctttggtgggggctctcagactatctccaaaccctatcatactcttatttctatcctgttcgtttagtttaatccatatcggtttctactatagaggaacaaacagtcaaacgaacgagaacaaacagtctgtaaaagcagtctaaacagtcagctttagaaacgaacagtgttacagtttatttatagtgtaaaacagcctgcatgcatttgctggagttggc

SEQ ID NO: 40 - DNA, 1210 bp, Zea Mays
gggtcaattgtttgcgcaggctgggtgtggactacatcgacctctaccagatacactggccggatcggtatgttccaatgtttggggagacagagtatgatccgaactgccagtacacgtctgttccaatggaagagcaactggaggctctcggaagagcaatagatgctggcaagattaggtacattggccttagcaatgagacaccatatggtttgatgaaatttcttcagttgagtaaggattctcagttgcttccaaagctactgacactgcagaactcgtataatttgttgtgccgaaattttgattctggattggcagaatgctgccatcatgagaggtatgcttgacacggtcagaagccctaactgttgtcttcagtgtctctaatcttctcatgtatggtcctggcatgagttggtagtgcatattggttttttccctctctatgactatgatacaacgatacatagctctcctgcatgttcgaaaaaatattgacatctgtttagtttaaagaagaatggcattgtcatatcgtatttgctcttggttaagaattagcttgctggcttatagcccaatggcaatgggtatactttcaggaaagtatcacttatctgataattgtggtccgccagacgcaagaatgaatcttttcaaagggagatactctgaaggtgaatcccggtacaaactgcagagccccaaagtgaaagcagctgtgaagatttctgcaaagtatggcatttctccagtgaccttagcgattgcatttgtcttgagacatccacttgtggcatcggctgttttcggtgcgactaaattgtggcagcttgatgaagttcttcaggcaactacagtccatctttgtgaggaaattgttgctgagatcaatgatgtacatgcaagataccctaacccttgcccataaaattttgcaaaaaaaaaactttatttagcatcacatggatccttatttatcatcgagagatatttttttccaatatagcactgggtatgttttttcccaatatagcaccgccattagatgtgacacttagggcctgtttgtttaccccatggattatataatctggattatttttggaggattatatagggcctgtttgtttaccccccaaattatataatctggattaaataatcctaagaggcaaacaaacagtccagcttatttgcctag

SEQ ID NO: 41 - DNA, 1100 bp, Zea Mays
gtcgctgctcgcttcgcatcaaccgtatccgcttcttgggaaggctccatgcctcgccccgccgcaacaaactcctccgctccacacctctcaccaagaccgccccttccctgcccgcacacggcggcgccccaatctctccaccacgtgtgacggcgacggcgccccatccctctccagcgcgcgtagaggcggcgtccctccctctcccgtgcgtggcggtggccggatgcggtggaggcggagggtatcgccatcggcggtagcggcggcggcggaggaggcggcgccatgaggggggcgcgggcgggagtgggcgctggctgcggcggcaggaggtgggacagcgagcctgtgagctctcaagataatttccaggcttcagaactttgacaggagcagtgttgcatctgttgtcacagctgcagataagggaggtgcaacccatgttgacatagcatgtgacaaggacttagtaaagcttgccatggatgttaccaaccttccgaatatttttttgtggaagtggaagggttctagcagggattctcttcccttcagccgaaaatcaacaaggatctattcagggtggaactaactgacatcgaggtttgctcgagctccctcagcacatagctgaacaaggtcccgatgaccgctgttatctgcgtacactggtccaaatcatctgcactgaccagaagaggctcagctacgacacttgaggacgatgacagtgaactgaatatattttcacaattagtctagatttatggatgtgtgccttcattaatggtgacagtagtactcatgtggctccattgctcattgagatatggtggcatgttgaattgttgaccccccctacgttgtatcacatattcacatctactagcactggtagttatgaactaggacaacaactctttttatttttcgtattagccttctttgaaatgatcatgcgaatattgatattttcacattgtttttttttgcgattttagccttaattttcatataactagctcatatcgtcattgaatataagtctttaggttgttatgtttaggctgtctctagcatcctttgtatcccac

SEQ ID NO: 42 - DNA, 1960 bp, Zea Mays
cgtcctccgcccagcaccaccaacgcgcgccccggcgcctatttcaagccacgtcccaacaacttgccaattcgcaccgcgggaccggcgccgtcttgttgctccgctccggccgtgacacgagcgcaccagccaccgccagcccctcccccgtcgactcgagccacaggacaaggcatcccaaccgccgcccatctcctatcgtcatctgccgatccctcctcggttcctcacagtcacagagcctcacgtcacgtgtacctcccccaacccaacccagcccaacccagcccaaaacctagcgggcgaggggccggggaaccgaccgccggacgcggagatggaccacgcggcggaggcgcagcggacggacctgatgacgatcacgcggcacgtgctcaacgagcagagccgccacccggagtcccgcggcgacttcaccatcctcctctcccacatcgtcctcggctgcaagttcgtcgccgccgcggtcaacaaggccggcctcgccaagctcatcggcctcgccggagagaccaacgtccagggcgaggagcaaaagaagctggatgtactgtccaacgaggtcttcgtgaaggcgctcgtcagcagcggccgcacctgtgtcctcgtgtctgaagagaacgaggaggccatcttcgtcgacccggccctccgcgggaagtactgcgtctgtttcgacccgctggatggctcctccaacatcgactgtggtgtctcaatcggaacgatctttgggatttacatggtcaaagacaaggacaacgtgaccttggaggatgtgctgcagcctggaacaaacatgcttgctgctggctactgcatgtacgggagttcatgcacgcttgtgctgagcactgggaacggagtcaatggcttcactctcgatccttcccttggagagttcattttgactcatccaaatatcaagataccaaggaaagggaagatctattcagtcaacgaagggaacgccaaaaactgggatgggcctacagccaaattcgtggagaaatgcaagtatcctgaggatggttcaccgcctagatccttgagatatatcggaaggtgatccattgctcgttctcgactgtgtataccggtgtctcacagtttgctttcttctgcggtcatgaattgaatgtgtctgaagttttattaagaataatagtgcttgctcaagctattggtatctactcgtttttttcttctttttttttgtttaactaaaacggttgaatctatgttgttgtggacttgtggtccttgtgaatggtttgcagtatggttgctgatgtccatcgcaccttactatacgggggcatatttttgtacccagcagaccagaagagtccaaacgggaaactacgcgttctgtatgaagtcttcccgatgtcattcctgatggaacaagctggaggccaggctttcacaggcaaacaacgggcgcttgaacttgctcccgctaaacttcacgacagatccccagtgttcctcgggagctacgatgacgttgaggagatcaaagcactgtacgcttcaatgtcaaacagcggttgacctttctgcctgaggaaacgagcgagatcaaaagcaccgtacgcttcagagtcaactgcttgatctttatagattgtaataaaataataaaagagtttgtaaaaaaaaacaacaacactgcttgatctttctgcatgaggataaaaagcgcatagtttccccggttggatatatccatcagatatttattatgttgttgccttctacacaaatttaacgtgctttcgtgattccttaatgcaactttggattcatgtacggagggagtttatgtgaagacatattacttggtgcagtttatctccaacaaaatacaaaaaaaagaaccttgtgcagttatacttcagtcttaatgtcgtgttcatcggatttgtgacgc

SEQ ID NO: 43 - DNA, 2040 bp, Zea Mays
gcgccgtcttgttgctccgctccggccgtgacacgagcgcaccagccaccgccagcccctcccccgtcgactcgagccacaggacaaggcatcccaaccgccgcccatctcctatcgtcatctgccgatccctcctcggttcctcacagtcacagagcctcacgtcacgtgtacctcccccaacccaacccagcccaacccagcccaaaacctagcgggcgaggggccggggaaccgaccgccggacgcggagatggaccacgcggcggaggcgcagcggacggacctgatgacgatcacgcggcacgtgctcaacgagcagagccgccacccggagtcccgcggcgacttcaccatcctcctctcccacatcgtcctcggctgcaagttcgtcgccgccgcggtcaacaaggccggcctcgccaagctcatcggcctcgccggagagaccaacgtccaggcaagcacggcaccaccacacacacactgactcgcccgccccgacgatcaccatccactccgcgcctttcgtgcgtactctgctgaattactgagcccccccctgacggtgggcccggggcttatcacagatggacctcttcctagctgcatgctgcatctttttagctgaacggaacctactaccatgcatcgaatccatcgatcactatgctctctaacgcaagaatagactgctcttgctcttcaatcaacagttcaacacacgcacgcacgatccaaacgatattcgtctatctggcacagtttttttctctcttcagtttacctgctctagctgctcgtcgttgacattcaggagccaccccaaaaaaaaaatacagggcgaggagcaaaagaagctggatgtactgtccaacgaggtcttcgtgaaggcgctcgtcagcagcggccgcacctgtgtcctcgtgtctgaagagaacgaggaggccatcttcgtcgacccggccctccgcgggaagtactgcgtctgtttcgacccgctggatggctcctccaacatcgactgtggtgtctcaatcggaacgatctttgggatttacatggtcaaagacaaggacaacgtgaccttggaggatgtgctgcagcctggaacaaacatgcttgctgctggctactgcatgtacgggagttcatgcacgcttgtgctgagcactgggaacggagtcaatggcttcactctcgatccttcccttggagagttcattttgactcatccaaatatcaagataccaaggaaagggaagatctattcagtcaacgaagggaacgccaaaaactgggatgggcctacagccaaattcgtggagaaatgcaagtatcctgaggatggttcaccgcctagatccttgagatatatcggaagtatggttgctgatgtccatcgcaccttactatacgggggcatatttttgtacccagcagaccagaagagtccaaacgggaaactacgcgttctgtatgaagtcttcccgatgtcattcctgatggaacaagctggaggccaggctttcacaggcaaacaacgggcgcttgaacttgctcccgctaaacttcacgacagatccccagtgttcctcgggagctacgatgacgttgaggagatcaaagcactgtacgcttcaatgtcaaacagcggttgacctttctgcctgaggaaacgagcgagatcaaaagcaccgtacgcttcagagtcaactgcttgatctttatagattgtaataaaataataaaagagtttgtaaaaaaaaacaacaacactgcttgatctttctgcatgaggataaaaagcgcatagtttccccggttggatatatccatcagatatttattatgttgttgccttctacacaaatttaacgtgctttcgtgattccttaatgcaactttggattcatgtacggagggagtttatgtgaagacatattacttggtgcagtttatctccaacaaaatacaaaaaaaagaaccttgtgcagttatacttcagtcttaatgtcgtgttcatcggatttgtgacgc

SEQ ID NO: 44 - DNA, 2609 bp, Zea Mays
cgcgagccactgcacccatccactcgtacgccgcggtgcgccgcagcccgcagcccgcagcccgcagcccgcagcccgcgactccaggcatccacaaaaaaccatctcccccgcggccccggcaccgcacgctcccgacccggcgagtcccactcccacctaagctgagcggccatggcgcggcacctcgcgccttcgtctggaagcctccaccgtctcctcgcgtcctgccactacccgcccacctcccaggcgccgcctccccgtccgctcctcctcccgaagacccgatcggcggctatgcagctcccgcgacgcgggcggcgcgacgtcgtcgccgctgcagctgcctccgcaccgtccccctcttctccgggtaccgaggtggcagtctggggtaaggtctccgccgtgctcttcgatatggatggcgttctctgcaacagcgaggagccctcgcgacaggccggcgtcgacgtcttcgctgagatgggagtcgaggtcgccgtggatgactttgtccccttcatgggcactggtgaggccaatttccttggaggtgtcgcaagagctaaaggagtgaaagatttcaatcctgaaagtgccaagaagagattttttgagatatatcttgacaagtacgcaaagccaaattctggcatcggattccctggggctctggagctcatcttggagtgcaaaaattctggtcttaaggttgccgttgcatccagtgccgacaggattaaggtggatgccaatctggctgctgctggtttgtccgtgtttctatttgatgctattgtttctgctgatgcgtttgaaaaattgaagcccgctccggatatattcctggcagcatcaaagagcttaggtgtcgacacaaatgagtgcattgtgatagaagacgcgcttgctggtgttcaagctgctaatgctgcagaaatgagatgtatcgctgtgacaactactctagaggaaatagcgttacgacaaggcagtccctcgttcatacgaaagaatattggagacatttcaattaacgacattttgtatggtggttctaatgctcgccacaatgaaggggcaggaagtactgagaatagtagttcggtagggaatgctttgtctgagagtctaaacggagcaactgctgctggacattctgacacaaaaggttttccaatctcaaaaaataaaggaaatcctgcaggctgttgggttctcgacgcgaaatattgagatatggaagtctgggaatagccttgtcctgcctttttgttgcagtcagaaattggaaggcaatgcagttcgcatctcccaaaggcctactgaattttctcatgggtggaaatagttcagtttttgccagaaatgaaggagaatctctgtcatcaagagttcaacaaataaagaagtatctagctgagtttgaatctgggggttctgccacatatgttcctgagtttccaagaaagcttgactggttgaatacagccccacttcagtttggaagagatttgaaaggaagagtggtgctgctggatttttggacatattgctgcattaactgcatgcatgttttgccagacctggattttgtagagaagaagtataaagaaaaacctttcactgttgttggtgtgcactctgccaaattcgataatgaaaaggaccttgaagctatacgtaatgctgttctgcgctacaacattactcacccggttgtaaatgatggtgacatgtacttgtggagagaactgggggtgaactcttggcctacatttgttcttattggacccaacggaaaggttctagcacagatatcaggtgaaggtcatagaaaggatctggatgaagtaattggtgcagcactggaattttatgaagagaagaaactattacaaaatgacccccttcccttggcattggaaaaagacaaggatagtcgtttactaacttcgcctctcaaatttcctgggaaacttgctgttgatgtgcaaaacaatcgattattcatatcagacagtaatcataatcgaattgtggtgaccaacttggaagggcagttcatataccaagttgggagttctgaggaaggattgcttgatggcccatttgatgctgccctatttaaccgccctcaaggtattgcttacaattcaaaaaggaatatcttatacgttgcagacactgagaaccacgctctgcgagaaattaattttgtggacgagactgtgagaacactagctggaaatgggacgaaaggatctgattacagaggaggaggacaaggaacaaaccaggtcctaaattcaccatgggatgtatgctacgatcccgcagaggaggccgtgtatattgcaatggctgggcaacaccagatctggaagcacaatttacatgatggaataaccaaagttattagcggtgatggctatgagaggaatctgaatggctcaagcgccaccagcacatcgtttgcacagccttctgggatttcattagcttttgaaatgcatgagttacttgttgctgatagtgaaagtagttccattcgagttgttaatctgaagacaggaggctcaagattgctggctggaggagat

SEQ ID NO: 45 - DNA, 2264 bp, Zea Mays
tctagtatcaatcaaaatattcgggaaggattgcttgaagtattctatggagtttatgaaaaggatcctgacaaagtgcttcaagcaatggttcaaatgggtgtccttgttcctactggagatatgactgttgtcagaagaaccgctcaatttttccttaatagctttcaagagtgcctaacagcacaaaggaaggagagagaaatggcaaccgcagaactgggtttcaaaaagcaattaactaaggaggagaagtttgaaaagaggaagcagagacttgctgcaatcggagaggatcttttggcgattgctgctgatcaaccatttcgcttccctgccacatttacatttgtggtcagagcattctcagatggtactgggaaaggccttgatcctaggtttcatattacagagattgctaagccaaatgccaaggaattgctaagatttaatgacgctggtgttgaaatagttgtgaaggcaagtttcaacatttggtcaaagctgttaacctatctctatgatagcacatctcctaagggttagggcttgtttggctaggagcggattgaaggggattggaggagcctattaagcattgaacaatttacccatgcttgtttcctattctttggtcgtgataacgtttgcaaccatgaatagtacatattgcttttccaggtgtgtggagagacatgtgtattcctcctatgacgaattccttaggctccatgaaggtaagcctgtcttaatgggcttgattgttgaacctgacttagtacttttatccatgtcacggcattgaactagacagtcactcatgtccttaggatattaacggtatacatcaacaattcattctattttaattgcttgcaaaacttttttggcccttcaaatgagttccacgcatcaagaagtcaagattccaggaggcctaaaataggagaggagggcgcagcttgattcaatccatgtcaagtcagaggctgctgcgaggtttgcacatgcaagtagaatttagatggtcctgcttcgctttcatgtggatttatcttgcaaatggtatgtggatccgttccagaggcaatgagccttgcagccagtttgcagtataaaaaacccaattatgtccactgttggttcgacgcagcgtgtgccgaggatttctactgccaagcataagaaagtatttgaaatcaagaacttgcattcattcaatcataatgtgtttcctatcaagcataagtgtgtgtgttttgtttgatatctgctttaataggagattgttcttgtcaccccaaaaatgttcccattctactttcgggcaggtgaattgcagataaatggtctgttcgcaactggtgctctcgggcgactccatcactgagcaacccttcgccccggtggctgcggtgtcgcactggctgacacctgctcgcagttgcattacaagttttactgactatgtattttcaggtttattcaatttcagttgtaatgcttctgacagcagttgtatcagtcctcttgttcagcttccatgtatccctcgcatccttccttggatccacataagtgttaatgataattttgttgcatctcctctgctgatcagagctttcaaactcatgacagaataatgtactaaacttcagtttggtgtctatctcagtgtacctacactcagttggaaaacttcaaccacactgcaacaaggtttataaaaggtttgctatgaggaaaaacaaatttatgggctcaaacaaagtgtgatagtgaaagtcattttgcttccagcttaagaaccaagccaagaaaacagatatcaactgtgacgccacactcaaaagcttgtttggtgagagggataaggttgggatgctggagatctctaagcttttgagccgtggcttcccgaaaatctccaagcttttgtggtccatggagccagggatggctctttggtaaaagacttcgttgtggatggcctcttttatggtccatgttaagtcccaagtcccactaggtggttaagcagaaaaatcttgtgatggcattaagactttcagactttgtttttgggtctgatgcatgtaaaaaggattcccagtgtttctgttgctcttgcgatcctgtgaggacacatatgagagaaatatttagtttgttgatggcaaatcttgtcttatgttcatgcctgtacctatctgatcaagcgttatgatatgatcccatgcgtggtactgtgttctttagagatg

SEQ ID NO: 46 - DNA, 2776 bp, Zea Mays
cgagaacgcgccatggcctcaccctccgctccgccgcccctcttcattttctattgctcccccggtgccggccccggtctccacccacgtatccgcggaggcggaggagctgccgctcagcgaactcgacgcgcccatcccgtctcccccctggcgattcattcggccgcccaaacccacagggagtcggagccggaggagggaggcgttctggagtccgtccaaggagcgcagcacacgagcaacgtacgagggaaaggggaaacaaagagccttctccgatcgtcgccagctagctacccacctgtcctccggatgtcctggagttctgcatgcccatggaaaattcagttcgccgcgtgagatgcccgaggtgccacagcgttctcgaggagcccagcgcgccggtgtaccagtgcggcggatgcggcactagccttcgagcaaagaaccgtaccggcaccggcaccggcagcacgggagacgcggccggggcgtcgccggcgcggagctggctgcctcctcagagcaggcacctggacgccagcgacgtcgcgagcaccagcaggtccggcaccccgacccctcctgacgtcgggaccagctggcaccgagacaccgacgcgacaggcacccggcatggttccggtgatctcgctctcgtgtcggccgggacgcgtgggtccggtgacgtcgcgagcaccagcagtactcctgttgccaccgcgagaagcaggcgccgccaaggcaccgacgcgacgagccgtggctccggcgacgttgccagcaccagcagtactcctgacaccaccgcgagaatcaggcgccaagacaccgacgcgacgacccgtggctccggcgacgttgccagcaccagcagcacacctgacgccagtgccgacacgacgagacggggcgagtccggtggtcccgtgccggcgaggaatcgtgtccctgagcaagcggcagcggcactgatcgagaaaagagggcgcgaacagagcgcggccggtcaggaagtccgtgacgactctgaaggccgcggaacacgagatgccagtggtgcggagtccggcgtcggtggtgtcggcttctccggaggaaacagagatgccactcctgaattgcaggatgacacggagaaggggatgaaacgccatgacgaatctaacgatgctgcgagaaaggaacgtcgtggtgaagctgcagagcagccgcgttacgaccatgaccgacgccaagaacttgcaccgaaatcatcggctcaacccgcggctgctcagcttgcacgcgaagatgaagctgctactgccggagaaaaggcgccgagcccttctcgccacgaggttcaagaggaacatctgcggcccctgcggaagaagattctgaagacggtggatgagctgaaaggcgatctctctgaacttttcagcaagtcccccgagctcaacgcgccacgcgcgcgccctcctcgtcttcccaggcaagaagcctacgtgtcccacgcggtggcgggggcggcctcgggcctccctgccagagctcgccacgtcgcttctgctgccgaaggtcaccgtggcagcgtagctcgtgcggcgaagccccgtccagccgcggctcctccccgtggcttgccatcccggcgctaccgccagtgcagagcgcacccgtgctgccatgacgtggatccgaggccgtgccatcacgggcacggctgctgcggccaccacggcaaaccggagtgcagcagctgccgaggatactgctgcaggcccagagcgctggagccgtccgcgccgcggaagcccccggcagccaaggagcccaagcggcggctgccgccccgcaaccactgccggccagtactgaagggcgcgccgttcatcgtgtgctccagctgcttcaagctggtgcaggtgcccgccgacttcgccgtctcgaccaggatggtgcgcaggatgcggtgcggctcctgctccaccgtcctctcctactcctacagggacccggccaggaagaaagcctaccaggactcggtcaatcggtgcagcacagacggctccgagctgcacggcggcacaggcgaccaacggtcggacccgttcgcgccgttcatcgatggcttcggcctcagcagctactcgacggaggacgagcggcggctgcccgtctcgaggaacacgtcgttcgacaccctcgacgggacgaaaggcgtgggacggctgcaccggctgatggggtacgggtcagctagcgagctgctgcggcactcccctgacctgtacgagagcttcagtgagcgaacgacgcctgacgtgagacagcacgacacgaaagggaaaggcgtttgcatcgacgatgacgactacgactacgacttggatgacactgacgatgaagacattggtgcgctgaagagatcagcgaggaaagggtccggctggacgctcccatggattcccggcaagcggcaaggggactcgggagccatcaggatcaagtaaatagcaggaaaggcctgtgtatattgcaggaataggttcgggttttggaattcgaattggaatttatttcatagttttgctattccttttaggcgcactattggatttataggctgtttgtttgccattttttgaagcgtgaaaaatgctgttcaatgaaatgtaaatatcctgcgatgagtctcagaaagaataacattatggactttttaaggaacaagaaaaatcgaggtgcctagtgaagaaacagacgttctaatgcaatattgcaa

SEQ ID NO: 47 - DNA, 1828 bp, Zea Mays
atctggcgtcggtatccagcagcttacggacgaggtattgtccaaatgaaggccaagtgagttgaaccacgagtgagtcgtgtggtaggtgtaggtgtcgaggcgggattataagccaatgtaaccgaaggatgccttaacgaataacacgattcaaaatctttccccccttgttgcctgttgtgttcttccacgttctttgccaaattccggcttccttttccatgcccaagcatctcgttatccaagaccgtgacaagcaccacggcaccagtccgcgacaagtcaaccaaacgaaccaaaggcagagctgaacgcgaaagggagggagctcggatcggatgcggcggcgcgcggaggtggccgtggtgggcgcgggcgcggcggggctggtggccgcgcgcgagctgctccgcgagggccacaccgtgtccgtcttcgagaagtcaggccgcgtggggggcacctgggcgtacagtccgcgcgcggacgcggacccgctgggcagcgacccgggcgcccccggcgccgtgcacagcagcctgtatgcgtcgctgcgcaccaacctgccgcgcgagctcatgggcttctcgggcttcccgctggccgggcgggcgttcgccggcgatccgcgcacgttcccgggccaccgggaggtcctcgcctacctcgacgccttcgccgcggattccggcgtcgccccgcacgtcaggctccgagcccaagtgctgcgggtgaggccgctctgtccgggtcggggacagggggagaagtgggcggtggcgtggcgcggggaagacggcgacgtcgcggaggaggcattcgacgccgtcgtcgtctgcaatggccactgctcggtgcctctagtgcccaagatccgaggaattaacaagtggcggggaaagcaaatgcacagccacaattaccgcaccccggaaccattccaagatcagagtgttgtagtcgtaggattgggagccagcggaatcgacatcgctagagaaatctcacacgtggccaaggaggtgcacatctcagctagatactcggagggcaggctcggaaagattgaactctatcataacgcctggatgcacagcgagatagagtgcatccaagacgacggccaggtgcgctttgccgaaggctcatctgtggctgcagacaccattctttactgcacagggtaccgctaccattttccgttcctggacctggatgggttcaccgtcgacgacaaccgcgtcgggccactgtacaagcacgtcttcccacccaagcatgcacccaatctctgtttcgttgggctgccatacaagagcatcatcttccaggcactagagctggaatccaagtgggtcgccgccgtcctgtcggggcgtgccgagctgccggtggaggaggacatgacggccgacgtggaagaggagtaccagcgcatggaggacgccgggaagccgaagcgccacacccacacgctgtggcctcggtgggtggagtacctgaactgggtggcggaccaggtcggcgaggcgcacctggagcctaggaagtgcgagatgtatgagaaggcgctcaagtgcgtctggtccctggacgagggctaccgtgatcgatgggaagaagaaagcattggcagtggctgaggctcgccctaggatcaacaaatcaagcgtaatcccgttgttctagattattacttcactacgcgctgctagcatgctgttggttctgtgtcgaataggtattactaccaaacgaaaattctgaagaaaaataattataacgctgacttcgagctcgagatagaggaaacactatttgtcac

SEQ ID NO: 48 - DNA, 394 bp, Zea Mays
atatgtcccgaaaaacgaaaaactatgaggagaaggtgaagaacttcttctgtgagcacatgcacgctgacgaagagatccgctattgcttggagggcagcgggtactttgacgtccgtgacaaagatgacaagtggattcgaattcggataagggaaggagacatgatcatcctaccagcaggaatttatcatcggttcaccctcgacagcgctaaatacacgaagctcatgaggcttttcattggggaaccagtctggaccgcattaaaccgccctcaggaggaccaccccgcgaggcaagagtatgtcaagaatgagtcatgaaaccttgctgcatgttcagttaaatctgtgcacataaaactgcaaattatgggaacgcacggtgtagc

SEQ ID NO: 49 - DNA, 1709 bp, Zea Mays
atggtggcggagacagcggctattggaggagaaacaccagggcaatctctgaatggtactgtgaaaagtacaacgagagcagggacatttgtgacgttgcctgatgggagtgaaggattccttcccagagaagaggaagcattagcattatttacccttatcggacaatctgcaatggaaattggtaaacagataagggttaaagtactgaatgtggcacatgttcaggccactttgataatgaaaggggtggaagatgatgaagacgatctgaagacgctaaatatggagcttaagcgggactggtccagagggactaatgcgttcgagttggcttccgtaggaacaaagagatctttgcattcttgtatcagagggaaaggaccaaagtgccggctgatacttcagtttctgctccggaagctgaaagctatcaggaggaagctgctccaaaagatgaggaaagtgggaattcaggattctacttctgtggcaaatgttgttgaggaccaaactgtaggatctgaaagttcacctacaattagtgttgaattgtcctccaacgggaccccagatagatctattgtgtctccagtttcagaaactgcagataaacctactgaacctaaagaatcttcagcggtagaagaggttcttgtaactgcaagcagcgaggcagggaaagaaccagctgctgacactgaggctgtaccagccttgagtgagaaaactggtgccgagcaattgcgtgaggcaactggagcaggcatgatggactgcaaaaaggctcttgctaaaacagggggtgacattgataaagctcaagaattcctacggaagaaagggctggcggctgctgacaagagggctggcagagcaacagctgagggaagagttggctcttacatacatgacagcagaatcggggtccttattgaagtgaattgtgagactgactttgtgtctcgagtgcagtacatctctattgatgacgcccctaaggaggttgtgaagaaggagaccgagctggagatgcagagggaggaccttttgacgaagcctgagcagattcgggctaagattgtcgaagggcatgtaaagaagaggcttggagaattcacgttgttcgaacagacattcatcaagaatgacaaggtcacaataagtgagtggctgaagcaaactataactacaactggagagaatatgaaggtcaggagatttgcccgatacaaccaaggtgaagggctagagaagaaaagccaggattttgctcctgaagttgcgcacagacagcagcgaagccgacaccatctgctcctcccaaggatgacaagcctgctgaaacaacagaatccacggagaagaagccggctattgcagtttcaacctcgtttgcgaagcaactccgagacgaaaccggcgttggcatgatgggctgcaagaaagctctggccgagtctgacggcgaccttcagaaggctcaggagttcctgaggaagaagggcctctcatccgcagacaagaaatcctctcggctagccgccgaaggactgatcggctcctacatccacgatagccgcatcgactgcatgatcgaggtcaactccgagaccgacttcgtggcccgcaatgacaagttcatggagctggtgaacgacctcgtgatgcagattctttggagtacaatttccaacgcctggggttga

SEQ ID NO: 50 - DNA, 1888 bp, Zea Mays
tgattatttcccgatgcacgtaaaatagaatttttagtaggtaggaggagttccttagggctgttcacgaccagcttggaagacccaatggcaattgcccagcatcatgatgcggtctcaggtatagcaaaacaacacacgacagatgactactcgaaatgccttgctcttggagcatctaagaatgaaagcattaatggaataaacattgtgtcttgttatccattgcaatatacaacacttaagcccttggctgatagagtgattgtaaagattaactcttccgaggagaagacaactggtggaattttgcttccaacgactgctcagtctagacctcagggtggcaagaaatacgtcaaggaaaaatgtcgaacaactcagaagataaattcaagaactggttgcttcaacaagagtctgtccatgaggatggcatgcaacattacttgcccttcgattgagataggtggctacggtgatgctttgttgaacctgatatacgcatctccatcaagccagttcgaagagctcagtttagaatgtgagctagatgctacaggcaatcattctagagtgaaggatgctcaagttcatggctcacctatacctgagagtaatggaagattatcgacaactgctcagactaaaatgatgtccacagtctcagaagatgcaattcttgttggctcatctttcagataccaaagtagcctaggtaacaacaataagagggttgggctttttgatatgggtgatggaagtagtgagcctgctgctgaggacaacaatcaaatgcatcagatttcacgatgctgatatgtgctaagcatggaaacagaattgttctcacatgtatagttggtctaagtgatggcaaaagattgacacttgtggagttttttctgtgccagacatggagtcccttggaaaaaccgaatggtctatcatgggttttattctgcatacgataatacaactctactatatgagatcctgaagtctattaaatgggcaagaaaaacatatgtaaatcgacctgtaaatgttgttggacactccattggaggggatctagcttcattttgtgcccttgatctatttgacgttgagctcatgacttttggacagcctcggttaggcaatcctgcatttgttgtatgccttggctaacaagtcccaagaacaatccatgtgacccataaaaacgatattgtgccgcaattaccaccgtattattattacttaagtaaatggacataccaccacttcgctagagaggtttgacttcatgagagcatagatggaaatgtagttgccagaaatgagattgtatgtgatgattctggtgaggacccgacctatagcaggtacatatcagtctatctattttgtacatttatttcctatgtgtgtttcatattatttgtgttttctgaagaagtgggtcatgggatgagcgtagcagataatcttgagtactacagtgtcacactacatgttgactcaaggggaacctgtcagttcgtgattggtacagccaaccaagtatacaactacattcgtgaagttgatggatccatcatcttgttaagatatatatgcaagaaccatgagctctagaatcaatgtgactttgtatgccacgaaatgcacccttgtacaatatttttattttcaatttgtgtacagctcatgaaatactgttgtgtacaactcatgaaatactgggctctccagagggtaaggactaaggagagactcacctttttaaatgcacccctttgaccaagtgacattcgatacattgtaagctccataagattgccgcacaattcaatttgtgtatatcaataacactatgtattaccaagttatgcaagtatta

SEQ ID NO: 51 - DNA, 534 bp, Zea Mays
agatagggctgttttgcagcggtggcccaaaacatgcagaaaggctgcaagggccgaatttttttccaaatcgttccttctacacactgtcgaggagggcagcgggaagggacgagtcgacgccggtgtgcggtggcggcggtcgcgcggtaacgtttcccttcagcttcgatcatgttggtggcggcgccggccacaaaaggctcacccaccaaggatttgacggctgtcgagcccggggacgagagcaagagagagaaggtgcttgtggtggaatgcaggggccatgatgctgctcgattacaaaacattgaccatttgcatgggtgggaagatgacattgttggtttggttgagaaggagcacggaaatcagaaagtcttgctctcctttgaatgcgagacgctgaaggctgataaagacgcggaagatcatattgccaaatatatgccaaatctgtgtggactggacgcagttgaatctgctcggatgaacagcattagatagcatggattaccattaaggtgctgtttg

SEQ ID NO: 52 - DNA, 1736 bp, Zea Mays
gcgtgcccccctccctccctcagtccctctctctcgctctcggcgacgactgggcgaccgccgccgccgctgcgccgcccttgtccaggtgcccaggtcttcgcaggcgccttcgccaggtcttcgacgattcagggaatataagtaaaatgaggccagttttttgtgggaaccttgactatgatgttcgcatctcagaggttgagcgcctttttgggaagtatggaagggtggaacgagtggatctaaagacagggatatcatggagcatatgtgctcttcctggttgatggactggctctacctttactgcctctgcctgtgccccatctcatgccttgtccatctccaggagttcacaagtccaccgtggcatctgttcacatggaaacgaccacctcgtgactgatgtcttacttttacgatcaacattgcatcctcctcccccgcctcatcaccatttcctcgccaatccaaccatgccaatctcatggccggctggagagtggagagaagtggaggttgcaccaccaattctttgatgtgccacgaatgtttggattgttgtactctactactctgacatcatttagttcaacataaacaagggtttgcatttgtctacatggaagatgaacgcgatgctgaagatgctatcagtagacttgatggaattgattttggcagaaaaggaaggaggatcagggttgagtggacaaaggaggatcgcactgttggccgaaaaagcagctcaaggaggtctccaaccaatacaaaaccgaccaaaaccttgtttgtgatcaactttgacccgatcaacacaagaatccgagatctggagaggcacttcgataaatatggcagggtcgcaaatgtaagaatcaaaaagaactttgcctttatccagtttgagatacaggaggatgctacaagagcattggagggtactaatggaagccatttcatggacagggtgatctctgttgagtatgcacttcgtgatgacgatgaaaaaggtgaaagagggaacgggtacagcccagacaggagaggtcgtgaaagatccccaggtagaaggcgttctcctagtccctacggtagaggacgggagagaggtagcccagattacgggagaagcaaggagagggggagcccagactatggcaggggaggacgcagccctgataatggcaggggagtaagcccagctggtggtggcagaggcgatcatgccaggggtggagggcgcagtcctgactatgatcgccagcgccgggaagctagtcctccaggttatgacaggtcccccagccgctcacctgggagggaggcgagagagtagaagcagcgttccattccatgcctgtgttcaagcatcagatgaatgtgcaagttggtaatgttagccagcaggaaacttgtctactatgcgcgttagctcgtgtttgactttccacccatttcagtatgaagcgacctcagaatgtaactcatgtagtagtattttttcaatggtagctttcagcactggtttgaacctgttgttggctttattttctgagtaaaatgcaccactcgaactttacgcattgtgtcacttgggtactgaactcagaaaaccagttaaacggatcatgaaactttgttggcccatgtaaaaccattcaaagtcagttctataaaccggtagccacttttgtcatttgggttctcgaactttcattaggatgttctaa

SEQ ID NO: 53 - DNA, 1206 bp, Zea Mays
cttgctctaaattctaaaataacgcaaacggtaccagcaagcagcaagcctctctccattttcttcgccggcggcaggtgcacacatcggggaatggcgacctacgaccatgccgccaccccgacaccgcagtctccgggcgtcggcggcgtacccttctcgtcctgcatcggcgacctcctccgcttcgtcctctcctcccacgccgccgcctaccccggtgacgacacggtcgctttccccctctcgccctcctactgcgcccgcctcctcaacgacggcgaactgttcgagaagctggaggcctgtattcagcagtgcctcgaggaggggcggctcccggggccgcccgcggtggttgggattccggctgaggaggaggggccggaggagagagggtggaagctgctgctgccggagaaaggcgctgagttgaagcggatgtacgatgctgttgagtttgagctgcatgttcaggaaccctacttcactcaactcagagccggagtcaagaaggttgaagggagattagcgactggtaactacaaccggattacacaaggttctttgctgctattcaataaatgcctcttgcttaacgttgaggcagttaggaagtacaattcattctctgagatgctgaaaggagagaaaatctcaaatgttcttcctggtatttcatcaattgtagaaggtgtgaaagtatataggaaattctatgcagaggaaaaggagaactcttatggagttttagcgatatcagtttcaaagccaacatctcaaccttacataaccatgaataatatccttgctggattggggtatgatggactgggtagactccttggtatggcgaaaacaactggaactgttccagatggactacctcctccaagatctgcactgctgtcatcttgtatgggactggttcaaccaaatgagtaggaaaggatggtggggcagctttaatgggagtgattcaagcaagaaccaagctgcatctgaaaccattgagtctttgctgcgtgtgtgttgttggatgaatgttcatctgactcaaccctatggtcctgtttttgaaatccgcgtgcatgaaggttatggtgccagatggtctcaagatggttcaaagattagcagttgggggttgttcacttgatatctggtgctgaaagattccagaagtgatccaatcaagagaccaca

SEQ ID NO: 54 - DNA, 302 bp, Zea Mays
gctgcggttctctgggcatttgatgcgattaaagcctgaggaggttgctgggatgataaaggactttgatgaacctggaactcttgcaccaactggtctttttgttggaggtacgaagtacatggtgatccaaggtgaacctggagttgtcatccgaggaaagaagggcactggaggcattactatcaagaaaactggcatgtccttgattatcggtatctatgatgagccaatgactccagggcaatgcaatatggtggtggagaggctcggcgattacctgatcgaacagggcttctaag

SEQ ID NO: 55 - DNA, 96 bp, Zea Mays
gtgtcatggaatcaatgaaacatgaagttagaagcacactgagatccagtggcttgtgaccccttgaccctttagaggaagcgcgctagagtcgtt

SEQ ID NO: 56 - DNA, 1033 bp, Zea Mays
cacatcgcgtcgcgattcgcgagggctccccccaaccccatcaagtctggccaggtctctcccatatcgggttctcccttcctcttcctgtttccgcgcgcgagatcgccgccccgggtgggctctagatcccgatggcctcgcgccgccgcaccctgctcaaggtcatcatcctcggcgacagcggggttgggaagacgtctttgatgaaccaatatgtgaacaagaagttcagcaaccagtacaaggctacgattggggcggatttcctcaccaaggaggtgcagttcgaggacaggctcttcactctgcaaatatgggacactgctggtcaggaaaggtttcagagtcttggcgttgcattctaccggggagcagattgttgtgtcctagtctatgatgttaattctatgaaatcgtttgataatcttcacaactggcgtgaagagtttctaattcaggcgagcccatcagatcctgacaatttcccttttgttctgttgggtaacaaagttgatgtagatggtgggaacagccgtgtggtgtcggagaaaaaggcaaaggcatggtgcgcctctaaagggaacatcccgtactttgagacgtctgctaaggatggaacgaacgtggaagatgccttccagtgtattgtaaagaatgctctgaagaatgaaccggaggaagaattgtatgtgccagataccgtggatgtggtaggtggcaaccgggctcagagatcatctggctgctgttaagacatgaggcatccacgaggcgtggtgatcatcatcggctatgcagtgaccaaacaatacctcaacattgctgggcctccatggttatctacgtgtccgtattccatttgttacctttccagtctcctgctatgtacccaagggcgcatttcccatgctgtcagtcaatccgtagacttcatttgtgcagttccatcagtagcgtcataccttgtgaatacagttggacaaaataagagcaagcctgaactgaagttcgtctctgtgaaaaaaaaaag

SEQ ID NO: 57 - DNA, 335 bp, Zea Mays
cactcctccaaaaagtgcatgacaagcagttagttgatgacattccagtggagaagctgctagttcatgatgtgccagttgacattatctgcacccctactcaggtcatcttcacgaagactacgatcccaaagccacaagggatttactgggaaaagttatctccagaaaaattgggccaaatccgaattctaagagagctgaagcaacgtatagagcaagagacaggaactatgcttccttgtggaccttcggagaagctaccgccaacagctcagagaaagcagaggtggcagcggcgacgatgagacttttcaacctcaaacaccatgaag

SEQ ID NO: 58 - DNA, 1386 bp, Zea Mays
tattaggtgctaagtattcagcatctgtgaaagaatttacttgatggaggtttatgttcaggtggcactgccagcagaagtgatccgttgacttcagctatgggcaacctgtgctgctgtgttcaagtcgaccagtcgactgtggccatcagggagcagtttggcaagtttgacagcgtgcttgagccaggatgccactgcatgccttggttcgccggcaagcgtgtagctgggcaactcacactcaggctgcagcaactggatgtgcgctgtgagacaaaaacaaaggacaatgttttcgtgaatgtggtggcatctattcagtaccgcgctctggctgacaaagcaagtgacgctttctacaaactgagcaacacaaggtcccagatccaagcctacgtctttgacgtgatcagagcaagcgttcccaagctccatttggacgatgctttcgagcagaaggacgagatcgcaagggcggtggaggaagagcttgagaaggccatgtcggcttatggctttgagatcgtgcagactctcatcgtggacatcgagccagacgagcatgtgaagcgcgcaatgaacgagatcaacgcagctgcgaggctcagggcggctgcaaacgagaaggcggaggcggagaagatcgtgcagatcaagcgcgcggagggggaggcagaagccaagtacctgtccgggctgggcattgcgcgccagcggcaggccatcgtggacgggctcagggacagcgtgctggggttctccgtcaacgtgccgggcaccaccgccaaggacgtcatggacatggtgctcatcacccagtacttcgacaccatgaaggagatcggcgcgtcgtccaaggcgtcctcggtgttcatcccgcatggccccggagcggtgcgcgacattgccacgcagatccgcgacggcctcctgcagggatcctctgtcgccaaacactaagctgcctgccgttgccgttgctgctgaagaacaccaccaccactattatatatataatataatgatgatcttggtaccagagtgatgcttgtctatattgttcatcactcatcgtcaccatctgctaggatggctatctttatgcttggggattggagaaaaccttatctaaccttttagggaaccggtaatatatataatgcagcatgagtttgcagtatgttcatcagaaccttttagagtctagatgcatgaatggcatcatagaatagaatacaagagttgcttccattccatcactgagttactttttcctcagcaccggttgctgctgcccgttgcaactgctagagatattaaatctgaactgatctttataaatttataataaatttatcttagcttaaaaaaatataaaactaa

SEQ ID NO: 59 - DNA, 1647 bp, Zea Mays
ctgccccgtgacctccactgcgcgcgcgggcaccaatggcggccgcgtcgctcaagttcgcctcccccaaacccttggcctccgcaccgtccgcgctcctttgcgggcgtcgcgcccaggcgcggcccctcccagcaagtcgcctccctccgcctacccgcgtcgccgtgctggaggcgctgatcggcgggaccgacttctccgaggaggatgcggaggcgacgctgaagctgctcctggacgagaaggacgaggcgcgcatctccgccttcctcgtcctcctcagggccaagggcgagaccttcgaagagatcgtggggcttgcgaaggcgatgttgagctgctgcatccgagtcgatggtctggacgacgccgtcgacattgtcgggacaggcggcgacggcgcagacaccgtcaacatctccaccgggtccaccatcctcgccgccgcggccggcgccaaggtcgctaagcaaggaagcagggctagctcgtcggcgtgcggcagcgccgatgtgctggaggcgctcggggtcaacatcgagcttggacccgagggtattaaacgatgtgtcaatgaggtgggtgttggattcatgatgtctgcaaattatcatcctgcaatgaaaattgtcagacctgtgaggaagaagcttaaaataaagacagttttcaatatccttggtcctctactgaatccagcaagggtgcctcatgctgttattggtgtttaccatgagaatatagttaccaagatggctaaggctgctcagaaatttggaatgaagagagcattggtcgtccattcaaagggtttggatgaaataagcccacttggtcccggatatatccttgatgttactccagagaagattgaaaaaatgttcttcgatccattggattttggcattcctcgctgcacattggaagatctgaaaggaggcgatccagcgtttaatgcaaaagttctccaggatgttcttgctggtcaaaggggggcgattgcagatgcccttgttctaaatgctgcggcgtccctacttgtcagtggtaaagtgaaaaatttacatgacggtgttgctttagcacaggagacacagcggtccgggaaagccatcaatacacttgagtcttggataaaaaaatcaaatagttccagagactgagtgaagttgagtagcaatagatggatttctgcaataagacatgaggaatggtagcaaataagggctccgctgagtccatccatcatccgtgtatgattggctttcttctcgtgttttgttcatgatttgtgtcagaaacctaggtggcatctagtctggtttatgtattgccagtgctgttgtgtagaaaaatctccgtcgatattctaagctttttggttagaaaggtgcgctcttcattgtccttgacggaactcggggtagatgaacataggccatctgttgtgatcttgtgatgctgcattacgtttgcaatggatcatatattatgcaatggcatgggaagattatacccatttgtaatgggggagaatcagggcttaaacatttctacaataacgtgcgaagagttgtccccattggtaacgcatgtcctgaaatatgaataaagctgcaggcagttgatattttgcaactgaaa

SEQ ID NO: 60 - DNA, 1245 bp, Zea Mays
gagagatgcatgggcctcaacgtttaggcccactactacacgcagatgagcccaacgatctagggtttccagctctacacgccgcacacataaatcccgagaccaaaccttcgcctccattcgtcccccgccgccgccgctcccagtctccacgcggaagcagcgcctcgcaacgctcctacccaatggcgccgacgtcgaagctgtcgatgggcatcaagcgcgcgtcgcggtcgcacgcgtaccaccgccgtgggctctgggccatcaaggccaagaacggcggcgtcttccccaaggccgagaagcccgccgccgccgcggaacccaagttctaccccgccgacgacgtcaagcctcgcgttcccagcacccgcaagcctaatcccaccaagctcaggtcgagcatcacgcctgggacggtgctgatcctcctcgcggggcgcttcatggggaagagagtggtgttcctcaagcagctcaactccggcctgctcctcgtctctggtccattcaagatcaatggagtaccgatccgtcgtgtcaaccagacctatgtcattgctacatcaaccaaggttgacatctctggtgttgatgtcgcgaagtttgatgacaagtactttgccagggagaaaaagcagaaggtgaagaagacggagggcgtccaagtctctgcctgatttcaaaaaggatgaccagaaggccgtggatgctgctctgatcaaggctattgaggctatcccagagctgaaggcctaccttgtttcattctgcttgaagtctgtcaaatattatgagaagatctaagaaagttttatcggtattggtggttcagcatggcgttatctgcttttggttctttgtgtaggtcaatgttgtcttaagatcatattttgtttgaattgctgactgtcgtgtttttttgctatctttgaacgtcttaaccgttccactaagagcatgtttggatgagttaggttttagttactagttgagctaaggctatctccaggacattttctatttcaaacttttctctgcaaacattgttaactgttaaacagtgttattcatagttttgcgaaccttgttttttaaaccaatcaaagttaaattaatacttgtaataaactctactgccaaatagcttaaattaaatcaatcaaagttaaattagtacttgtaattgtcattcaaacatttgatgtgacgtggtattgtggtatgaaactctagtttggt

SEQ ID NO: 61 - DNA, 1371 bp, Zea Mays
cgcgtttgggttctccgccaggccggcgcgttcgacccggtagcccgaaaccgcccatatatcttgccaactttctgcgacacggtggaggcgtggagctaactacccccacgctggctcgccaccgccgccgcagcaggcgtgggaatctgggcagcgccccgcggagaagaggaggcagcgcgctctccgtccgccatggcgggctcttccgaccccgacaagctcatgagcaaagccgacaaactaacaaaattgagttttacaagatggaatgctgattggaaaagcgctacctccttgtatgagcaagctgcaattgcgtataggttcagaaaggataatgagaaagcaaaagatgcttttgagaaggcctcaaaaggacaggaaatgatctcctcaccatgggacgctgctaagcatatggaatctgctgctgctttagcaaaggagcttgggcgctggaatgaagtatctgatttctatcacagagcttcagaattataccgtgaatgtggaaggccacaacctgcatctgatgctctagcaaagggtgccagtgcattggaggagaaatctccagaagaagctatcaaaatgtatgatgaggcttgttcagttctagaagaagatgggaaggaacagatggcttttgacttgtaccgtgccgcagcagctttgtatatcaagatggagaaatattcagatgccgctgctttgtttttaagacttggttcagctgctgataagtgcaatgccatcaatagccaatgcaaggcctatctgagtgcgatcatcatctatctttacacacatgattttcagcaagctcaaaaatgctacaatgactgctcagaggttcaagccttcctcaatagcgaccagaatcgatgcgcaacgaagttattgtctgcttatgaggaaggtgatgctgaagaaatcaaacgcatggctcaatcaagtgccttcaatcaccttgaccatgtggtaattaggcttgcacggaagctaccaacagatgatctgcaggccatcaagaaagctgacgatggcgaggaatccttggacgaggatgacctgacttaaaacgatctcccgagccaaaaggtgcatagagcaaacgtcatagtttgccataggtgggggaaccgctgtaaaaagaagttatgcgagttacatactaaaaacttgggcagcattcccagatctataaacatgaaatttgtagggcccaattatgttgtatccgtactggtggtttggtgttaccgaaacagcgaaactttagtggtataggcaaaaaaaaaaaaaaaaacgggggaaaacagagaggagcgtaaagcagggaaggaattgacgtacctgacaaga

SEQ ID NO: 62 - DNA, 918 bp, Zea Mays
cccatcccattgctcgttctgtcccttcgttcacaacctcctccacgaccaaacgatccgggttccagcggcggcggcggcggcgaagatgatcataccggtgcgctgcttcacctgcggcaaggtgattgggaacaagtgggacctctacctcgacctcctccaggccgactactcggaaggggatgctctggatgctttggaattgttccgctactgctgcaggcgaatgctcatgacccatgttgacctcattgagaagttgctcaactacaacacactggagaagaccgagacaagttaagtgagcaagcatatcatgctctgaaagcactactgtttcgcagtatcatatatattgtaggcggtatgttgtctcttctctatcaggagaggattgttgtcagtgtgaacttgcttttgctcacgagcattcaaggactgacagtgcatgttgcatctatgccacgatgttggagattttaatcgatataataactgctaactaatactctctttgtctctgtcccaatttataattcgtttgacctttttacatcaagtttgattggctcgtattattgcatcggccgtatgcatactcatgtgcttcgaggtatacaacggccgaaaatggccactcggtccgtcgtcgtcgcgaggtatatacaatggccactcggtcatgtgcttcgagctaggctgtacctgtacgtgctgctatgatttgatgcgtccgcatgtgcttcgcggtgcaacttgcgttgttcctaaatcatgcagcatttcgcttcgttgacttccacagcatttcgcttcgttgacttccacaataggctgtacctgtacgtgctgctattattcatctgggactggcatatagtacgttcagattcttcatgttttggcctgatcagg

SEQ ID NO: 63 - DNA, 485 bp, Zea Mays
gttgtttcaagggagagaaagataagagaatattgtgagaagtatgccaaaccagaggacgctggtatcactccggaagacaagtccagtgatgaagagcttagcgaggaggaagacgactccggtgatgaagctatacttggcaatcctgatccctagtctgagttggaagaagccagtccagctcatcaatacaatgtttattgcagaaattgcaattaaacaaaaactgaaaaacaaaaaaactttggatggcatgtaaataagtgtaccttgtatgttctccaatgttgtttccttcatttggctgatcgaaattctgattgctcttacatccccccccccccccccccccttcccgcactcccacgcgtcatggtttgcagtcgatctgtgctttggtttcggaggaatggaaaagacaaggctgttactttctgttctccattggatgttgccgtggactcaataggtgtggattgctt

SEQ ID NO: 64 - DNA, 2811 bp, Zea Mays
cccggattccaaatcctcgtcgtccgcagcttggggtggaggcatcgacaaaccatcttgccgagcatcagggcacgcccctctacaacctgccatggaagataccctgcaagctcatgaacatggagctgaaggctgagccggatactgatgaggtgtacgcccaactcaccctgctccctgataagaagcaagatgagaatacatctgcaagagtggagaatgaggaggcagaggaggaggtggtgcctcatgtgccaccagccacaagtgaggggcttcgcatccattccttctgcaagacattgactgcctcagacacaagcacacatggtggtttctcagtgttgcgccggcatgcagatgagtgcctcccaccactggatatgagtcaacatcccccaaatcaagaattggtggccaaggacctgcatggggttgagtggcggttccgtcacatctttcgaggtcagccacggagacacctccttcagagtggttggagtgtttttgttagtgccaagcgtcttgttgcgggggatgcattcatatttctcagaggtgagaatggggagttacgtgttggagttcggcgtgcactgaggcaccaaaccactatcccatcttcagtcatatcaagccacagtatgcatcttggtgttcttgcaacagcatggcatgcagtgaacactgggagtatgttcactgtctactacaaaccaaggactagtccagctgaatttgtggtttcacgagctaggtactgtgaatcactgaaacgaaattattcaatagggatgaggtttaggatgagatttgaaggtgaagaagcggcagagcaaagattcactggcacaatagttggaatatgtgtttctgatccatctggctgggctgactcgaaatggcgttcccttaaggtgagatgggatgaagcttcttctgttcctcgtcctgaaagagtttctccttggcaaatagaacctgctgttagcccatctcctgtgaaccctcttccagtcagattcaagaggtctcgttcaagtgttaacgcctcaccatctgatgtgtctactgtaaacagagaagttgcttctaaagtcatggtagagtcgcaacagaataatctcccaagggccttgcacaatcaaggaaggacacaattgacaggtcgataccgtgatagcactgatgtgaagactgctcaggatcttaccatgtggtcttcaggaactgagcaacagagaaacaatattgctgcccagacaaaacgatgtctggagggttggacgcaatctagaactccagaaggttacaatcaactgttctcggcatttcaaccactgaaggatgcacataatccacttcgtccttttcctaataaaatatctgggactcgctcaagtacctgggtcacagccgatgcccgttatccagctcaacaagccaatcacaacatgttacatggcacattgtcttttatgcctcatagcagtggttttaggatgattcaacagaataatctagtgacacctgaagctgcaaattttactgggaaatcagctttcacttcacttcagggccatgtcactgatcagtgctccacaggctggtttggatctattgagtcaaattcccacacagaccatgcatcgtcaagtttgatcaggtcccagcctttggttattggaaatgatgttcagaaaaccaaaggcacttcattcaaactatttgggattcctcttggcagtccagaaaaatctgaacctctggtatccccaccaagtgtcgcatatgacgggaaacttcaaacttctccaacagacaacaatgagccttgttcagaagctacccagaatatccagaacaaagtgcaaagtagttcaaccagaagctgcaagaaggtccataagcaaggcagcgccctcgggagatcgatcgatctaacaaagttcgcttgctacgatgagctgattgccgaactagaccagatgtttgacttcgatggtgagctgaagagtccttgcaggaactggttggtcgtctacactgacaacgaaggcgacatgatgctggtcggcgacgacccctggaatgagttctgtgacatggtccacaagatcttcatctacacaagggaggaagtggagaggatgaacccaggcgccctaaacgcgaggctcgaagactgcctgtctgactcgctgggaagagggctggcttccaaagagccccggagcggcccctcgacttcggctgtcgattctgagaaccgcgctaacttgtccagtcagtgaggcagcttcagcagcaatgtctagccttggctgcacggaagaactactgaccctaagctaatcttgtgtgtgtttcacttcttgcagcccttttgaaagtggtgaagcagacaaaaggccacgtgtcagagtgaccggaagaacgagaaaggggtgtgtttcagtggtgtgtagtaggtaggtaattttgtgtgtatgcctccgggtaaaagccccgcggtacccagtttgtagatggtgcttctcctggtgctagtttcccgtcgtaagctggatttttttggggggtgtgtgccctgctctgtgtgctgacccgcctgggggtaagttgtagcagagcaggagaaagcaggcaagaaaccgctggtgcgcctgcttggccaatccttttccttgcggagcgctgtaaatagccttggatctgaagcgtagtaatgtattgtcatggtactcgaagtcatgctccagtttgtgttgggtatgacctgcaactgtcggttcgatgggtgcggat

SEQ ID NO: 65 - DNA, 3042 bp, Zea Mays
gtcctgtcaacgatccagatcgtcctgtcgccctcgtccttccaatccgggtatagggtttttagcgccgcctcccacctccaggtccccctctcttccgcggttccgccatcgcgtcgcgaacggcggccagaaaaaagaaaaagaaaaaaaaaacagctcgccgcaccaatctcccctaccatatcgatcgaccctgcaaggtttaatccaacagaattccaccggaaatttggtgaagtgctaatcgcttgcggcttgcctgcccggtctcgtggctttgtgctgctcccgctgtggtgaggaaccctaggatggcgggggtttcgatggcggcggcgcctgagggggtgctgcaccgccggattgagtttcatcttgcacggagaccgcatggctctgtggcggtgggcggcggcgggttccggatggagacgctgaacccggacgccgctggtaaggtggggcccggggaggcggtcgggagcagcgagggggatgcgaggaggccggagaagggagacagtggcgggatcgatccggagctcagcgtcgcaaggatctacctcgggagaattggtgctggattggaaaatcttgggaatacctgctatctcaactcagttctgcaatgcttgacgtacacggagccgttcgctgcctatttgcagagcgggaagcacacgtcctcatgtcgcacatccggattttgtgcattatgtgctcttcagatacatgtcaagactgctctagaatcaactggaaaaatagtgacaccatttcgtattgtcaagaacttgcgctgcatttctcgcactttccgaaattcaagacaagaagatgcacacgagttaatggttaatttgcttgaatccatgcataaatgctgtttaccttctggggtatcgactgagtctcaaagtgcttatgacaaaagcttagttcacaaaatatttggtggccgccttagaagtcaggtcaaatgcacacgttgcttacattgctccaataaatttgatcctttcttggatctcagtcttgagattgccaaggccacgactttggtgcgggcacttgaaaattttaccgaggatgagctactagacgagggtcaaaaggaatacgagtgtgaacgctgcaggcagaaagttgtagcaaagaaacgacttacaattgataaagcccccaatgtcttgacaattcatctgaagcgcttcagccctttcaatcctcgtgagaagattgacaaaaaagtggacttccaatcaattcttgatttgaaaccatttgttagtgactctaaaggaacagattttaaatacagcctttatggtgtcctagtccatacaggttggagcactcaatcaggccattactattgctacgttcgtacatccagcgggatgtggcacaatcttgatgataaagaggtgcgccaagttcgtgaagcagacgtattgaagcagaaggcttatatgttattttatgtacgtaacagtattgggaagtcggtggtgtgcaaagataataatgctgctaatttgctcaagaagaaaacctctgaaaaaatctcaagtttgaatggtattgcacaaaccaatgtaagagcacaaaatttgaatggtgtgtctccatttggtgataagacgcacggcacaatcattggctactctacaatttccagcaagactaaaacaatccactgttcaaagaatgaggtcaaagctgaagatgctccagcctctcaaaacaatgctctaccttccacacaagcccccatagctcgaaatgatgttggtatcttgccaactaaaccaatgcagtttgctgtaaaaaatgaggagaaaacctcatcccaccaacctgcgccatttacaaatacttgtggtgaacaaacagttgttgggaggcccttgcaggaaatggaacctaaggctggtgcaggggaaaatacttctgttgtctctgctgttgctaatgatgccgctacattgtccaaggcagacaaactaacttctcagcctcaaacagctccatcttccaagccaactgccaatgtaaaggacacagctactgagtttgctacactgtctttatcaaagaaggattctgttgtttcaaatggtgctgtgcttagcattggatgtctcacatccggtgagaaagcaatgaacttatcagaatctgtggatcaagctaatgaaatcacaaaggcacttcctacgagtcagaacaatactgcaccagtaattgctcaagcagattgtggagtagagatcagctctggtgtcatcatgcacgttgctgtgtctgcttcatgcaatggaactacagagaaaaaggtgaattcgaagtcaaagaagtttgtgaggtatcctgttgtgaacatgtggttagggtccagacatctaaagccagggaagaaagcgaaccgcaagagaagtaaaatgataagacgtgttgtagcctgcaaggacgcggcaaatttatcttgtttgagtgagcagctgacgtcaacatcgtccactgcatgctctgaaaccgtagaatgtacctccagccatcagaaacggtcacatgctagtgcaaggtccaaagatgacgcccagtcctcgcaaaacaagcagaaggtcgacggagctcgtgtcggtgctggcacaagtgcaccttcttgcagtgccggcgttccaaagtctgatccgaacccttccacagatgctaaggttgtagcgacccagcctgccagtattcgcgcaacggacctgatggaagctaccgttccgcgctgggatgacgtagacatgccaaacataaaggtcgctgagccgcagtccaaacgcaagagcggtggctacatcttagatgagtgggacgaggagtacgaccgagggaagacgaagaaggtgcggaggtcaaagcaagactttggcgggccaaacccgttccaggaggaggcggactacgtatcgcagcggaggacgaagcagaaatcctaccgaggtgatcccacccgttaatggcgagcggggcagtacgaggcag

SEQ ID NO: 66 - DNA, 2141 bp, Zea Mays
tggcggtcagtccctgcggccgcagcagcaactgaatcatccgaggaaggagggtggagggaggagggattttgccgatcacgggtgacctccttgatgccagtgtgaatcgcagcccaagtgcatatctaaataaccccgctgaagagagaggcaagtataagtacaatgttgataaagaaatgaccctcatcaagtttgtagatgatgagtctggtccgattgggagtttcaattggtttgcaactcatggaacatctatgagtcgtacaaattctttgataagtggtgataacaaaggagcagccgcacgtttcatggaagattgggcagaacaaaatggcattccaaaacaggcagctcatgtaaatcacgatggtttggaatcttcacacatgacctctcgacttccgagaagagtctccccaataattcctgaaccaaatgagataactgatgacttagtacaattggcgtcatcctacgaagcctcaggtggacggcgattatcaagttcaagtatcaccaagcgtatcagaagtacccaacaaaacagacctaaatttgtttctgcattctgccagtcaaattgtggtgatgttagtccaaatgtcctgggaactttctgtatagacactggccttccttgtgacttcaatcacagcacatgcaatgggaagaatgaattatgctatggacgagggccaggatatcctgatgaatttgaaagtacccatatcattggcaataggcaatttcaaaaggctgtagatctttttagttcagcttctgaagaaatacaaggcaaaattgactacaggcatacttacctagatttctcaaaacttgaagtgaatgtccgtacaagtacaggaagtcagcaagttgtgaaaacatgcccagcagccatggggtttgcctttgctgctggaaccacagatggtcctggagcttttgactttaaacaaggagatgtcaagggaaaccctttctggagattagtaagaaacttacttaagacaccagggaaggagcaagtcgaatgtcaagcaccaaaacctatcttgctagacactggtgaaatgaaggaaccatatgattgggcgcctgcaattcttccaattcagatcataagaatcggccagctggctatcttgtgtgtccctggagaattcacaacaatggctggcaggaggctacgtgatgccgtcaaagctgtacttacaagtgacaacagtggtgaatttaataacattcatgttgttcttgcggggctaacaaatacatattcgcagtatattacaacttttgaagaatatgagatccaaagatacgagggagcatcgacgttgtatggcccccacacgttgagcgcctacattcaggagttccagaaacttgctacagccatggtggcaaacaaagaggtcccgacaaattttcagcccccagacatgttggacaagcaaataggactcctcccaggcgttgtgttcgactccacacctcctggggtggagttcggagatgtcagctcagacgtccccgcaagctcaactttcaggaagggcagtgtcgtgaacgctacattctactcggcgtgcccgaggaatgaccttctcacggacggcacgttcgcgctcgttgagaagctggacggcagcaacagctgggttcctgcctacgacgacgacgactggtcactacgcttcaagtggtcgagaccgtcgaagctgagcccgagaagctttgcgacgctggaatggaccgttcctggagacgccccgtcgggcgtttataggttgaggcattttggtgcctccaaaccactgattgggtccatcaaacattttacagggacctctcgggcgttcgcagtgcgttaggttgcacaccgttgcgttgcgttcgacggcacacctgtcagagaatcgacaccgggtcatatatttactttgcatacctgccacagtatatggacatgttttccctatagtttttacatgctcctgatattaataacgctgtccatcgcccgttctgtttggtcatgacaaatacccaaatcgccatatagctacagactcgatgtgtgtgaaatttctatatattaaagcaggaaagaaatctgttctcagatt

SEQ ID NO: 67 - DNA, 3145 bp, Zea Mays
atggccctctccgctgcgcttcgcctcccgctcccgctccctcgccttctcggtccctccgccgtcatcttcggcgccgcctcccgccgccgcgctgccgccgccgccgccaacgcggccgccctccgcctcctctcggcctcgtctcccagtcccgcgtccttctcttcgcggcccacgcgtcccctccgctcgcgccgccgcaaccgcggcgacgatgggagggcggcggcggccggcggggccggcggtggggagggcggcggagctggactggtggtcaaggagcggattctgcccgtcgagctgcacaaggaggccacggaggcctacatgtcgtacgccatgtccgtgctgctcggccgtgcgctccccgacgtccgtgacggtctcaagcccgtccaccgcaggatactctatgccatgcatgagatgggccttgcgtctcgtaggccattcagaaaatgtgccagagttgttggtgaggtactaggtaagtttcatccacatggagatactgctgtatatgaaagcttggttagaatggctcaggatttttccatgaggtacccgcttgttcaaggacatggaaactttggctctgtagatgcagaccctcctgctgctatgcgatacacggagtgccgcttggattcgttagcagaagccatgttcttgactgatctggagctgaacacagttgactttgtgccaaactttgataactcacagaaggagccatctctactgccatcccgtgtcccatctttgttgttgaatggttcttctgggattgcggttggaatggcaacaaatattcctcctcataatctgggagagcttgttgatgtgctttctgtaattattgaaaaccgtgaagctacactccaagaactactggaacgcatgcctggtcctgacttccctacaggagggacaatcctgggaaatcaaggtattttggaagcatataaatctggacgtggccgcattgttgtgaggggaaagactgacatcgaaacaattgacgagaaaagcaagcgcacagctattattattaaagagattccataccaaactaacaaagctactcttgtacaaaagatagctgagcttgttgaagataaggtattggaaggtataagtgatattagggatgaaagtgaccgcactggaatgcgtgtagtaattgagctgaaaagaagtgcagatcctgctgttgtcctgaacaacttgtatcgtcatacagctctgcagtctagctttagctgcaacatggtggctatacttgatgggcagccaaaattgatgggactgaaagaaattcttcaggcatttcttgacttccgatgctctgttatcgaaaggcgtgcaagatataagctttcacaagctctagaaaggaaacatattgtggagggaattgttattggcctcgacaatttggatgctgtgattcaaataatacgagaaacatcaaatcacactgcggcaacaagagctcttgtcaatgaatttgatctatctgagaaacaagctgaagcgctgttggatatcacactaaagaagcttacttcccttgagcggaagaaatttgtggatgaagctaaaaccatgtcagaggaaatttctaagttaaatgagcttctgtcaagcaagaaacttatcttccagcttatacaacaagaagccgccgatttgaaaagcaagttttctacaccgaggcgttctgtgatagatgattcaataagcagtgaagttgatgacatcgatattatccctaacgaggaaatgcttttgattcttagtgagaaaggctatgctaagcgaatgaaccccgacacattcagtttacaacatcggggaaccataggaaagtctgttggaaagatgcgaatgaatgacagcacgtcagatttcattgtttgccagacgcatgaccatgttctttatttcagtgacaagggaattgtatactcagcacgtgcttataagataccagaatgtactagaactgctactgggactccgttggtacagttgctacctttatctgatggagagcggataacctccatcattcctgtgagtgaatttggtgagaaccaatatctagtgatgctcaccgttaatggctatatcaagaaagtaccccttaatgccttttcatcaatcagatctactggtatcatatcaattcaactggttcctggtgatgagcttaagtgggtccgtcattgtggcaatgatgacctggttgcattggcttcacagaaaggaagggtaatagtcaactcatgtgataagcttcgtgcccttggaaggaataccaggggtgtctgtgccatgaagttaaaagagggcgatatgatggcagccatggacataattccagcaacggtgcacaaaatgcccgaaagatgcaacagcaggctcagagattcgagtcctccatggttgcttttcatagctgaaagcggtattgggaaacgggtgcccttaaatgctttccggcaatcaaatttcaatgctgtaggcttgcaaggctacaagcttccagcagattgtcgtttggccgctgtatttgttgctggtctttcgctcactgaagacggtgaaagtgacgagcaggttgttttggttagccagagtggcactgtaaacagaatcaaagttaaagatatatccatccagtctcgacgctcgaggggagtgattctgatgaggctggagcatgccggaaagatccagtcagcatcactgatatccgcagcggcagcagaagtaactgaagattagtcttgcacccaagatgcaagtagtttagtctgaatttaatccctggcgtacgctgcagcatgaaatttgtctgctttcctgtggctagtaagcgtcaggagtagtcaggttgttgtacccgctgaactcagcgtaattaggaggcttgacatgtattttttggtgtctagagtggtgaatgtaaaatgccactatggctttcaaattgttgggtgataattttggatggcttgtctgcttttagttttgagcatattcactgtaactaaacactcactctaatcagaaaccactggtctcctgattgccggttaggcttgtttgggatttgcgctgttccatgttt

SEQ ID NO: 68 - DNA, 419 bp, Zea Mays
agccaaccgggtattgtgcatgggagccaggtgtattgaccctgcagtgctggccccctgctagtttttcatcacagcgagcccctcccaagttggcactgtccaaagcttgcacgccgtgacctaccagtagtgaccatgccggtcagtttggccatctcgccgtggccaggacaactcagcaaagtacacgatcatgctatgtttgttctgtgatcaccttgtcatggccagaacggagtcacgtcatcgtggaactagcgctgcgggcagcctcaccgtggaccgatcgactggagtcatccctggtcaatctcgcgcacgcaccgagactttggaagaacacctagaagaagtggtgtttgaaggagtcaactccagtggttgctgatcaagtggaggagccatctaactgtgta

SEQ ID NO: 69 - DNA, 609 bp, Zea Mays
cgcgacatgtgcggtggcgcagacccgttactctacccgagttacaatagggaagcgtacttggagctgaaggagttcatcagccgcacctccctgaacgacgccgagattttctgcgaaaagctcatgcgcgagtctccaaggctcaagggactagccttgaggattctggaggtccgatctgcatatgtgaagaacgagttcgagtgggacaatttgaaggaattatccttcaagatggttgatgaggccaacacaaagctcatgagggattacgtcgtcgaggtcagccacattgaagacgaaaactaaaacatcaagtggtttctctttgaactactatattttataggcgaacgataacatcaaatgctttctcttgaaccttgcctacagcattttataagaggcttgcatgtatatatagaagatgtataggttatgaagcgcactagcttgatcctgaaactttgtatgtagcataggtactaaacatagtaagcgcattagcagtgatacaccgtagatgtttagcattacttgaataaaactcggcacgcatacaccgtgttactttcttgatcatcaataggagtgagaacaaaaacg

SEQ ID NO: 70 - DNA, 2762 bp, Zea Mays
ggcgtctccactcgcgctcgcgcaccgcttggcctctcctccgccgcctcccacttccgtgctccccgctccggcgaattggtgcccacctgcgagctcgccccgttatagtgcactgcattaaaggcactgcgatccttccttttgtatctgggttattcttgaagaattaattttcactctggaggaaaaatgagtggtcctccaaagaggttgcatgaggagagtagccactctacacctgcaaagcggcctttggacgacaacagcttgtactcaagcccttctgggaaagctattcagtcaagcagcagtgatttccatggtttttttgaacatgatggtagatttgccaaaattcaacgtgttgaggctcgtgatgataagaggccaccccttgtccatcggatgcatggtagctccaactttgttgatcacaccgtcttgtctgacagcagattagaaccaaagcacaataaagatacaagggacaataaggcggatgatcgtgacacaaaagctgatgctcgggatgtctatagtgatcccagtattgagtttcagtttaataaaattgacagtgatgtaaaaatagacaatagagctgatggaaatgaaataagggctgacaggaggggtcaccacgattacaaaggtgatactaaatttgacaaggataatcatcctattgttgcatcgagcttaggctggaaagacaacaaagaacataggggcaaaaggtactttgagcagccatctgataatgcggattggcgtttcccccgtcccggtttgcaaggtactgatgaaactctcaaaggtctaacttccatggaagaccgtaattcaagagatgcacatgattctgcttttgacaacaaagctgaatcaaaaggtgaagataagtttagagacaaggataggaaaaagaaggatgagaaacatagagactttggttcaagagaaggtgagagaaatgatcgtcggaccggtatccagcttggaggtagtggagttgagcgaagagaaatgcaaagggaagagagggatgctgaaaaatgggacagggaaagaaaagattccttgagagacaaggaaggcaatgatagggaaaaggattctgctaagaaagatccatctatggtaatggaaaaggataacacaatagttgaaaaacttttatctgatggacctgttaaaaatgctgaacatgagaatacaacaacagaaactaaggtgcttaaggacgatgcatggaaaggtcatgacagggatcctaaagacaagaaaagagagaaggatttggatgcaggagacaggcatgagcaaagaagcaaatataatgacaaggaatcagatgataatggcaccgaaggtgatacagaaaaagataaagatgtttttggaagtgttcaacgcaggaggatggtgcgaccaaggggaggtggtagccaagcatctcaacgtgatccccgatttcgatcccgaacgcgtgatggcgaaggggctcaaggtaaatctgaggtttctgccattctttataaagccggagagtgcatgcaggagcttctgaaatcatggaaagattttgaagcaactcaggaggctacaaatgttgaaagtctacaaaacggtcctactcttgaaattcggatacctgccgaatttgttacttccactaatcgtcaagtaaagggtgctcaactttggggaacagatatatatacaaatgattcagatcttgtggctgtgctaatgcatactggctattgctcgcctacgtcctcccctcccccatctgccatccaagagcttcatgcaactgttcaagttctaccaccacaagagagttatacttcaacattgaggaacaacgtacgctcacgtgcttggggtgctgggattggttgtagcttccgcatagaacgctgctgcatagttaagaaaggcggtggcaccattgatcttgaaccacgccttagtcacacatcagctgtggagcctacacttgctccagttgcggttgagcgcacaatgacgacaagagctgcagcttccaatgcattgcgacaacaaagatttgtccgtgaagtgacaatacagtacaacctctgcaacgagccatggttaaaatatagtataagcattgtggcagacaagggattgaaaaagtcactttatacttctgctagactgaagaaaggagaagtaatatatttggagacacattttaataggtacgagctgtgcttcagtggagagaagcctcggggtattggatcgagctctaatgcatctgatgcagaacctgagaaacaccagagcagtagtcaccattcgcaaaacggctctgtggagcatgaactccgggatgtgttccgatggtcccggtgtaagaaggccatgcctgaaagtgccatgcgctccactggtatcccactaccagcagatcagctcgaggtgttgcaggataacctagaatgggaggacgtgcagtggtcgcagaccggtgtttgggtggctgggaaggagtatcccctcgcccgagttcacttcctctccgggaactagcagcagctgatgttgcagccaacgaaggagctatcgtttcctgtggacaggagaggagcttgccaacattgtaggtttttttttttgctactgtataatgtatgatgcaccctgtcatgtgtacaaagaaagctcaactgttgtaggctgccactctaacaactgtattaactcctccatgtacgactgca

SEQ ID NO: 71 - DNA, 818 bp, Zea Mays
aaccaacccctatccgccccccgtcttttcccttttctctaccctctatctacccaccgttcccgtctctccgccgcttccttggaagacgaagaaaccctcctccaccaccaacccgatccagctacatccgttgaggcccggccaggagcagctagccgtcttcgttcgatccgttcgcaccccccaacgcggttcgatttgcaggaaggagcgtgatggccaagacgagctcgttcaagctggagcaccccctcgagaagaggcaatctgaggctaaccgtatcagagagaagtaccctgacagaattccagtgattgttgagaaggctgagaggagtgatattcctgacatcgacaagaaaaagtacctcgtccctgcagatcttacagtcgggcaattcgtgtatgttgttaggaagagaatcaagctcagtgctgagaaggctatcttcatatttgtgaaaaacacccttccaccaacagctgctctgatgtcttcaatctatgaagagaacaaggacgaggatgggttcctctacatgacttacagtggtgagaacaccttcggactgctctagatggcccgcaatggggtcgccttgcccttgcccatgcctcctgtaaataagacctgccaagcaactgtgtatattctggtttcgtcgtcgcaagtggttgcgctctactgctaaagcctacctatcagttgtggagttgtcgtcgatgttatggacacacttaatcaagtttattaattgactggacctgaatcttgggtcagtaatgtgacatctcctatgtcgtttacggttact

SEQ ID NO: 72 - DNA, 959 bp, Zea Mays
agacccgttactctacccggtaaatatctcctgcggcatttttgactccatatccgcgcggcgcctatctggcatcggtgaagagcgggcgctagagcagagtgagcgtgcggttcttggtcatggagcgcggtgccgtcgtccttccgctccagggcgccggggttgggcgcgtcctcctccccgtgcaagtgcgggtacggtcgttcttgaggagcaggagggcgacggagcggcggcgccggctcgcgagttccgcggcgccggcgaggtgcagcaagatgtacgttcccggctttggggagggttcaccggagcggaaggcggcgatcaacctccagcacttctttaactacatcgctgtcagcattgtcctagcacagcttgagagttacaatagggaagcgtacttggagctgaaggagttcatcagccgcacctccctgaacgacgccgagattttctgcgaaaagctcatgcgcgagtctccaaggctcaagggactagccttgaggattctggaggtccgatctgcatatgtgaagaacgagttcgagtgggacaatttgaaggaattatccttcaagatggttgatgaggccaacacaaagctcatgagggattacgtcgtcgaggtcagccacattgaagacgaaaactaaaacatcaagtggtttctctttgaactactatattttataggcgaacgataacatcaaatgctttctcttgaaccttgcctacagcattttataagaggcttgcatgtatatatagaagatgtataggttatgaagcgcactagcttgatcctgaaactttgtatgtagcataggtactaaacatagtaagcgcattagcagtgatacaccgtagatgtttagcattacttgaataaaactcggcacgcatacaccgtgttactttcttgatcatcaataggagtgagaacaaaaacg

SEQ ID NO: 73 - DNA, 1361 bp, Zea Mays
cttcccttccctggcgcgcgagtgacgagcgtgcgcagaagctagccaagcgatgccgctcctcttccccgccacgccgccgctaccgctgtgccgcgccgcgcgcgtctcacgccgcgccacggcctccgtggcgtccgcggccaggagctcgtcgtcgtcctcggcctcgttcgacgcggccgccttcgaggccgagcggctgcgcctggacgccgcggcgcgggccgggatggagtccaccgccgcggcagcggaggccggcccgcgggcctggaagtgggcgatacggaagcgggtgtgggacgcgctcgaggctgagggcatcgcgcgggacccgcgccccgtccaccaccgcatccccaacttcgacggcgcccccgccgccgcagacgcgttggggaggcttgacatatttcagaagtcccattgtgtaaaggtcaatcctgacacacctcagaagcaagttcggttcttaacattgtcaggtgataaaaagctgttgactccgcaacctcggctaaggacaggatttttctcagttatggactctcagatgatacctgttgggtgcattcctgaagcatgcacttctgttggtgcagctaaatatgggaggccaattggtttagatgaaagccttaaggtggatttgattgtgattgggtcagtggcagttgatccaagttcaggagcacggttagggaagggagagggatttgcagagctggaatatggaatgcttcgctatatgggagctatagatgattcaaccatgatagtaactactgtgcatgacaagcagttagttgatgacattccagtggagaagctgctagttcatgatgtgccagttgacattatctgcacccctactcaggtcatcttcacgaagactacgatcccaaagccacaagggatttactgggaaaagttatctccagaaaaattgggccaaatccgaattctaagagagctgaagcaacgtatagagcaagagacaggaactatgcttccttgtggaccttcggagaagctaccgccaacagctcagagaaagcagaggtggcagcggcgacgatgagacttttgtatgcttctcttaactgtttcttttactcaataaagagctatgtgcacccttttctttcttagggcaaatcaaggtcacaattcaaaactgctagcattagactataggaacattaccagatgtaatagaaatgccaaaaaaaactttgtttgcacttaagaggcaatgaggatagatagtatagctctttccacacatatttaatttctttgcaagtatgaagttccatttggaaagtggtacttaaaatttgtatcttggatgtagc

SEQ ID NO: 74 - DNA, 1054 bp, Zea Mays
cagcattgagatcttttttcacgttgcatttcttctctgcttgaaggtggaatcagaaattttctgcctccatggtggtttatctccatccattgagaatcttgataacgttcgcagtttagaccgtgtccaagaggtccctcatgagggacctatgtgcgaccttctgtggtctgatccagacgatagatgtggctggggcatatctccacgtggtgctggatacacttttggccaagacatatcggagcagtttaatcacaccaacaatcttaaactcgtagctcgggctcaccagttggttatggagggatacaactgggcacatgaacaaaaggtggtgaccatattcagcgcacctaactactgttaccggtgcggcaacatggcgtccatcctcgaggtcgatgactgcaggaatcacacatttattcagtttgagccagctcctaggagaggtgaaccagacgtgacgcggaggacacctgattatttcctttgagttatctgccaggccatttttggattttgcccaatgttggaatagtgatgctggccagtaacaatttttgttggatctatatggtaacttaaccgaccagcaacagtaagaaaatgtggaacttaaccgaccagcaacagtaagaaaatgtggaagctgcatttgtcattgcaagaggtgctcgctaacttaaccccaagctgtcaaaagatccgcttgtctacccaacccacccagtggtgcctcccttgggctttgggacgtcgagtttacgctttcagcgtagagttgcctcagttctgtcttgtgtgtcagctagttttgtgtttgtgtcttgtgtggttgctcgttgtagcttctgtggtctcgagtgttgcaagaattggaattctgctagctcctcctctgtttggttgtccatgcccttggtacacgagtgttggccacccttctcatgtagcaccaaccacgttacagtcaagctgttcgcatcttatttttgtcatgttaatactcctgtcaattaaatgaacaatgtttgctccccatgta

SEQ ID NO: 75 - DNA, 2239 bp, Zea Mays
aaagatgagaaaccggccataggcccaaccgtttagttatcaacattatcttccctgtttcattatttcgccgccgttcgcagtcgaaccgccgcgcggccgtcgagttgaagaggcgaggcaaaggcaaggagagcggcaaggagaggaaaggacgccatggcgaccgcttcagtgactttcaagtcacgggaggatcaccggaagcagctcgagcttgaggaggcgcgcaaggcggggcttgcgcctgcggaggtcgatgaggatgggaacgagatcaatccccatatcccccagtacatgtcctcggccccatggtatcttaatgctgagaagccgagtttgaagcatcaacggaagtggaagtcagatccgaactacaccaagtcgtggtatgataggggtgcgaagcttttccaggccaacaagtacaggaaaggtgcctgcgagaactgtggagccatgactcatgacaagaagtcttgcatggagcggcctcgaaatgtgggagctaagtggacaaatgttaacatagcacctgatgagaaagttgaatcatttgaactggactatgatgggaagcgtgatcgctggaatggttatgacgcttcaacctacactcgtgttatcgctgactatgaagctagagaagaggccaggaaaaagtatctgaaagagcagcagctgaagaaacttgaggagaaggataccgagaaggatgatgagaatgcgggtagtgaagacgaagaagatgacctgaggatagatgaggccaaagttgatgagagtgcccagatggactttgctaaggtagagaagcgtgtgcgcacaacaggtggtggaagcactggtactgttaggaatttgcgtatcagagaagacacggcaaaatatcttttaaaccttgatgtcaactctgcatactatgatccaaaaacccgctccatgagggaagaccccttgccagatgcagatccaaatgataagttctatgtgggtgacaaccaaaatcgtcttagtggtcaagcgctggagttcaagcaactcaacatccatgcatgggaagcttttgaaaaagggcaggatatccatatgcaagcagccccatctcaagcagaactgctgtacaagagtttcaagatcaagaaagaaatgttgaagtctgaacataaggataaaattattgagaagtatgggaatgctgcgtcagaagatacaattcctcgggagctgcttcttgggcaaagtgagagagagattgagtatgaccgtaccggtcgaataattaaaggacaggatgtagctcttcccaagagcaaatacgaagaggatgtattcattaataaccacacgagtgtgtggggttcatggtggaaagatcatcaatggggctacaagtgctgcaagcagactatcaagaatagttactgcacaggcttggctggaatagaagctgccgaggcctcagcagatctaatgaaggccaatatggcccgcaaggaggctgcagaagatgaacctgtacagcatgaagagaagcgactagccacttggggaaccgacgtgcctcaggatcttgttcttaatgagaagaagctggaggaatctctaaagaaggagactgcaaggagaaaagaggagaaggatgaaagaaagaggaagtataacgtgaagtggaacgacgaggtgactgcagaagacatggaggcttaccgaatgaagaggattcaccatgacgatcctatgaaagattttctcaactgaaaagtgtggtagataactagatgttcatggcactgtatcacattggttgcaccgtgccttgcatcagtgttgtgttactgtagggtggctacgcctgtcctaaggatatggccagcagaccgtgcatgtggcagtgtgtgttgcacttaaattatgatatgggaggggtaaggctggagatagcttaaccagagtggtggtggtgctgtgatctagtggcagaatgtaagaaactggctacaccttttacaagctgcgtgttggagatgtatggggctgtttgcgttggattgaccgctgcagttgtaatctatagagacaaaaatattgtagaagcagttgtaatctatatgtaatctatagagacaaaaatattgtagaagcagttgtaatctatagaggcaaaaatattgtagaagctgtagaagtcgatacgaattaaagccagcctgtttctgatattataatccttgct

SEQ ID NO: 76 - DNA, 3099 bp, Zea Mays
cagaatgcagctcagcccagtaaggcagtaaccctagagtccagttgcctagttgccttctctggtagtccagtctaacgctgtccaaccatttgtggcggctgccgcaacaggctcaacgctcacgcgcacacacaatccatagccgcctcccacatctcactctcgttccgagcttccggccatggcggtgacctccggcgcccccaacgacaacggccgtattggtactgagtactgacccatcgagccgtcccgaagggacgctggcgccgctgcgactgacgatgagcaccgcgtggatctggaagttaggcacaaggacgccggcactagggactcgccagcaccgatagcggcagctgcgcctgcgtcccaatcccgagtggctggaaagcttggcccctcagatccaaagcacctcatctatgcgggatccaaattaaagcatattaaagctgcacctgctgcaccagacaagaatcgccgaccacctttgtctccaccagcacctgccgtcaatcgtggtcgtggatctgtgcgcacacctttgggattaaaaaaatgtctaccgaaagtggcagtcaatccccattatctcaagcatcacaagcaccgatgtctccatctcatgaacctgaatcgtctcgtcctgagtcagataatgactcgatgccaatttaaatagatgacaatgacaacattgaagtagaagaggaagaatacgacgctgaagctggttctaagagaaagctcacctcaactgtttggaaagagttcaagagagtgaagttcaatggcacagtccgggcaaagtgcaactattgcttcaagcaactttctgcgtcaagtaataatgggacaaaacatcttcatgttcatttaaaaagttgtgtgcaaaggaagattaagttgaacgggaagacattggcacaagcttctttgagatttggtagaacggatggtggaacagtttcaatagagaattacacatttgatcaagaaatagctagaaatgaacttgctgcgatgatagttctgcatgaataccccttaagcatggttgatcatgtgggtttccgaagatttgttggtgctcttcaaccacttttcaagatcggaaccagaaacatgataagatctgatattatgaagcattatgaggtggagaagaaaaaagccattgaatacatggctggaatccagtccagggtagcggtcaccacagatttgtggacgtctgacaaccaaaaaagaggttacatggccataacagctcactttattgatgaatcctggactcttagaaatattataatgaggtttatctatgttcctgctcctcatactgctgacgtcattggtgaagaattgtatgagtcattggttgaatggaatcttgatgagaaaatatcttctgtgactcttgacaactgcacaactaatgatgcggtaatctcttctcttgtgaggaatattggaaagcacaaacttatgaatgatggaaaattgctacatatgcgatgttctgcccatatccttaatttgatagtaaaggatggtttagaagtacttaaagatgcaattgagaacatccgtgatagtgttgcttattggacagccactccaaaaaggtttgaaaagtttgaggaaatagctaaatttgttaaagttgatatcaagacaaagataggatttgactgtaggactagatggaattcaactttcaccatgcttgccactgcagtgccttacaaggctattttcataagagcaagtcgtgtagataggcagtacacgtgtttgcccactgaggatgagtggaaatttgctaaggatgttgtggagaggcttagattgtttaatgacattactacactattttttggaactgattatgtcactgctaacgtctacttcactagaattgctaagattagaaatcagattaggttgtggtcatcatgtggcaatccgttggtagaagaaatgttagtgaatatggtagccaaatttgacaagtactggactgacattcaagggctcatgggcattgcaactattcttgaccctcgattcaaaactgcagtcctattgatatgttatgaggacttacttgttgtgtccggtagtgaatgtgaagatagagttgctaatgtgaagaacttgctagctgatttgatgaatgagtaccatataactgagaatattgagaacaatgagtcatcaacaccatcagttggaaacagtgatgacttcttatctgacattagtgcccgtattgcaagtagaaggccaacaagcatggggctcaaatctgagctagaccggtacttggatgaagaaatggtgaacatgcaaaccaaaaacttcaatgttttagattggtagaaggtagctggaactcggtttcctattttaagaaggattgcaagagacatatatgttatccctgttacaactgttgcttcagaagctgctttcagcactagtggtagagtacttagtgagcatcgcagtaggcttacttcaaagatgttggaggctctcatgtgctctcaagattggcttaggaacaaatacaaagttgatgagaaaactaaacaacctgccaccttttggtcctgtctccaagacatgcaagagggcctccaggaacttgcactttgacattttcatttcaaggatttaggtggcgttaatcttttggctgttgacatgtagtgaacaagtcaagtacaagtagcaattgacaagatcacaagaaccttttggctctcatgaacacttgatatggatcttttggttctcatgtttttactcaatggtgaacttgtaatgaacttgtaacagatgtgcttttgggagcggtttgcacatctgttgatgcgcacctatgttgtaagcacattgtatgtgttaatttggaaatttggatgtttaatgtggtgaactagtggcgccatgctaggggtggtggacactaactggatattaatctagctgtgaacatctgatgtctgatgtgatcaatggtgttatgatttgtgaaacacttaacattgaccactctatcagtcttattgttgatgtttctta

SEQ ID NO: 77 - DNA, 325 bp, Zea Mays
aaaaaatccacgaaccaatttctcagcaaccagcagcacgacctgtgagggttcgaaggaagtagcagtgttttttgttcctagagggaggaagagatggcaaagggggaggggccggcgatcgggatcgacctgggaacgacgtactcgtgtgtcggcgtgtggcagcacgaccgcgtcgagatcatcgccaacgaccaggggaaccgcaccacgccgtcctacgtcgccttcaccgacaccgagcggctcatcggcgatgccgccaagaaccaggtcgccatgaaccccaccaacaccgtatttgatgtcgctcttcctggat

SEQ ID NO: 78 - DNA, 3924 bp, Zea Mays
agtaacatcagactttcccaagtggaatattgcttagggcaagctccctccatcggtccgtctctctcagcttcttcgtcttctctcttaggttgacctctttgcctcaactgcgccgcccgctcaccaagccaggcagaggctgcaggggtcgtagagttggagggcccagtccatctgggaggtcccagtgccgcccgctcaccagttaccagccaggccgtcgggaggggagagagagagagagagacgaaaagatcgagacccatacgctcagatcgaagttcgacttctcctctccccctcccccaacctaacagattcgtgtagcacagatccatccgactttgggttgatttcttcctttgctgctgatcagaaagttacagatggatcatgctgaggtctctggtttgttgtgtattggtacacgtgaaacagatgggggtgaagaatcatatgcggctgagtaccctaaaatggatcaggataccaatgcaacgaccaaatttgatgtagtaatggagacttcagcaatgtatactgatcaaatcaacaccaatgcttgcttagatgaatatcacatgtctggaaaacagcctatggaagaaatgggatttggcagtgcacatccctttgaacttccatcagaaggaatggtagctgattctggggaagaaagcatgccatctagccctgacacatctaccagtaattatgatgcgcctggttacacggagcaaaatctgcagcatatctataattcgtatgatgcactggttgacaaagacggagttgtgcttactcctgccttcatgatatgtgacaaaactttgtatcttgaacctcacctcactttctcattggacgggatcaagattgagtatttggatttagattcctttgaagacgagaagctgtcagctctacaatgggaaatatctaatattatttccatcagttgtaaatggactcgtagtgttggatctgccttaataacactccttgttggatctacagcagaaacaggaaatgcaggtcctgttagagcacgattttctcttgatgattcgcaatggccaaggagacaacagaggatttgggaactgggaccaagatatcaagaaatatggaaagacatcccatcagatgattttgcattggagaattggagcatcgaaccctgtctgtttttccctaggcaatacttttccagcactgaggactttgaagatgttatttatccccaaggagatcctgatgctgtttctattagcaaaagagatgttgagctcctgcttcctgaaacctttgtcaatgatacaataattgacttttatatcaagtacttgagcacaagaattgaatctaccaagaagcgcaggtgccacttctttaatagcttcttttttcgcaagctggcagatcttgacaaagatcaggggagagctccagaaggtagagcagccttcttgcgtgttcgcaaatggacccgcaaaataaatgtatttgacaaagattttctgttcattccagtcaacttcaacttgcattggagtttaattgttatttgctatcctggcgaagtggcgacatttgaagatggtgatgccaagctctcagctaaactcccatgcattttacacatggattcacttaaaggaagtcacactggactcaaggatatcattcaaagttatttatgggaagagtggaaggaaagacaccctgaatcagcatcagataattcagacaagttcttaaacttgagatttgtctcccttgagctccctcagcaggataattcatatgattgtggcttattcttgctccattatgtggaattatttttgacagatgctccaagtaacttcaaccctctgaagattgatgtattttctggctttcttagtgatgattggtttccacccccagaagcttctctgaagcgttcggtggtccgaaagttaattcatgagctggtaactggatcttttcagaatcatcccaagctagcttgtggtggtgagcagcttgacgaaagacatcaaagatgctcaaatcctggtgaacctgaaacagtttgcacagttgatgatggaactccatgaagtacagccatccaagtccatctgtttatatgattccaaagaggggctacctacttctggatgcatgttggacactggaagtgtcccaattgttgatgtacagaatctacaagagtcagaggtttgtgcaccagtgaaggatactgttgtttgcttgtcaatccaggatgagaaaaatgacccacttgcatctaacagtcaacttaatatgagatcatattccccagaaggtgatggcgtgattaaggaatcaaatcgtgtggtgacagataaggaaaatgataagtctttgtttctttctttggataatgaccaaaaagttcacagccaagcagaagctgaggtgcaggatattatggttcgtactagctgctcaatatctgaaattttagctcagaaaattaccagcaaagaacagccctcccaaaaaagcatagaagttggggatgagtgctttagaccttctcaagatatggattatgttatgatgtttgactccagcaaagatgagaatggaccaaatccagaaagattgacagctgaaggtgattgtggcgatcctcatgaacgtctggatttagtcacagtaggtgatatcggaaaaatggttgtagacaatgcaatcatcgaagatgtgaagagtaataacacaactgcaaacaatgtcaatcacggtgagctgcatgtttcattgcagttgccagagggaaacactgacaatggtatgactggtgttagcacagcttcctctttagacataaaagagggaaacaatgacaaagtagtggcagatgcctctgcacatgaaggtgatataaatgacaatggtagctctgaattgaaaataggaaatacgaacagtggtattactggtgttatcgcagcttcctcagacttaaaagaggaaaatattgacaaagtagtggcaggtgactgtgcacatgaaagtgatataaatgctaaggattgcactgagttgaacattggaaatactgataatagtattgctggtgatagtacagtttcccctgaggtgagcgcggaaaacactgatcaaatcatagcaggtgattgtggaaatgaaaccgatttaaaagctgatggtgagggtgctgacaaattcttagcaactgacagtgctcttccttgtgaagatgatgcaacttgcatggatggtgcgaatgtgattgtatcactagatgtaccccgtagcacgaagaatgatacattttccaagaacacatcttctgacgctgaaatgcctctgcctgttggaacctgtgagctcgtcgatagaccttcttccgagaatgacatgtctgagcacacatcttttgatggtaaacggcctgcggatgataggactttggaagagaacgaaatggttatgcctggtgatgaaaaaacagaggtgcattacaagcgacggaaggttttggcctcagagaaacaaagcagcttctccggagcaacttctacagattaggtttggctggtgtgagacttagttttagtttctgggatatgtgacctgtctagtccttgacaatatgctgcctgtgatatagtatatatttctgtaatataaggtactgccactaatgactgtagaaataacaaaaagaactggaatcctgaaccctgatgtctgcttgacagcgtggtttgagaattgagatactgtatatggtctgagtattgcacgacctgcactgcacatgcaagttgcacgatataggctgtttccaaacatgtggaaggccttgtttacctgattagttgggatagaccatgctatgattgttatgatttg

SEQ ID NO: 79 - DNA, 1854 bp, Zea Mays
atggagggagctggaagagatgccaaccctttgggcggttaccgaattggcaaaaccctaggaatcgggtcgttcggtaaagtgaagatcgcggaacatatattgactggccataaggtggcaatcaagatcctcaatcgccgtaagatcagaagcatggaaatggaagagaaagtgaagagagaaatcaagatactgagattatttatgcatcctcatatcatacgcctttatgaggtgatagatacacctgctgatatttatgttgttatggagtatgttaaatctggagagttgtttgattacattgttgagaagggaagactacatgaagaagaagcccggcgcttttttcagcagatcatatctggtgttgaatattgccataggaacatggttgctcaccgtgatttaaagccagagaatcttcttttggattcgaaatgcaacattaagattgctgattttggcttaagtaatgttatgcgtgatggtcactttcttaagacgagttgtggtagcccgaattatgcagcacctgaggtcatatctggtaaactatatgctggtcctgaagttgatgtctggagctgcggcgttattctttatgctcttctttgtggcactcttccatttgacgatgagaatattccaaacctttttaagaaaataaagggtggaatatatacccttcctagtcatttgtcaccttcagcgagggacttgattcctagaatgctggttgttgatccgatgaaaaggattacaatacgtgaaatccgtgaacatatgtggttcaaaattcaacttccgcgctatttggctgtaccgcctccagacactgcccaacaagttaagaagctggacgaggaaacccttaatgatgttattaagatgggttttgacaagaatcagctaattgaatctctgcacaacagattgcagaatgaggcaacagttgcctattatttactcatggacaataggcttcgtacaaccagtggttatcttggatctgagtttcaagaatctatggacccatctttctctcaagtacatgctgaaacaccaacttcagcaactgaacatcggcagcatgtgtttacagaatctccggggtctggtttgaggcagcattttgcatctgaaaggaaatgggcccttggtcttcagtctcgagcacatccacgagaaataataagtgaagtgcttaaagcactgcaagaactgaatgtttactggaaaaagattggacactacaacatgaaatgcagatggagtcctggctgccttgagagtatgatgcataactgtgatggctttagtgcagagtctgctataattgaaactgatgatctcatagcgaaatcaacccgtatagtgaagtttgagattcagctttacaaaacgagggatgagaagtaccttcttgacctgcaaagggtcagtggaccacaactcctctttctggacttgtgttccgcctttctaacgcagctgagagttctttgagcctgatgacatgattggcttcccaagcacaatccttgatgcaccccatggactttcaaattacattcgtgctgtacataatggccatatataatcctccggtagattatattttctggagcatgtggaccgtacaggtatgtcctggttgccgagatgattgtcacctaaggtcctaaacaagaggccacatgcgagccccaggccttcttcctcaattagattatgcgagttttgttcggcctttctttagtccttggacatgtttttttctttgccttgtttggttgtgtttggatcaaaggagattgagagctggtttgatgaccagggaaatggagg

SEQ ID NO: 80 - DNA, 609 bp, Zea Mays
aggtttatgaggttgtcaagttttcatttcaatgcaaatccagctggacaacaccatgtcacaaagcagatacagttcagtcttggcgtcatcgaatcaatgaaacatgaagttagaagcacaccgagatccagtggcttgtgaccccttgaccctttagaggaagcgcactagagtcgttggcaagaagaagaggatcgccaagaagaagtctgaggctgccgagtaccaaaagcttcttgctcagaggctgaaggaatagagagaccgcgagagcttggccaagaggaggtccaagctttctgccgcttccaaggcttccgctaccatcgccgcttaagaatgttcgatgctttgatatgtttcaagacctatcttgttacagcttaaataccttatgctactctgattgtgttgcaacttgcaactgcccctgtacttgatagatttgtattagatgctcaagctacagagggtaggttcctaattatgaccatatgactatgtactaaattatatatctgttgctaagttaaaatacatacaaaataagtttactccgaccatcttgtagaaaaacaagttatagtgactaaggatatctgaatt

SEQ ID NO: 81 - DNA, 465 bp, Zea Mays
gtccctcccgattcgctctacagtttgcgcggccggtttgggttaggtgattgggaacaagtgggacctctacctcgacctcctccaggccgactactcggaaggggatgctctggatgctttggaattgttccgctactgctgcaggcgaatgctcatgacccatgttgacctcattgagaagttgctcaactacaacacactggagaagaccgagacaagttaagtgagcaagcatatcatgctctgaaagcactactgtttcgtagtatcatatatattgtaggcggtatgttgtttcttctctatcaggagaggattgttgtgagtgtgaacttgcttttgctctcgagcattcaaggactgacaagggcatgttgcatctatgttacgatgttggagattttaatcgatataacggctaactaatactctctgtgtctctgtcccaatttataattcgtt

SEQ ID NO: 82 - DNA, 1387 bp, Zea Mays
cgagcatacgctatttgattgtctttgctctctctctctctctgtctgtggtttatgttcaggtggcactgccagcagaagtgatccgttgacttcagctatgggcaacctgtgctgctgtgttcaagtcgaccagtcgactgtggccatcagggagcagtttggcaagtttgacagcgtgcttgagccaggatgccactgcatgccttggttcgccggcaagcgtgtagctgggcaactcacactcaggctgcagcaactggatgtgcgctgtgagacaaaaacaaaggacaatgttttcgtgaatgtggtggcatctattcagtaccgcgctctggctgacaaagcaagtgacgctttctacaaactgagcaacacaaggtcccagatccaagcctacgtctttgacgtgatcagagcaagcgttcccaagctccatttggacgatgctttcgagcagaaggacgagatcgcaagggcggtggaggaagagcttgagaaggccatgtcggcttatggctttgagatcgtgcagactctcatcgtggacatcgagccagacgagcatgtgaagcgcgcaatgaacgagatcaacgcagctgcgaggctcagggcggctgcaaacgagaaggcggaggcggagaagatcgtgcagatcaagcgcgcggagggggaggcagaagccaagtacctgtccgggctgggcattgcgcgccagcggcaggccatcgtggacgggctcagggacagcgtgctggggttctccgtcaacgtgccgggcaccaccgccaaggacgtcatggacatggtgctcatcacccagtacttcgacaccatgaaggagatcggcgcgtcgtccaaggcgtcctcggtgttcatcccgcatggccccggagcggtgcgcgacattgccacgcagatccgcgacggcctcctgcagggatcctctgtcgccaaacactaagctgcctgccgttgccgttgctgctgaagaacaccaccaccactattatatatataatataatgatgatcttggtaccagagtgatgcttgtctatattgttcatcactcatcgtcaccatctgctaggatggctatctttatgcttggggattggagaaaaccttatctaaccttttagggaaccggtaatatatataatgcagcatgagtttgcagtatgttcatcagaaccttttagagtctagatgcatgaatggcatcatagaatagaatacaagagttgcttccattccatcactgagttactttttcctcagcaccggttgctgctgcccgttgcaactgctagagatattaaatctgaactgatctttataaatttataataaatttatcttagcttaaaaaaatataaaactaa

SEQ ID NO: 83 - DNA, 437 bp, Zea Mays
acagatgctatatcccagtccactgtacaaagttttggcgtggaactttaggtgaagcaaatgaagcttttgcaactcgacaaccaaagggagaaataacagtgctcatagaggggaagttaatttcagatgacgaaattccatcagaggatttccttgagcatgaactaagagaattgacggcaaagggatatactctttctgcggcggtgaaattggtcactgaagccacatcagcaaagaagaaagatgtttatgcactcgcattgaggttgtttggaaaataagtaaaatggaatttttggtcgcatctgaaacgaggacacgaggaatctgaagcacaactttggggaagatcacaagtaaaaggacacgtggaccctgaactgtccctggaggaacctcgtgaactgcaccaccttctccgtgtccggcag

SEQ ID NO: 84 - DNA, 2131 bp, Zea Mays
gtgggttcgatcctcccaaaaccgcgcgaattcgatccgtttccatgggcggttatctccatacccgtgactttcaagtcacgggaggatcaccggaagcagctcgagcttgaggaggcgcgcaaggcggggcttgcgcctgcggaggtcgatgaggatgggaacgagatcaatccccatatcccccagtacatgtcctcggccccatggtatcttaatgctgagaagccgagtttgaagcatcaacggaagtggaagtcagatccgaactacaccaagtcgtggtatgataggggtgcgaagcttttccaggccaacaagtacaggaaaggtgcctgcgagaactgtggagccatgactcatgacaagaagtcttgcatggagcggcctcgaaatgtgggagctaagtggacaaatgttaacatagcacctgatgagaaagttgaatcatttgaactggactatgatgggaagcgtgatcgctggaatggttatgacgcttcaacctacactcgtgttatcgctgactatgaagctagagaagaggccaggaaaaagtatctgaaagagcagcagctgaagaaacttgaggagaaggataccgagaaggatgatgagaatgcgggtagtgaagacgaagaagatgacctgaggatagatgaggccaaagttgatgagagtgcccagatggactttgctaaggtagagaagcgtgtgcgcacaacaggtggtggaagcactggtactgttaggaatttgcgtatcagagaagacacggcaaaatatcttttaaaccttgatgtcaactctgcatactatgatccaaaaacccgctccatgagggaagaccccttgccagatgcagatccaaatgataagttctatgtgggtgacaaccaaaatcgtcttagtggtcaagcgctggagttcaagcaactcaacatccatgcatgggaagcttttgaaaaagggcaggatatccatatgcaagcagccccatctcaagcagaactgctgtacaagagtttcaagatcaagaaagaaatgttgaagtctgaacataaggataaaattattgagaagtatgggaatgctgcgtcagaagatacaattcctcgggagctgcttcttgggcaaagtgagagagagattgagtatgaccgtaccggtcgaataattaaaggacaggatgtagctcttcccaagagcaaatacgaagaggatgtattcattaataaccacacgagtgtgtggggttcatggtggaaagatcatcaatggggctacaagtgctgcaagcagactatcaagaatagttactgcacaggcttggctggaatagaagctgccgaggcctcagcagatctaatgaaggccaatatggcccgcaaggaggctgcagaagatgaacctgtacagcatgaagagaagcgactagccacttggggaaccgacgtgcctcaggatcttgttcttaatgagaagaagctggaggaatctctaaagaaggagactgcaaggagaaaagaggagaaggatgaaagaaagaggaagtataacgtgaagtggaacgacgaggtgactgcagaagacatggaggcttaccgaatgaagaggattcaccatgacgatcctatgaaagattttctcaactgaaaagtgtggtagataactagatgttcatggcactgtatcacattggttgcaccgtgccttgcatcagtgttgtgttactgtagggtggctacgcctgtcctaaggatatggccagcagaccgtgcatgtggcagtgtgtgttgcacttaaattatgatatgggaggggtaaggctggagatagcttaaccagagtggtggtggtgctgtgatctagtggcagaatgtaagaaactggctacaccttttacaagctgcgtgttggagatgtatggggctgtttgcgttggattgaccgctgcagttgtaatctatagagacaaaaatattgtagaagcagttgtaatctatatgtaatctatagagacaaaaatattgtagaagcagttgtaatctatagaggcaaaaatattgtagaagctgtagaagtcgatacgaattaaagccagcctgtttctgatattataatccttgct

SEQ ID NO: 85 - DNA, 760 bp, Zea Mays
ggacaagatatactgcagggcgattgtccgaactgtggaaaaagcttccagatactgaagtcagctttgaaggatggcccacaactctgtccctattgcactcaacctttctccgttcaaggcaacaaatttgttagagaatctgctagattttcatctgggagggctgctactgctacaaatggtccagtgttcaatgagttcttcaaccgcaacatgagaggaggaaacgcggcgccttctgagacgatcgtggatgtggaggctgaagtcaaggacgtggagtgatgtttcttctcagcagaagaagagcacgatttgcttctgaatctgtgagaaatggggagaaaactgaaactgtgagagactaggcaaacgtgcatatagatagatgggtatcggggatgggtagttgtgtagtgcccgcgcgcatgagaaactggacaaggcccctgtttgtttcagcttctggcagcttctggccaccaaaagctgctgcggactgtcaaacgctcagcttttcagccagcttctataaaattcgttggggcaaaaaccatccaaaatcaacataaacacataatcggttgagtcgttgtaatagtaggaatctatcactttctagatcctgagccctatgaacaactttatcttcctccatacgtaatcgtaatgatacttagattctccccacagctagattttcagaaaagctggtcagaaaaaagctgaagcattgctttgtggtctacgctccatt

SEQ ID NO: 86 - DNA, 1786 bp, Zea Mays
acgaggcggagtcgccgcacgccctccgctttccgagtgacagccgcactcggccctcgtagctggaggagtgggggcgcgggagagatgataaggatggcggcagcgtctcagccgccatcgtcagccttgcggatgcacgggtgcggcggcgcggcttctgcgtcgtccgcgcccgtgcgcctcttcacggagtcgcggggtagagtcgtggcgtcgattgggaggggcaggaggcggaggcgcgccatctcgtgctgctcgtctccagacgcagatggccctcgccccgccgcgccaccgacctccgcagcgccttccgacgggtcgatacagctctattcccagatcgagagggtaatcacggaggcggcaaagcagtcccgggaaggctggggttcgactggagattggaccgaagtcgagggatcatgggtgttgagaccgaagtccttggagccatcatttgttgtccactttgttggaggaatttttgtcggagccgctccccagatcacataccgcttcttcctcgagtgtctcgcgaacaggggagctttggtgattgctacaccttatgcgagcggctttgaccatttcttcattgcagatgaagttcaatttaagtttgacaggtgtttgagaaacttggatgagcctgtaaatgatctcccaacgtttggtgttggacattcattgggatctgttatccacatgttgattggatcaagatatgctgtgcagcgaagtggaaatgtactgatgtcctttaacaacaaggaggcaagctctgcgatcccactattttcacctgtaattgttcctatggcacagagttttggccctatattctcccaattggcatcgtatccaacaatccgatttggggcagaagcagctattaagcagcttgagaatctaagcccacctgttgttaagcaacttctacctttacttcaacaacttcctccgttgtatatggacctaataaaagggcgggaggacttcattccaaaaccagaagagacacgccgcctgataaaatcctactatggaatttctcggaatctcttaataaagtttaaagatgatcaaattgatgaaacctctacccttgcacaagtactaagctctgaagcagctattagctcattgcttgatatgtcaattcgatcacttcctggggatcatgggttaccattacaacaggttcttcctgatgttccaccagcaatggctgatgcagtgaaccgcggaggtgaacttctgacaaatctgacaacaggcacaccatgggaggctgttgctaaggaggttggcaccactttgggtactgactcaggcattctacgagcacagatctcaaaagacgttgaaactcttgttgatgtaattgcttcatggacatcttcaaattctggtccaagactacttcgcccatgatcacccagcagtctgcgtacagaaatgttagtaacagtgaagagcaacaggatttaatgatgcattgtgagtaacaaaaaggtagattgcacttcagcgcgactgtcttagtattttagatccatactatagttcagaaaaaagtgaagatatgtatttatatggtgtatttttgaaccaagatattttgatagaaggaaactttataaggaatagaaatagaatgatagattctggatacggtaaagctgctaagctgtatgaaaggagtcttggcaattcagcatttctaactaggaacaaaactttatggggtgtttggtttgaagaatcaattcattct

SEQ ID NO: 87 - DNA, 1196 bp, Zea Mays
gcggctgaaccagtgccagtcccacccgttcccagaccagcctcacgcgctcaccgtgctgcctccaccaccgatggctctccctcccggcgcaggggcggtggcgccggcgacgcccttcgccgcgaatccgtgccgtctccggcgggcgtctggtcctcctgccgccgcccttcggctcgggccgctcttctggccatgggaaaaggtgaaaatcggtcccctttctgtttcccccatgggttttggaacatgggcatggggaaaccagctactttggggctatcaagaaagcatggacaacgaacttcaggattgcttcaatctggctctaaggaatggcataaacctttttgacactgctgactcttacggaactggaaggctgaacggacagagcgaacggctactcggtaaattcatccttgagtttgaagggaggattaaatctccagatgatgtggtcatagcaactaagtttgctgcatatccttggcgacttacatcggggcagtttgtcagcgcctgcaagtcttctttggaaagattacaacttgataggctcgggatagggcagctgcattggtctactgctaactatgcacccttgcaggagcgtgccctctgggatggactagttgaaatgtatgaaaagggccttgtaagtgctgtcggtgtcagcaattacgggccgaagcagcttctgaagatccacagctatctagcttctagaggagttcccttgagctcagctcaggttcagttctcgttactgagcatgggtgacgatcagatggagctgaaaagtgtgtgtgattcattgggcattcgcatcatcgcatatagcccgcttggattaggaatgctcactgggaagtatggtgcttctaacctcccaaaaggaccaaggtcagtgctgttccgacaaatccttcctgggctggagcctctgctgtcttgcctgagaaggattgccgaaaagaaggggaagaccatgcctcaggtggccatcaactggtgcatgtgcaagggcacagttcctatcccaggcgtcaaaacggtgaggcatgtccaggagaacctgggcgcgctcggctggaggctgagttctgccgagatctcggagctcgagtccgcagcgatggcggctccgaggaagatgatccagaatgtcttccagactgcctgaccgtgtg

SEQ ID NO: 88 - DNA, 1836 bp, Zea Mays
cgcgcagccctccattgttaacgcccaaaatacagggggaaaagcaagacgcgagcagaagggaagaggcagtttgcaattccgatgcacccaggcctcaagattcaactctgaggccttatccgaggcatccgcatcgatctccgcaagaggatgggtaacgtgggaagcaacggtggaggcgccgccactggtcaccgccgtcggagctccggccacggccatcaccagcaggcgccgccgcctccccagccgcaggagactgcgcccaaccgctacgtgttcgcggccgccacgccgtacccgccccagtaccctaaccccaatccgccgcagtactacccgcagtacgggaactactacccgccgccaccatcatccgtgccggtgccccttccggcgccgtacgaccaccaccacaggccacccaccgccgcccctggcgagttcccgcccccaccccccgtccacccccacaactaccccggctgggccgggcggtatccctcctacggaccgcatctgtctatgccgacgccttacgttgagcaccagaaggccgtcactatccgcaacgacatcaaccttaagaaggagacgcttcggatcgagcctgatgaagaacgccctggccgcttcctcgtcgccttcacctttgacgccacggtcgctggcagcatgactgtttacttctttgcaaaggaagagctcaactgcaatctaacaacagtgaaagaagacctaattaagcccattactgttagcttcaaagagggtcttggtcaaaaattcaggcaaccttcaggaacaggaattgacttttcagtgtttgaagaatcagatttattaaagcagggggacatggatgtatatccacttgcagttaaagctgaaacaacattgtctgttgatcacccaccagaaggggatgaccaaaagatgataactcctaactcacagatcacccaggccgtttttgaaaagaaagaaaatggggattatcaagtaagagttgtttgccagatcctctgggtcaatggaactaggtatgaactgcaagaaatatatggcatagggaactccatggaaggtgatgctgatgcaaatgatccagggaaagaatgtgttatttgcctctcagaaccaagggatactactgtcctgccatgtaggcatatgtgcatgtgcagtgagtgcgccaaggtcctgaggtaccaaaccactcggtgccccatctgcaggcagcctgtggagcgtctcctggagatcaaagtgaacaacaaatctgaagatcagcagcagacgccccaatcgccaccgcgcccagacctggctccgcagcaggaaggggtgtagccgtgatcaaagtcagttctgaggtattatatggctcgaatctgcggaccttcctgaaggtttgttctctcatttgagcaacgggggatgcaactggtacttttacctttagcatatgtaagcttctggcatcgcatggctttgccgacctctgctgtatctgcctatctggaggtcggagagcaggatgtcaaggagagtgtgtatcatatatacatcatgcatgcgtgtgccatggctaccttaagaagcgtatcgaggaggattcctgatgcctggttgacttcctccagggaaaaaggggaagagaactagagaagaggtggtctcttaaatctgtacaaaaatgactatttcaccttgattccataccttctctgttatggcctgaaaaggtcgatgagtattttacttggagttataaaacagtcagtgcataggtcgcctctcggccaattatttattaccttgctacacgag

SEQ ID NO: 89 - DNA, 665 bp, Zea Mays
agagaactccgacttcttcactcacacacacatggcgctgatgagccttggcgccgccgggtacaccacggccaccgcgccgcctcgtccccgaagatgtaccctgccgtttcgcgccgccgcctcccctgcggcactggaccgccggcgacggccgcataatgtggctggcgacttcttcgtcgaccaccgctgcatcgactgccagacctgccgatggatggcgccggaggtgttcaagagggtggatggcaaggccgccgtagcggcgcagcccagctccgaggaggagaggaccaaggccctgcaggcgctgctatcctgtccaacatcctcaattcacactgagaaacctccaaaagacattcttaaagtgcaaaacatgtttcctctaccaatcgacgacaagctactcccaggtgtttatctctgtgggtataattctgaagactcatatggggcaacatcgtacctggtaattcatccacaaggaaacatactgattgacagcccaaggtatactccaaagctggccaacaatattgaaaagcttggtggagcgcgctacatgtttttgacccacattgatgacgtagcagatcacaggaagtgggctgagcagctaaaatgtgaaagaataatacattcaggagattaagtaacca

SEQ ID NO: 90 - DNA, 458 bp, Zea Mays
cccccgaccgcgccccgccctcgaggagcccaccccggctgccaccgcggccgcctctcccgcccccgaccgcgccccgccctgcccccgtggagcccgccccggccgccaccgcgatcgcctctctcgcccccggtagcacctgcccccgaggagcccgccccggccgctgccatgaactaacaaatacctatgcttgcgctcagaagtacaagaaggaggagacagccacgtttgcgctctatggttgaagaggtggttgacatttcaaattgggagaaaaaagaagtttgtggcaagaaacggaagttacaaagctttagagatgaggagtactacataagttcagtacctcaaaaccatcatttggaagctgggctgtcggtgagggacaatgaaggatttgttgaaaataggggaagttatatttgtttgaagtacaagttatattaaacttc

SEQ ID NO: 91 - DNA, 6206 bp, Zea Mays
ctttaccccgctactgtccccttccacacgaggccgtgcgtcaacgataacagcaccggatggtcgtgtggagcaccggccgccctagccccaggtctctctcccttgggtcgtcgtcgtcgtcgtcgtctccacggctacacccacatcttgtcttggaggcgaagaaagaaatcggccaagtatcccgcgccgcccaagtctccccaactaaccccccaaacctaccaccacccatccattttcgccttggcttgacccgcggagctctgactcagagggcatccacggcggcggcagtgcgagggtccgagggaagattggaggatgcacctctacaacgcgtggctaccgccaccggtgtcgaccgcggcgcgtggggaggcagctgcctttgcgggcgctgtgcggaccgccgcggacgcgtggctgcccggggactccgactccgcctacgccacactcaagtggatctccgtgttcgacctttttattaaagcgaagagtgacattgcttctgaggatcttcaggctcttgtaaagcttggactggaggtatttcatgcgtcacataacaagtttgttgtccagattaagtggggaggtctgctcataaggcttttaagaaagcatgggaagaggctttcacttgttgtgcaatggagaccactttatgagacgttgataaggactcatttcaagagaaacatgggccctgagggctggaaagtaaggaagcaacactttgagactgtgacctctttagtgtgtgcatctaggaatttctttactgaaggtgtggctgctgaaatttggtcagagttcaggcccttgctggaaaatccatggcataactcagcatttgaaggtgttggatttctcaggctgtttcttccagcgaactcgaggaatcaggatcactttacaactgattggattagaaattgtctggacatatgggattctgtcacaaattgtaacttctgggacatccaatgggcttccatcatagcacgttgtataaaaaattcaagatctgtgaactgggatgcttttcttcccttgttattcacaagatacttgaacatgtttgaggttcctatatcaagtggcaatggttcatacccctttccagtggaggttcctgggaacacaagatttttattttccagtaagaccagaacactttccaaggcaattgcaaagtctgttgtataccttttgaagcctaaaagtttagcatttgagtattttgagaagctcattaattttttggaacagttctatcatccgtcaaatgggggtcgttggacctactcattggaacgcttcctgcgctatcttgttgtttactttgagaaacgccttcagcatgaacaatttgttatggcagttgaggaccatgatcaatcttatctgggaaaggaagaaaggtctgtttttgtcaaagctatcttgaaattattggatcgtggtcagtacagcaaggataattctcttgctgaaacagtttccgttgcaacttcgatcctgtcttatattgaaccaaccctcgtgcttcagtttgttgcaaaaaacttccaacgagccttagagacaactacagctacccatcagttaaagaacgctgtcacatctgttgcattttctggacgtgctcttcttctatgttctttatgttcatctcagaatgatgatagcagtgttgttgattcattcagtgatcttgttgtcgcttccctttcaaatgcgttacttggcatggatgccaatgatccacctaaaactattgctacaatgcagttaattgggtctatcttttcaaatctagctgcagttagtgatgatgtgcctatattgctccaatctactactctatcgaactggctagatgaattcttttcccgactgttttctgtgcttcataatctggaatcaagtagtcccattaatgagggttaccaaagctcattcatgtcagggacttttcttgttgacagtccatattacttttgtatgcttgaaattcttctagggaagttatcaaaacccttatttaatcagtccctgaagagaattgccaagttcgttaatgcaaatatcctccctggtgctacttcagaagttgggcttctttgttgtgcctgtgttcattcttatcctgaggaggcttcagtctaccttgtaaagccaatcttagagaccatcatgtcatcctttgaggggactccaaccactggttatgtaggaagagtagttgcagataaagcatctaccaaggctgcactttctcctgctctggaaacagcaatagattactatctgagggttttggccatatccatcagttatgccggtcctaccttactcaattataaggaggaactaaatcacataataacatctgcgttccagtccccttcttggaaggttaatggagctggggatcatctccttcgctctctgctaggaaatctggtttcttattacccaattgatcagtacaagccattcacttgtcagcctattggaaatattattgaaccatgggggtgttcgaaagctcatcaggatagggaggatgaaatgcttaatttccctccaaagtggcatgatccaagtcatgatgaactctcttttgcaaatgaattactacaacttcatttccagtcagctttagaagatcttttgactatttgtcagacaaaagttcattctgacacaggagatgagaaggagcacctaaaaataaccctgttacgcattcattctgcattgcatggtgtaatgtcttgtttaccagaaattcgcccgtcatataaagatgggaggtccctggaagtggagtcggctttcttcatagcaggatctgctggtagcactgttggaagctcagaaatgcgtgaaaaggctgcagaatttgtgcacatagcttgcaggtacttattaaaggaaagaactgatgacagtattcttctatcccttgttgtgcgtgtcattgatgctttggtaaactatggaagcttggaataccaagaatggtcaagccatgttcaagcttggaaactagaatctgcttccataattgagcctccatgcaacttcattgttccatttcatgctcaaggaaaaaagagacctagatgggcacttgttgacaaagcaaacttgcatagtacatggaggtgttcacaatcatcatatcacagatacagaatgaatgcagatgtttcgccatctgtccccatgattaatttgatgaatgatctcttagatctctcactacacaactatgaaactgttcgatcgtatgctggaagatcgcttacaaaattgttgaaacgttggccttctctaatttctaattgtgttctcacactcacgggaaatttgcgtgacccaaaagctcctgaacatgttgttcttggttcttgcagcattctgatctcacagactgttttaagacacttgaccactgattctgtttccctctcttcctttatcatgggaattctggaaagctctcatcatgaatcgttgaagtgtcagaaagctattactgagctctttgtaacatataatatacgtttctctggaatatcaaggagcttctttaaaactcctgaaaatcaagctgacaagccaggatttctcagtctaatttctcaaattaatgctttgggctttgagactaatggactacattggaggtacaatttgatggccaacagagtattactattactaattttggcatccagaagcgaatctggcatatattcacaaatgcttgcaaaaattgctggtcatttcttaagaaatttaaagagtcaactgccccactcaagaatgcttgctatatctgctttgaacacattattgcaaggatcacctcataagacatctgcacaaaattctaagcaaccaatagatcaccctgaagattgcaatatttcatcaacagaagagattttgaatgagataatccgggaggaaggattcatgaatgagacactgaacagtttatctcatgttcatattatttccgacaatgatggttcgtcaaaagcgagttatggggcatcatcttttcaaagcggatctgacaaagcaataacttacttctattttgatttctctgcctcatggccacgtactcctagttggatttctttactgcgtggtcacacattctattccagttttgctaggatattcaaaaggcttatacagcaatgtggaatgccagtaatctcttctcttcagagtacactagaagagtttttaatttcaaaagagagaccaaggcaatgtgtcgctgctgaagcgatggctgggatgctgcactctgatatcattgggaatctggaatgtgagaacaactggttgatggcccagttgcataagattatgttagcaccatctgtggagtcagctcctgaatgggcagcttgtattcgatatgctgttacaggaaaagaaagagctggaactcgtgctcctgttctcaggcaaaaagtattagaatgcttatgtactcctcttcctcattccatggcaactagcgtacttgcgaagagatattcttttctgtccgttgctctaatagaaatttctccacccaaaatgtccccagcagagaagcaataccatgttaaaattcttgatgaactacttgacagcatgaaccattcatctgctcaggtaagagaagcaattggtattgccatgtgtgttacaacctcaaatatgagactttctgggttatttggcactggatgttcaccgcaaggccttcatggggatgtaagcatgattgaacaaacaggaaataaatattggtctgaacgtttgacagatggagctaatgaattagccgtaagtatacaaaatagtactcaatctaagcaactagaatcaacatcagattcggctgaagatagcatggatgatagagagcaggctgatgctaaaaggatggaaacgatatttcattttatgatcgcatctttgaagtctgggcgatcttctgttctactggacactattattaggcttgtgtacccaattctctcactacaggaaacatcaaataaagatttatcattgcttgctaagtcagctttcgagttgctgaaatggaggattctacatcggccttttcttgaaactgctattacgtctattcttcctttagtcagtgatcctaactggcgtaccagatctgcactgttatcgtatctcaggacctttacctacaggcacacattcatactttctggctcagagaaatcacaaatctggcaaacaatagaaaaattacttgtggacaaccaagttgaggttagggagcatgctgctggtgttcttgcaagcttaatgaagggtatagatgaagatctatcaaaggatttccgtgaacggtcatatgcacaagcccagcatatttttgttgcacggagaagaaatttgaagttttctgttggtaccatccatggtgcagtccttgctttgacagcttcggtcctttctgttccatacgacatgcctagctggcttccttctaatgtctcgctacttgctcgcttcatccgggagcctccccctataagatcaacagtcacgaaagctgttgcagaatttaagcgcacccatgctgacacatggagcatccagaaggacgcattcactgaagacgaactggaggttctccgtgatacatcttcctcctcgtcgtacttcgcttagattaaaatttcaaaggccataggatattctctggtactggtgttgtgtatatgaatttataactgttgaagtgtcggtgtttttcataaagtatatccttgtacgtacctagttttatttcatcaacagatgccttcgtacaactgagatgaagttatgcagtctactgtataccgtctggacatagcggaagcattatggcatgtgggatccttgcgtgggctgagaaattgttaacatccaaatcttttgcccagtcaacgacgtgaataagatgctgcctagtttaaccgcataatgcatctctggcaactctaatagcagagtcaacgggctagatataaacttgcccatgttcattagaagcaagaaagaatcagccattgacattaagaagtacatgagcacccccgatgcaaacgtctatagccctaatcatacttgtttcttgcttcctc

SEQ ID NO: 92 - DNA, 2385 bp, Zea Mays
cttcaggttatggatcaaaacggcagtataaagaagcatctgcacagcgggaggcagtgaaccaactatgcagtcattttgaagcctatagagatgtgcccaagataacagaattgagagagaaattcaagaacatcaagaaaatcctcaaatctcatgtattttcagatttttcaagcttaggaactgggaaggaaacagaagattccatgctattgcagcagctatctgatgcttgtttggtggttgatgcattggaaccatctgtaagggaagaactagtgaagaacttttgcagcaaggaactcacctcatataggcagatctttgaaggagcagaacttgccaagttagacaagaccgaaagaagatatgcatggattaaacgtcgactaaggtcaaatgaagacacctggaaaatatttccaccttcctggcatgtcgactatctgctgtgtatccagttctgtaagattacaagggcccagcttgttgatatccttaataatctcaaagaaaaaccagatgttgcaactttgttattggcgttccagagaaccattgaatttgaggaagaattggcagagaaattcagtggtggaactacaaatgctagaaataaagagacaacaagtgatgatgaagatgagggtgggggacacaataaaattgtttcggacatacgaaagaaatatgagaagaaattggctgcacccagtgatgaggacaaagataagcagaaagatttgtcagttcctggtgctgggttcaactttcatgggatcatatcttcttgttttgaaccatatatgactgtatacattgaacttgaggagaaatctttagtggatcaattagaaaaacttgtccaggaagaaagatgggaaatcgaggaaggaagtcagacgaacattctatcaagcagcatgcaggttttcttggtgattagaaaaagcttaaagaggtgcagcgcattaacaaagaaccaaacattgttcaacttatttcaggtatttcaaagaatactcaaggcctatgcggctaagttatatgccagattaccaaaaggtggaactggtattgttgcagctgccactggcactgatggacagatcaggacctcagacagggacgagagaatgatatgctacattgtcaacactgctgaatattgtcatcagacatcaggtgagctagctgagaatgttgctaagatgattaaccctcagtttgctgacaaggtggacatgtctgaagttcaggatgaattctcagccgtgatcacaaaagcactaatgactcttgttcacggacttgaaaccaaatttgatgctgaaatggttgcaatgactcgcgttccatgggctacccttgaaagcgttggtgatcaatcagaatatgtgaatggtatcagctctattctgtcaagcagtattcctgtgcttggtaccctgctttcacctacctacttccagtatttcctggacaaacttgcagcatctcttgggcctcggttttatctcaacatatacaagtgcaaacatatatcagaaactggtgcacagcagatgcttttggacacccaagcagtaaagactattctcctagacatcccagctcttggaaaacagagtacaggtgcagctagctactcgaaatttgtcagccgagaaatgggtaaagccgaagctctacttaaggtcattttgtcgccagttgattctgtcgctaacacataccgtgccctccttcccgaaggcacgcctcttgagtttcagcggatacttgacctcaagggcttgaagaaagcagaccaacaagctatcctggaggacttcaacaaacacgcccctgcaccagcccccgccatcaaacaccctgccgttgctccgacggtggcgacaccagttgccacagcatctgtccagattgtgccctcggtggcaactccagctgtttcgattacaccaagcatggcctccttgaagggagcactggcgaaccaagaggacgtcctcgcccgagctgccgcccttgggcgcggagcagccaccacgggcttcaagaggttccttgcattgacagaggccgccaaagatcgcaaggatgggccgttccgcaagctcttcaacgcctaaaatgtcgctcaccgttgtgttcatagttcgtgcccctcgtgcagtgaacatagatataggaaagtctataacaaccattttgacagattatcctatcccatcctgcggagaacgattagctcagttgtagcatagagattttgagacagtttgagctattagataagtttttccccctggttttgtgcatgcaaacccaagattctatactcgtgattgaataatcgtttctctccttttttttttc

SEQ ID NO: 93 - DNA, 1558 bp, Zea Mays
gatttatgatataagtcggatgcgtctcgttttgttgcccgcggtcgtggcctcctgggcccctctccacctaccctaccaaacctgctctcccctccgcccccacgcggtcacccgcttccaaataaatcgcagcattccctgcctaaacgtgctcgctctccctcccatttcatcccggcattttccttgcccaacgtgctctccctcccatttcctgcgaggtggttggtggcgatggccttcaagctgatcaccaagcccgcggcggcgtcgcccgctgctgcttactggggagatctcgcccgggggccgcagggtacgagccgcgttgccttcggaccagcgcccaggaacaaggggctccgcgcggccaacaactccgcaacgcccatagctaaggtagagagggttgatcgaagtgacatattgacattggatagcatcagacaagttttgattagactagaagacagcatcatatttggccttttggagagagcacagttttgttacaatgctgatacatatgatagcaatgctttccacatggatggttttggaggatctttggttgaatatatagttagagaaactgaaaagctccatgcacaggttgggagatacaagagcccagatgagcaccctttcttttccaaggatctgcctgagccccggttgccacctatgcaatacccaagggttttgcatcccattgctgattctatcaatatcaacaaagagatttggaaaatgtattttgatgaacttcttccaagattggtgaaagaaggaagtgatggcactctccagaaggatccactatgggaagtttgtggcagaggccaagtttcaagagtcccctgaagcttacacgccagccataatagcccaagaccgtgatcaactcatgaaccttctcacatatgaaacggtggagcgtgctatcgaacacagggtggaggccaaagccaagatcttcgggcaagaggtgaacattggtgctaaggacaacggcagcccaccggtctacaaaatcaggccgagcttggtcgccgagctgtacagctacagaatcatgccgctaaccaaggaggttgaggtcgcgtacttgcttaagaggctggattgagtgtgtttacgtagctgtaaaactgccagatccgaactcctggtattaaaccataacatcggtaagtacccatttctgtgaagaggatgatccgaactcctgtcattaaaccagaacatcagtaagtacccagttttggggagaggatggaaaatataccatgtgtggcaagcaacatgcataatatcatctggagttgcgcttactcgcccctcgtgcgtaatgctaatggttgtagcctgtatggaatgctgggtcactttctttggctgggtgcccttttgaatcagagtaaattcgctcattgtcgctggaacttattctttgatgcacactattcgaagtttgcatttccttggttgccgttcctgttaaaatctgttaagttgtacgtgtaccacatgactagagattgtcggcaccgtt

SEQ ID NO: 94 - DNA, 2126 bp, Zea Mays
ttctataattgcgaaaatatcccgaatccgtggcttcccttccctggcgcgcgagtgacgagcgtgcgcagaagctagccaagcgatgccgctcctcttccccgccacgccgccgctaccgctgtgccgcgccgcgcgcgtctcacgccgcgccacggcctccgtggcgtccgcggccaggagctcgtcgtcgtcctcggcctcgttcgacgcggccgccttcgaggccgagcggctgcgcctggacgccgcggcgcgggccgggatggagtccaccgccgcggcagcggaggccggcccgcgggcctggaagtgggcgatacggaagcgggtgtgggacgcgctcgaggctgagggcatcgcgcgggacccgcgccccgtccaccaccgcatccccaacttcgacggcgcccccgccgccgcagacgcgttggggaggcttgacatatttcagaagtcccattgtgtaaaggtcaatcctgacacacctcagaagcaagttcggttcttaacattgtcaggagagtgcgagccatttattgaacaggaaagagtatccaagtgtacaacaccactcacacaagacagtaggtcctagaaaaggtttcaaatgtccctatagccctgactccctgagtgcgcactgtaaggctccctcctctgctgttcacaccagcaagcttgtgctcagagaaaaattaccaaagagttaagtcttcctctatgctgtttgtccaccatcttgattgcatggcaccaccatcatggaagctaactctgtcagtttgaaaatctagtgcttttaagaccaatttttgcagaataagtaaccacacctgcacctcccttgaagttgcgccaggttactgtagttgcttttctggtgtaaggtcgtatgatcaagcgtgctctgaattagtcagtggagcatgatatactaggtcgattcatgcttattgctgcatagttaatttctcgttgtaatgcaccagtatgtaattgtatcattctgtttcctgattaacttcataagttaatagcacttgatctctcaatgaatttcatgctgcaaaccaaagcatatactggttggttagtgtttcaggttttctgtacattttttctagctttcgatcagatgtacccattctattaaggacaaacactgcaatcatgctaaacttcttgcctgagaatttgaaaatgatttgtttgcttctccttttgattcggtgctactttttgtcatctaggtgataaaaagctgttgactccgcaacctcggctaaggacaggatttttctcagttatggactctcagatgatacctgttgggtgcattcctgaagcatgcacttctgttggtgcagctaaatatgggaggccaattggtttagatgaaagccttaaggtggatttgattgtgattgggtcagtggcagttgatccaagttcaggagcacggttagggaagggagagggatttgcagagctggaatatggaatgcttcgctatatgggagctatagatgattcaaccatgatagtaactactgtgcatgacaagcagttagttgatgacattccagtggagaagctgctagttcatgatgtgccagttgacattatctgcacccctactcaggtcatcttcacgaagactacgatcccaaagccacaagggatttactgggaaaagttatctccagaaaaattgggccaaatccgaattctaagagagctgaagcaacgtatagagcaagagacaggaactatgcttccttgtggaccttcggagaagctaccgccaacagctcagagaaagcagaggtggcagcggcgacgatgagacttttgtatgcttctcttaactgtttcttttactcaataaagagctatgtgcacccttttctttcttagggcaaatcaaggtcacaattcaaaactgctagcattagactataggaacattaccagatgtaatagaaatgccaaaaaaaactttgtttgcacttaagaggcaatgaggatagatagtatagctctttccacacatatttaatttctttgcaagtatgaagttccatttggaaagtggtacttaaaatttgtatcttggatgtagc

SEQ ID NO: 95 - DNA, 859 bp, Zea Mays
tcccagccgccgccgactctatctctcccttccctctcaccacctcctcgtcatcctcagcgtgcacgctgcgcgtggccgtagtgggggtggccccgcggcacgtcggctgccgaggcgctggtctcgccgagggcccagatgcaggtgctctcctctaccaacctcgccgctgacttctcccgcgcgctgccgcccggggcacccatccccatgctccgccgtgaggtgctccactccttcctccgccgtcgaggccgagctcgtccagggcctcatcacctccgccgtgaggtgctccactccttcgtcttcaagctctcgccccaggggtgcgctagtgccaggtgcggcgagccagcagatcaaggaaaccgcccgtggccgccccaagcgttacatctgcactggctgctgctggtgacaagcaagaacaaccaaaggatgcaaacatgtccagtgacactgatatgagtaaggtgtttgaagacagaacgtttgtgtcatctatccttaattcgtttcctggtgttgatcccaatgatccatctgttaaagatttgctggcatcattgcacagccagaaagaggaagagaagaaggaagacaagtcagacaaaacagaagacgagaagaactgcttcaagctggagtgatgtcgctgtggtgcttttgtgactgatcatctctggagcttttgtgaatgatgtagctagctatctgtaattgatctagttgtgaatgatattataattgtgatacttttgtgaatatataattgtggtgcttttgtgtttatgtgatggatctatgactgtggtatactgattaattgtgtatgtctttatgattcgtgtat

SEQ ID NO: 96 - DNA, 2548 bp, Zea Mays
cgcgagccactgcacccatccactcgtacgccgcggtgcgccgcagcccgcagcccgcagcccgcagcccgcagcccgcgactccaggcatccacaaaaaaccatctcccccgcggccccggcaccgcacgctcccgacccggcgagtcccactcccacctaagctgagcggccatggcgcggcacctcgcgccttcgtctggaagcctccaccgtctcctcgcgtcctgccactacccgcccacctcccaggcgccgcctccccgtccgctcctcctcccgaagacccgatcggcggctatgcagctcccgcgacgcgggcggcgcgacgtcgtcgccgctgcagctgcctccgcaccgtccccctcttctccgggtaccgaggtggcagtctggggtaaggtctccgccgtgctcttcgatatggatggcgttctctgcaacagcgaggagccctcgcgacaggccggcgtcgacgtcttcgctgagatgggagtcgaggtcgccgtggatgactttgtccccttcatgggcactggtgaggccaatttccttggaggtgtcgcaagagctaaaggagtgaaagatttcaatcctgaaagtgccaagaagagattttttgagatatatcttgacaagtacgcaaagccaaattctggcatcggattccctggggctctggagctcatcttggagtgcaaaaattctggtcttaaggttgccgttgcatccagtgccgacaggattaaggtggatgccaatctggctgctgctggtttgtccgtgtttctatttgatgctattgtttctgctgatgcgtttgaaaaattgaagcccgctccggatatattcctggcagcatcaaagagcttaggtgtcgacacaaatgagtgcattgtgatagaagacgcgcttgctggtgttcaagctgctaatgctgcagaaatgagatgtatcgctgtgacaactactctagaggaaatagcgttacgacaaggcagtccctcgttcatacgaaagaatattggagacatttcaattaacgacattttgtatggtggttctaatgctcgccacaatgaaggggcaggaagtactgagaatagtagttcggtagggaatgctttgtctgagagtctaaacggagcaactgctgctggacattctgacacaaaaggttttccaatctcaaaaaataaagggctgttgggttctcgacgcgaaatattgagatatggaagtctgggaatagccttgtcctgcctttttgttgcagtcagaaattggaaggcaatgcagttcgcatctcccaaaggcctactgaattttctcatgggtggaaatagttcagtttttgccagaaatgaaggagaatctctgtcatcaagagttcaacaaataaagaagtatctagctgagtttgaatctgggggttctgccacatatgttcctgagtttccaagaaagcttgactggttgaatacagccccacttcagtttggaagagatttgaaaggaagagtggtgctgctggatttttggacatattgctgcattaactgcatgcatgttttgccagacctggattttgtagagaagaagtataaagaaaaacctttcactgttgttggtgtgcactctgccaaattcgataatgaaaaggaccttgaagctatacgtaatgctgttctgcgctacaacattactcacccggttgtaaatgatggtgacatgtacttgtggagagaactgggggtgaactcttggcctacatttgttcttattggacccaacggaaaggttctagcacagatatcaggtgaaggtcatagaaaggatctggatgaagtaattggtgcagcactggaattttatgaagagaagaaactattacaaaatgacccccttcccttggcattggaaaaagacaaggatagtcgtttactaacttcgcctctcaaatttcctgggaaacttgctgttgatgtgcaaaacaatcgattattcatatcagacagtaatcataatcgaattgtggtgaccaacttggaagggcagttcatataccaagttgggagttctgaggaaggattgcttgatggcccatttgatgctgccctatttaaccgccctcaaggtattgcttacaattcaaaaaggaatatcttatacgttgcagacactgagaaccacgctctgcgagaaattaattttgtggacgagactgtgagaacactagctggaaatgggacgaaaggatctgattacagaggaggaggacaaggaacaaaccaggtcctaaattcaccatgggatgtatgctacgatcccgcagaggaggccgtgtatattgcaatggctgggcaacaccagatctggaagcacaatttacatgatggaataaccaaagttattagcggtgatggctatgagaggaatctgaatggctcaagaaatgcatgagttacttgttgctgatagtgaaagtagttccattcgagttgttaatctgaagacaggaggctcaagattgctggctggaggagat

SEQ ID NO: 97 - DNA, 2281 bp, Zea Mays
caacaaaatttcctttttttttcttttcccgctgctttaaatctcggcgttttcgtggcgcgtgcaggcggagaggaagaggacgccaatccaaatccttatccccacgtgtgttatccttccattttgtgggcgggggtgagctcctgcctcctgccgccctgcttcgcaatcctcctccacctcgacaacgacgccgtcgcacctcgctgctcgccgccacagcggtctcacctcatcagcttgtgtcggccacgggacgcgaccgaggcgagggcgggcagtctttgtccggtcggcgatgcagaccctccgtcccgcgcccgcctccttcctcgtgccgcccgctccccagctcctccgcacagcgccgccaccagccccgagagcaaacgctgctgctcttgccgcggcgtcgcacggctggttcccctcgccgcaccgtgcctgccggcgccgtcgacgcgtgacaaggtctgcgtcgtccggtgcagctagcgccaccgtggcctccgtggatgatgccaagaaggacgtgctcatagcgctctcccaaatcatcgatcctgatttcggcacggacatcgtgtcctgtgggtttatcaaggatttggaggtcagtgaggccttggaagaggtctcatttcgtctggagctgacgactcccgcttgcccaatcaaagacgagttcgaacagaaggcgaacgaggtcgtcgcagcacttccatgggtcaagaaggtagacgtcacaatgtctgcgcaacctgcacagccggtatatggaggggagcttccagaagggctacagaagatctccaacatcatagcagtttcaagctgcaagggaggggtagggaaatcaactgttgctgtaaatcttgcgtacacactagctgggatgggagctcgggttggaatctttgatgctgacgtctttggcccaagcttaccgactatggtttctcctgaaaaccggttgctagtgatgaacccagaaagcaaatatattcttccgaccgagtatttgggcgtcaaaatggtgtccttcgggtttgctggacaaggaagggcgatcatgcggggtccaatggtttcaggagtcatcaatcagctgctgaccactactgactggggtgaacttgactaccttgtcatcgatatgcctcctggaacaggcgacatacacttaacactctgtcaggtggctccattgactgcagcagtgattgttaccacccctcaaaagctggctttcattgatgttgccaagggagtaaggatgttctctaaactgaaggttccttgtgttgcggttgtagagaacatgtgctattttgatgctgatggaaaacgttattacccatttggacaaggttctggaactcaggttgtgcagcagtttggaatacctcacctctttgatttgccaatacggccaactctttcggcttccggagatactggaattcctgaggttgtggctgatccgcaaggggatgtggctaatacatttcagaatcttggggcatgtgttgttcaacagtgtgctaaaatcaggcaacaagtttctacagcggtgtcctacgatagatccattaaagcaatcagagtgaaagtgccagattcagacgaagagttcttgctgcatccagcaacagttagacggaatgaccgatccgctcaaagcgtggatgaatggacaggggagcagaaggttcagtacagtgacataccagatgacatcgagccagaagagattaggccgatgggaaactatgcagtttctataacttggcctgatggatttagtcagatagcaccttatgaccaattggaaatgctggagcggttggtggaggctccgagtccagcagcagcgtctgcagtggcctcgtcatgatacagcagaaagaatgttcagttagcaaggggcaagaaggccgacttttagctcccagaaaatttatagctctgctacaaattttgaaagaattttacagtactgtagaaccatgctcattgaattttaaaaaaaggcagcagctttcgttcctcttaaaccattgtgcagacccccgttctcactaaaccacaggctagccttgacaataccaaaccataaaagaaaacggttactgttataaagatagttttttttcccagttatatagaaaattgatataaaactagtgacaaacagaaggtgcatgggtggatctaatatgtttgttacatatgaatatagtgaatacaagtattattgataaccattgcacatgag

SEQ ID NO: 98 - DNA, 2466 bp, Zea Mays
tacacgacactactatgacagacttattttgaaacatagaacaatgcttattcaacattattatacaatcaagatcctaactttttgggggggttgcaacaatggagagtggagacaacatggagacctgagctgagcttaacccgcaaaagatcatacaccattctgtgatgcttcacaaggttccgcacctcaaattttggtgaaactgccttgttgttgtcttcatatctagcgcactggcatcccatgtagactgcagtttttgtcaaaaatgattttttttgaataagtagacattatatccttcaagatttttatatggaaatcctaaattgtgggcatattgatttttactctatttcttaaatgtaaagttgtaaacttgaatcacctagaaggaaccgtgttaagaagaaataagcaactatgtcttttcttctggaaagataaaatgtgtttatatttgaaagctagaaacatagctttctattatgtcacatcagtctaaaccagaatttaatcattttttataatgcacgtgcaatgagataaaaccaaaacaccttataatttggaatagagacttaacattttgttggctgggacattgggctatattttgcagcctcctcacttggcacagataacttcatttgttttccagagactgtattaatactttgcaggaataaacattgtgtcttgttatccattgcaatatacaacacttaagcccttggctgatagagtgattgtaaagattaactcttccgaggagaagacaactggtggaattttgcttccaacgactgctcagtctagacctcagggtggcaaggtagttgctattggaaaaggaatgataattggggacaataaagttgatgtcaacatttagaaatacgtcaaggaaaaatgtcgaacaactcagaagataaattcaagaactggttgcttcaacaagagtctgtccatgaggatggcatgcaacattacttgcccttcgattgagataggtggctacggtgatgctttgttgaacctgatatacgcatctccatcaagccagttcgaagagctcagtttagaatgtgagctagatgctacaggcaatcattctagagtgaaggatgctcaagttcatggctcacctatacctgagagtaatggaagattatcgacaactgctcagactaaaatgatgtccacagtctcagaagatgcaattcttgttggctcatctttcagataccaaagtagcctaggtaacaacaataagagggttgggctttttgatatgggtgatggaagtagtgagcctgctgctgaggacaacaatcaaatgcatcagatttcacgatgctgatatgtgctaagcatggaaacagaattgttctcacatgtatagttggtctaagtgatggcaaaagattgacacttgtggagttttttctgtgccagacatggagtcccttggaaaaaccgaatggtctatcatgggttttattctgcatacgataatacaactctactatatgagatcctgaagtctattaaatgggcaagaaaaacatatgtaaatcgacctgtaaatgttgttggacactccattggaggggatctagcttcattttgtgcccttgatctatttatggttggcttcattgatatctctacattttttacatatatcagatggttggcttcattgatatctctacattttttacatgttaaattcggatcataggacgttgagctcatgacttttggacagcctcggttaggcaatcctgcatttgttgtatgccttggctaacaagtcccaagaacaatccatgtgacccataaaaacgatattgtgccgcaattaccaccgtattattattacttaagtaaatggacataccaccacttcgctagagaggtttgacttcatgagagcatagatggaaatgtagttgccagaaatgagattgtatgtgatgattctggtgaggacccgacctatagcagaagtgggtcatgggatgagcgtagcagataatcttgagtactacagtgtcacactacatgttgactcaaggggaacctgtcagttcgtgattggtacagccaaccaagtatacaactacattcgtgaagttgatggatccatcatcttgttaagatatatatgcaagaaccatgagctctagaatcaatgtgactttgtatgccacgaaatgcacccttgtacaatatttttattttcaatttgtgtacagctcatgaaatactgttgtgtacaactcatgaaatactgggctctccagagggtaaggactaaggagagactcacctttttaaatgcacccctttgaccaagtgacattcgatacattgtaagctccataagattgccgcacaattcaatttgtgtatatcaataacactatgtattaccaagttatgcaagtatta

SEQ ID NO: 99 - DNA, 795 bp, Zea Mays
tgcagaatggtctgaatagcggaaggtgaaccggaagtacagaatagcacctagttcacccaattcagagcgccgaagccccaaaatgccactgttggaagatgtccaaagagagcctgtcaagatatggagtgatgatactaaaacccttaccagatctcaagttgatgctgaattggcacgtatggcaaccatgactgctgaggaagcttcagtggcagcggctcgagcagttgctgaagcagaggccatcatggcagaagctgaagctgcagcgaaagaggcagaggctgcagaagcagaagcccaagccgcacaagcatttgctgaagcagcgtttttgacattgaagaacagaaatgctggaaaattgatggcctaaggttgatcctacttggactctcggcctcgcggctgttctgaaacggcttttctgtgccatgtagatttgtacaacagtacgtgtttactacacttcggtttaaagcagctgccccggtgagtgtatcaccttatgttagtgggagccatgtgaaaactccagcctccagcgcactagtagcaacaatagcagcttgccacaacgccattcagaaaactgggtggcataaactcttccagtgtcaaatgtttcgctaacgatttgcagtattgcattgtgcatgaacagcctttgcattagtgcattattgcgctgcctgccaacagtcggcccgtttgctgaaaacgtttgtccggtggtgcactggcgctgataactacatattctcacaatattaaattaccagtttcaac

SEQ ID NO: 100 - DNA, 2105 bp, Zea Mays
agccgtcgcctctccttgctctgctcctctctctcccaagcggctctccctctatctcctcgtttctctcccctcctcttctacagccgctgccaggcaaccgaccgccgagcagcgcagccacccgagccccacgcccgccgcgccaggaaccagcgcccctgctctcgccaggacgccaggaattgctctttctatagcaagtttatgagttcagtttatattccattgaatatttgttgcagtgaagagaaatgagagaaagccttcggttgtagccttcagtttatattccattgaatatttgttgcatccgactcatctctgtttcgattccatccggtttggctcattttttaatcgagtgtgttgtagttttgtaccctaatgtcgtgggagtgctaccgaagtactgatagcatcactttaatttcattagctccgtcctggcaatcactttgggaaggtggtcagtggaataactttgcttaaaaagcttgaagcagttggtagtgaaactggaaatccttcttatcaagtgaaaattgtagactgtggtgaagtttccaacacaaattctcaggatccgctaaagggagataaagtaagctcaaagacagataacagcagttcagacagtgaaaagggtggccatcgtaccaagcgttccttgacgaaaggcttcaatgcagcagttgctgggtgcttctttgccattgaaactgtattaagacctcttaaagcagaaaattcacctccatttacgactgcaatgataatattggcatctgttatatcatctactgtttcaaatgttttacttggagccagaccagcttttatagtgccagcctatgagctaaaatctgctgccggttggaatggctgctacactagcttcagtctgttcagtcccattgacttcagtactgcttctctttgagctgacaaaggattacaggattttgcttcctctcatgtgaacaagggagaatattgtgaactgaaggtcatgtatcagcgaaaagcaggctttcctcttgtagcaattgtgcactgaaaaactacagtgcccttatgacaccacaatagtaagcaagactacaggacatctatgcgaaatgcagctagccagctacactgatgtagagatcattcaggcaaattcctccagctcgagtacttggagattacatagtcttctccattgtttttctagactttgaggttctaagcatgagcaagctgggttatgatggtgttgtggcactgctggttgctgatatatcactttcaatcggtcttgaccagattgaagctctgtatcagtatgcccaatttcagtttgagtgtggtaactactcaggggctgctgattacctttaccagtatggtgctttgtgcacaaacagtgagcgaaatgtgagtgccctctggggaaagctagcagcagaaatcctaatgcagaactgggacctagctttggaggaactcaaccgcttgaaggaaataattgattcaaaggttctaacttcaatgttttgttctgtgttctttgttctttgtgtacactatatcaccaatcatgttccttcctgatctttgggtagaacttctcatcacctctgaatcagctccagaataggatatggctgatgcattgggctctgttcatcttctttaaccatatcaggtacttgaatgctatacagacaaatgcacaccatcttattaggtatctagctactgcagttgttgtcaacaaaaaggagaaggaatatgcttaaagagttgattaaggtcattcaacaggagcaccatagctacaaggatcccgtaactgaatttttggaatgcttatatgttaactatgtagttgtgggcttttgaacaatagctggagtgatatgaaacattagtgatgtagttgtgggcttttgaactgcttcaagcaggagtgatgccgttgtggtgcttttgtgactgatcatctctggagcttttgtgaatgatctagctagctatctataaatgatctagttgtgaatgatattataattgtgatgcttttgtgaatatataattgtggtgcttttgtgtttatg

SEQ ID NO: 101 - DNA, 1808 bp, Zea Mays
aagaaaaacgaaaaacgaaaaactagagggtggaggacaacggtgtccagcaaaagagagagaagaggaggggaggaggtggaagtagcaagaatggcgtgctccaccaatctctgcttctcggcgtcgattcctcctcttccagcctcttcttcttcttctgtctcctcccccttcctcacggtggagcgtgtgtcctatgttccgtccttgtccaggtggacaatccgatacaagcaattggggcatgcatatcagagaagccacgttctggcctttgctagtgcagatgtatgcatcaggcatttcgagtaggccatctattttttagggttggtaggattatgacatataataatgtttattgaacataactttatgtgcttttgaatttttttagaagtttaagttcaatttcttaggcctatatcccaaccaggataccgttattccttagtactctttactttatgcattatactaacccaggtcctggagaaagttattcaactttctttagtgccagttgctgcattcttattctgtataatacattctctcttggtagctatattgtttttttaatgaatcaggcatcacagggtaaaagaagctcaggtgagaatgttgtgatggttgatccactggaagctaagcgtctagctgctaaacaaatgcaagaaattagggccaaagaaaagctgaaggtgcattgcagctgtattggagtgtatcattccttagattaaatcaatcttatatgctaaaggaagaaaacttcatgataaggaaaggaggaaaacatttatctttttttttttggaccaatagttggtgatgaatcattgtttcagataactggagacagaactaggcttttacctgttcatgttgtcctgcgagttctccaattctaatttatttatttattgtgtgggtacaaacttgattgcatgttcttcagttgaggcatctaattaactgcaaaaggatattcaacttaatattacctagtggctgtaaattgcagtaatgttcacatgggcatttatattattatttaaaaaaaactctaccagcaggggaaattatagggaacatatcctgtgttcatggagctcttgtgctcatatgagcactttaaatctggtgcgttcatttctcatccagaaggtgagggcagcagtggcacacagagacagacggcgcggcgcaacaagggtggtcaagagtggcacacactagaaaatgtctattcacacttggatgagaaatgaaggcaccagatttaaagtgcatatgagcacaagagctccatgagcacaggatacgtcaaatttgacccaaatcactgctctgttttgcagaggcgcagtcaagcagaagctatcaatgggccattggcaatgataggactgactgctggattgatagtggaagctcagacaggaaaaggcatcttagggcaggagctgatgacacctgcaatggaatgatgagtctattgcttcgatttaacgtgtgattacatatatcttgaacttattataagccagtatgtcgcctgtagagtgtagacaggtacttttataatatataatcacaacttccatatgtactgatacattttatctttgttctgcttgctactgttttaattgaatacaagacatactatggaatatttaaatttgtcatttgtagtagttgtgtttgtaactgcaagctaaaaaacaatctgttgagcatgtgctatatgtaagtagcgtggatcggtttagggtccgtgcatgttaatgagatatgcg

SEQ ID NO: 102 - DNA, 2673 bp, Zea Mays
tttcgtgagctgtcttggacgtagcttatcgtagctattctcgtgtccctctcccagactcccaccaccacacaaactgccctcgcggcctcgcccgtcgcccctctcgatcacttctctcccgacactctctcactcccgtgtcgtgtctagcgccgacggcgttgctaccggagccggccagcggccacgatgcctacaatgcacgcgcttcgcctatgcccgctgctctccaccatccgatccacaccaccgcgggccactgccgcagcccgccagggcgcgctcttcgtcgcccgctgctcctccgccgggacgccgtcagccgcccaggcgctcaagttcaatcccgaccaagccagttgaggggcagaagactgggactagtggcctgaggaaaaaggtgaaagtattccagcaggagaactaccttgctaattggattcaggctctattcaattccttgccccctgaagattatgtgggtgcaacccttgtacttgggggtgatggccggtactttaacaaggaggctgctcagatcatcattaagattgcagctggaaatggagttcagaagatcatagttggcaggaatggtctactgtcaacacctgctgtatctgctgtaattcgtaaaagaaaagccaatggcggctttatcatgagtgcaagccataatccaggtggaccagacaatgactggggtattaagtttaactacagcagtggacagccagcaccggagacgattactgatcaaatttatggaaacacactatcaatttctgaaataaaaacagcagacattcctgatactgatttgtcctctgttggagttgtaagctatggtgatttcgccatagaagtgatagatcctgtttcagattaccttgaactaatggagaatgtgtttgacttccaacttatcaaggatttgctttctcggcctgatttcaggttcatatttgatgcaatgcatgcaattactggtgcgtatgccggacccatttttgttgagaaacttggagctgatccggactgcatattaaatggggtgcctcttgaagattttggaaatggccatccagatccaaatctaacttacgctaaggagcttgtttttactatgtttggaacccatgcccctgactttggtgcagcaagtgatggtgatggtgatcggaacatgattcttgggaaaaggttctttattaccccatcagactctgttgcaataattgcagccaatgcacagacagcaattccttatttccagtttggtacaaaaggactcgcgagatcaatgccaaccagtggtgctcttgatcgtgttgccgagaaattgaatgttccattctttgaggttccaacaggctggaaattttttggcaacctaatggatgcaggaaaattgtctatttgtggagaggaaagttttgggactggatctgatcacatcagagagaaggatggcatctgggctgttctggcttggctttccatacttgcacaccggaacaaggataagaaggtcggagagagattagtgtcagttgaagatattgctatggagcactggaaaacctatggcaggaatttcttttctagatacgattatgaggcgtgtgaatcacacagtgcaaaccagatgatggatcaccttagagatgttatggcaaatagcaagcctggagagaaatacggaaattacaccctccaatttgctgatgatttcagctatactgatcctgtagacggtagtacggtatcaaaacaaggacttcgatttgttttcactgatggatctaggattatcttccggctttcgggaaccggatctgctggagctactatccgcctctacatagaacaatttgaatctgatatctcgaagcatagtctcgatgctcaaacagctttgaagcctttaatagacctggctttgtctgtttcgaagctcaaggacttcacaggaagagagaaacctactgtcataacataggccctgtttgtttcggcttttggcagcttctggccaccaaaagctactgcgtactgtcaaacgctcagcttttcagccagcttctataaaattcgttgggggcaaaaaccatctaaaatcaaataaacacataatcggttgagtcgttgtaatagtaggaattcatcactttctagatcctgagccttatgaacaactttatcttcctacacacataatcgtaatgatactcagattctcccacagccagattctccccacagccagattttcagaaaagttggtcagaaaaaagctgaaccaaacagccccataatatttagatgttgttgtcctcggccataccaactgagcagcatgggccaagaattgaactgatggaaaatatgtatcattaggacaaattccgccagaataagttgttcctcggaagtgttttgagcacctccagcatcttccaaatatatctccaataagatattagtgggataacatatggcagatgttatcaaataatgtaaatatagatcgaacacgagacatgttttacgtggagaactcttgtatgaaaaaaaaatcatggatgctaactcgtgattttcattgtattcactatactagtaaagttcacaaaacacggaagatgagtagtcgactcttgatgtgcg

SEQ ID NO: 103 - DNA, 1505 bp, Zea Mays
acacctctctccatctcttccttcccgccgggagtggaggcttcttcaggggatacacaaagctgtgcaagggcctcgccgtcatattgctcattgtgcaccttgtagtccagttgtttccgtccgccgtcacctatctcgcgcttatccctggaagaacgatcccttttgcttggaacctgataactgcaggctatgtcgagcaaacaattccagggatggttgtcagcatcattggccttcttttatttgggaagttgttagaacctctatggggttcaaaagagttatcaaagttcatttttatcgtcaacctttcaacttctgcttgtgttttcatgactgctattgtgctgtactatataactcagcaagagatctacctctatactcctttttctggattttatggggttctatcaggattgttggtgggcattaaacagcttttacctgatcaagagcttaatctttttgtgctaaaaattaaggcaaagtggattccatctcttgttgcattgatatccattcttggaagcatcttcatatacgactttatgtcttacctcccagttctgttgtttggcatgtatatgagttggatctacctccgttactttcaaaagagacttgagaccagcctgaaaggggatccaagtgaggagttctctttctcaagcttcttccctgaatttgtaagaccatttctcgacccaatagcatctgtattccataggttactttgtggaagatctgatgccaggggagaaacattagacacctcaccattacctggttcagattcgtttgaggcaaacaggaggagagagaggggtcaacgggcactggagcaaagattagctgagaagctggctgcagtcaggagttcagagggcggcacatcactggatgccgctgacaaagtttgagtcttctatgcaacgaacaacgagctgtgcggtgcagtttgtgatttcctggcaattcgtttctatgtgatttcaccagccccagcctcaccgccgagtgcttcattttttttatggtttctcatcctaatcatcatcgggaaccaactaatgaagcactgcgcgcccattttccccatggtttctctgtaatcaactagaagtgatcaagtaccaagcagtgtacaatgcgatgctccctaggacaagaactcatctatgttcggtttcctgttttttttcttccaaatggtgcggttgatacttgatagtagttgacacttgacaggaacaaaattatttttgtaaccttttagagctctgtgttggatggcaaattgacggtgctaacggtccggccccgagtctagacggtccgcgcgcgtagtcagttagggttctgagtttcttgctacagttgttggctagattcgcggaattaacttgggagatttgtatgtaatgggttcagccccctcctctataaatatagaggaatacgaccgattaaacattatcaatcgaattaataatcag

SEQ ID NO: 104 - DNA, 3768 bp, Zea Mays
agaccattcaatcaaacaacgacggcggtgcgctaatagacgaacgggatggaagcagaaaagtgacggcaagtaaatgacgagtttgacggactcacggtcttctcttcaccggcggtcaagctaagcctagtgctgttctgtggatgtaacggtgctgtaaaagggtttataaaccccataggaggtcagccagctgagtatccagtttaaagttcagagttcaatctcacagcaccaagcaaaaaggaagcagatcaagggtagccgagcgagcagaggttgtcaattacgtgtcttaatgagtctctggaagcagccgtcgaaactcgccatggttgtagtactgctgctgctgctatgtcatgcagtggacaaagtccattgctcgacgcaccataacaacagccaagattttcattctctgctagagttcaagaagggcatcaccagtgatccgcacggagccttgagcaattggaaccccagcatccacttctgccattggcatggtgtgaactgcagttccacgcgaccatatcgagtcacggagctcaacctcaccggccaaaacttggctggccaaatcagctcctctgttggaaacctgaccttccttcatacccttgatcttagcaacaatagcttcattggccccctacctcttcttaacaagctccgaaacctggacttactctttctgggaagcaaccatttggaggatgttattctagattggcttacaaactgttccaacttagtctacctagatctctctaaaaaccatctcacgggtcatattcctccgaacatagcctttcttaaaaagctagaaggtatcaacctttatggtaattatctcagtggggtcatccctccaaccttaagaaacctctccacactattgttagttgatctttcaaacaatcaactaaatggaagcattcctaatgaagtttggcaaataccgaacatacaaatggtaaatctagcaataaataacctatcaggtggaatcccagatactttcactaacttatcttctcttatgatattaggccttgaccacaatatgctgggcggcacattgccatcaaacattggtgatgtgctccctcatctgcaaggactatacttaggaagcaacttattttttggtacaattccaacttccctaggcaatgcttcaaatctagaagtcgtagacctaccaaacaaccttttcagtggcacaatcccaagttcttttggaaacctttcaaagttgcagattctaaaccttgaggtaaacatgcttgaagcaagacatatgtctcataatcatctacacggacctataccaaattcgattgctaatctgtccactagtcttcaacaactattcatgggttggaataacctttcaggaatagttcccccaactattggaaaacttagtggcttaactaaattatcactagaaaacaacaacctcataggtaccattaaggaatgggtcagaaagatgacaaatctacaagttttaacactacaatcaaacaacttcatagggaaaattccaccttgaattggcaatcttacacagttggcacgtttctctgtagctagtaacaatttcttcggttctatatatgggtgacaatgggctctaacttttacaatataagatttaaggattggatcggattaggatcgggtcctattactattcatttttgaactaaaatttatttagggccctaccattttgtgaagaagcatttggatcgtgatccattaccacccctagttctataccatctaacttctgtgatcctaaattaatgacaaagttagaccttagccataacaatttctaagggagcatacctgttccctaaatcttacttagaactcatctcgctaaatctttcatcaaacaaatttagtggcgaaattcctaaaactttatgaagacttgaacaactaaaggacaatcaaatggaccacaacattcttactagaaacattccgtccacattcagcagtctacacagcttgaacttgttcaatctttcccataacaatttatctggtcgaatgccaaattttctaagtggtctaaatcttagtaaactagacctaccgtacaataataatttccaaggagaaagatcaagaactggtctatttgataatcctacagtcatatcgctagatggaatctgggattgtgtggaggagccatggttttgcatatgcctccttgccatgttgcttcaagaatagtagggagtgcaacattattgatcaaaaatattgatcccaatatttgggttcatgtctctcgtattgcaggtgtagttttactcctagaaaagaggacatcaagaagagcatatagatcagagcaatcttattatgagcattttgagaaagttacctataacgacttagctcaagcaacacatgacttcttagaatccaacctgattgggagaggaagttatggttcggtgtatcaagggaagctgaaggaaggcagaatggaagtggcagtaaatttttttgacctagagatcagaggagcaggaagaagcttcttgtcggagtgtgaagcattgagaagcattcaacactggaatattcttcccatcatagtttcttgttcaatagtagataatgtacgaaatgttttcatagatttaatttatgagtacatgcctaatgggagcttggacacatggctacatcacaaaggcgacgaggaggctacaaaatgtcatggcttgactcaaagtataagcatagctgttaatatagctgatgcattggattatttgcaccatgattgtggacagcaaactatttgttgcgacttgaaacctagcaatatccttctagattgtgacatgaatgctcttttgggagattttgaaattgcacgtttgtatcatgattccgagtcaaaatggacagagtatgggggaggtggtcatgcatcaacgtctggggatgtttatagttttggaatagtgttgttggagattttgacgagcagaagcccaatagatccaacgttcaaggacggctagggcatcatcaactttgttgagaataactttccgaatcaagtatttcaagtcattgactctgacctcctagaagaatgcaggaactcaactcaaggaaataatttggtacaagaaaatgagatctaccaatgcttggttgatctactgcaagtcacactttcgtttctctattcattaccatctgaatgatcgaacatgaagaaagtagccagcagaatgcatgcaatcaaaacatcacatattgggtggaagcacatgtaacaagagcaagggtgttccctaaattatacagtaacatacttaggatgggtcatagtcgaaaatgaccagtggcatggtggtacaggcagttagtaccgaccgggctggttccaatgctggttagttcgatcgactagtcagtagggctaccgaccagtcgacccggttgatatcgtccgcattggaacaaaatcggtcggtaccatcccgtacgctggtaacctagtcgatatcgaccctgaccggtcgatacttactgtctattgccatgtggcagttcctgactatttcacaccattttgaatttcaaaaaaataaataaataaagcttttttaaaaatctataatatggcatataaatagaggagtgtttgagttcattcacaccccactctccaaatcgcttttaacactttatattgcactcctctca

SEQ ID NO: 105 - DNA, 2659 bp, Zea Mays
gtggccaagtacactcacccgctcgcgcgcgtgagcgatgaaagctctcgcctcgcccgccgcctccttcctcccgggtatcccgagccctagccatctcgcgcgcgcgcttccccgatccgcggcggccgcgctctcgcggcccccttccgggcgctccatcgccgccgcggccgcggccgccacaggggaccactggggcgccgaccaccagcactaccacggaggacgcgcgggcgcgtcggaggccgggcctaccgcgtcggcgcgcggcgtcaagtgcgacgtggacgtggtgtcgtggcgggagcggcgggtgctcgcgtccgtgcctgtggccgccgacgtcgacacgctgtggcaggtcatcaccgactacgagcgcctcgctgacttcatccccaacctcgtccagagtgtgacgattccgtgtccgcatgaagggcggatatggctggagcagagaggcctgcagcgcgcgttgtactggcacattgaggcgcgcgtcgtgttggatctccaggaaatccctgactccgataagtgggatgggaggtcctctagtgcagttttgctgtatgaagttaatgtgataccaagatttaacttcccggctatatttcttgaaaggattataaggtcagatcttcctgtaaatcttcgtgccttggcttgtagagctgaaaagatttatctggaaaatcaaggatgtggttcaagaaaattttttgttgaggacttgaagccatcatatacttctcagcttaataacttccatagtacgacagttgagacttctaagtttaaacaagcacctcccaggtctggtgttagcagtgtgcttccttcaccttcttctgaattgattagcaaatggggtgtatatggaaacatatgcagaattgataagccttgtgtggtagatgagatccatcttcgaagatttgatggcatgttggaacatgagggggctcataggtgtgtttttgctagtatcactgtgaaagcaccggttcgagaggtatggaatgttctcacagcatatgagaatttgcctgaattcgtaccaaacctggctatcagtaggattgttcttcgtgataataacaaggttcggataatgcaggagggttgcaaaggcctgctttatatggtccttcacgcccgtgttgttatggatcttcgcgaaaaacatgagcaagagatcagctttgaacaagtcgagggtgatttttacacatttaaagggaaatggcgcttagaacaacttggggatcagcacaccctgttgaagtacatggttgaaactaagatgcatagggacacctttctctctgaatctatccttgaagaggtcatatatgaagatcttccatcaaacttgtgtgcaatccgtgattatattgaaaaggctggagccaagagtagcaattccacagatccagatccagatgttgatcatgatgaaagcaggcaatctgagcaaacgtgtgtgtcttgctcatccagtaccatgaagcagagaccaaaagtcccaggattgcaaaaggacatcgaggtcctaaaatcagagcttgataatttcattgcagagtatggtcagtatggtttcatgcctaagagaaagcatctccggtctcatggaagagtggatattgagaaggctataacaagaatgggtgggttccggaagattgccagcataatgaacctttctctttcttacaaaaatcgaaaaccaagaggctattgggataatctggagaacttgcaagaagagatcagccggttccagaaaatttgggggttggatccttcttatatgcccagtagaaaatcttttgagagggcaggtcgttatgacattgctcgggcattggaaaaatggggtggggtgcaggaggtttcacgccttctttctcttgaactaagatatcctagaagacaagcagacccggacgatgagagacagtctgaatccccgtctgggatgatgaagaagcacggagtgaaacctgatgaaggcaatgtttccccaaatgcgcagaaatggctcctgaagctgaaggacttggatgtcaattgggtggaatactaggtttagctttggaaaaagatatggtctctcatcatgaactcagctctttcctttcttcggaggtgttctggatgcattccgacaaagacgccgcagattgtgtacagaacagcgcggtgcacgggccaaccccattctgaaggcgagctaccagcaggcaacatgttttcttgccagtaatcacgactcttggctactactgcgtatctagaactgctgacaatactactcagcttcttttgcggtcaaaccgatccatggttttgacaaagtcaggccataaaatgcagaaaagggtgtcgatttcgtgcgcctgttcaaagctgttttgagtcagccacgcctttgaaaaatctgaggtgttcacaggttggtcgcctactttgttattactggtgatataagttgacctggtccttttgaaagagaaggtttacccgtctagtaatagtttcagtcggcacgtttgcattacattggtctcgatcaggaggcacagctacatactttacgtctttacctattgctgcttcaattcttcatgggatgaatgaaaccgac

SEQ ID NO: 106 - DNA, 831 bp, Zea Mays
atgcccccaaccctagccgccactaccctgctccctctcccaagccgccgccactccttctccctccccctttctctctcttctctctctaccgccccaggccccccgatctcctcctcccactccgatcgcccgaccgatcgccgagcttccctgttccctccccgcccccgcgacgccatggagccgccgcacgccgagcaggccgtcgccgtcgcacgctgagcaggccgtcgccgctgtagcagcaggaggagaggatctatggccggacgaggcggactgtggctactacctccgcacgacgctgcgacgggcgctcctcagatcggcagagacctctttcgaacgcaagtagccgggagattcggaatcccgcgcgcgagttgggcctggccagcagataatcgaattgctttgccgtggaaacaggagaaggctgcaattgagtatattcattctttatcaagggcacagcctgctcgttctctcaatggtgctggcctttgtcctgctagtagatcacttagcacccaggccgccactacgtcaagcacaccacagttgaaagcacaccccacgtcaagcagccaggccgccactacgttaagcaaaacagaagacgagaagaactgatgtagccatgttcatgcttccactgttgaaatgcatattcagcatagcttacttagttcctatctgctgtttcaacgttgatttaaaagaagagctggtagttgtgagctatctgtaaatgatctagttgtgaatgatattataattgtgatgcttttgtgaatatataattgtggtgcttttgtgtttatgtga

SEQ ID NO: 107 - DNA, 1092 bp, Zea Mays
gggtgttcggctgcttacattattggagcacttgtttcatggcgctgtttggttgtagtaggattgataccttgtgctgtcctacttgttgggcttttcttcattccagagtctccaaggtggctggccaacatagggaaagaaagagaatttcatgcttcattacaggagtttaggggggaagattctgacatttctgaagaggctactgagatcaaagattatataaaatcagttcgtcgattgcctaaggccaagattcaagatttatttcagagaaaaaatatgtatgcagtcacggtgggtgttggcctgatgatttttcagcaactgggaggaattaatgccttaggtttctatacaagctatattttttcctctgcaggattttctggaaaacttgggaccaccttgattggcgttattcagattccaatcacattctttggggcccttctgatggataggagtggaagaagagcccttcttttggtctcttcatctggaacatttcttggctgctttctgactggactatcattctattttaaggtatactatgcggcgtactcagttggaatgggcccagttccttgggttatcatgtcagagatattctcaatcgacatgaaagcaatcgccggagggtttgtaaccctggccagttggattggttcctttgcgatttcatactcattcaacttcctcatggattggaaccccgcaggcacattctttctgttctctgcagcgagcctggtcactgtgctgttcgtggcaaagctcgtgcctgaaactaaaggaagaacactagaagagatccaaacattgctcaaagccacatgagtggcttccattcgctcagtaggtaaagatccagttaaaaaaatgctgtaaatattcgcctcttgtaaattattgtgcatggcaggtgaatgatttcgcctcttgtcgattctcctatattttagtctctttgatatatgttatttaggacaaagatacggtctacaacatatgcttatcttcaactatttcattttctgagttttctctctgctactatacatcatcagtttcgacggttgtctt

SEQ ID NO: 108 - DNA, 1072 bp, Zea Mays
aaagctaaagtgatttacacacaatactttcagaaatgctagggagaactgtggtggaaagtatagtgctccactgaatgctgtatgtgcagaggctgtccaagctatcaacaattgcacacgggatatcaataagcaatacatcttggatcctgcttgcccggatgatgatctgttgagccccaagactgtagcagagacagatggaacgagcaggttgatgctagagtctgcagattttctacttggttccaaatgtgcagctaagttccaaagatcatatcctttaactaattcaatccccttgtccctacactgtcaagtccttgactgcttatctgacctacactttcctttggccgcaggaagctttatacattctatcctacgcttgggggaatgatgatacagttcaggagagcctcggtatccgcaaggggacaattggagcatggaaacgatacagccatgcattgccttacaattatgatatccagagtgtagtggattaccattcaaggctagccacaaaaggatacagggcgctgatatacagagcggcgaccacgatgctgttgtaccccatgttggcacacaagcatggattagatacctcaacttgacaatcgttgatgattggcgaccatgattcacaaggagttatgcgagcggcctaacatttgccaccgtgaagggtgctggacatgttgcgccgttgtataagaccttggaatgccaaaaaatgtttataacatggatttcagggaatcctctttgatgcaagtctgatagaatgacccatcggttatctgagtgggcgtcagccgtcaggaatcctctttgaagggtgaacgtgcatatgttgttgctatatgcatacatggggacatggggtgtaggggtgcttgtgcgttcgtacaaaaaataaagtgccaatttggattacttgtttggtccccatgcaggtgtatgtgcagttgcgtgtaaaaattctttgcataaaacaattataacttgcttcctaaatcttcatctaatcttgctgttcggtactgacacgctgttaggtggg

SEQ ID NO: 109 - DNA, 275 bp, Zea Mays
tggtagccgtcgcctctccctgctctgctcctctctctcccaagcggctctccctctctctcctcgcttctctcccctcctcttctccagccgctgctaggcaaccggccgccgagcagcgcagccacgctgttgctctcgccaggacgccaggaaccgctgccatggctgcagcaaatctgagcacagttggcttctttgcagatgcgggcgataaattgaagctgtgggtactctgttttctgaaagacaaatgatagctattcaaggagcta

SEQ ID NO: 110 - DNA, 1427 bp, Zea Mays
tccatcaccgtccccacgttctcctccctccgcctctcgctctgcgcacatccccatgcccacgccgagcgcttgcgcctcaccacccccgtcgcagccgcggccgtggcggcgtcgacgacctcccccgactttcccgccgtgggcgccgtcctggggaagcccacagtgctcgtgggtagtggccgagaagatcggagccgcggggttcatgctgaaggaggtggtgcgatgtccagctcccaggtcgtcgtcctcacgctcctggagttttggtcagtgagatgttcgtcttcgtgctcagcctcgtcctcgagtcgtcgcgcaaacagcgagagcagcgtgggtctcatcatcaggatcacaccaacaggaaatgctaggcgatgaccacgcttggtcaccggatgatcaagaaacaattcaacaagactccaagagctggctggcaaatcgattgcttggaacagagcttggcttcgattctttgcattttgcaagaatcgattaccaagataagaaaaggcgtaaagctggcaaaggcttgaggttatatggcgtggctcaagaactttcggttcatcttcacagatatttacaaatgtatttcgtgtcgattatagccctccagatggctttggctttgaagttttagatgaaaatatcttgcctgtccaggatgacatgccgatgtttgactataatgttgaagaacaagttaatgattttgttgctgcagccatagaacagaatcttggttccggaatatggacaaacttatctatcgcgtgaacaaggatgcacgtaaaatagaatttttagtaggtaggaggagttccttagggctgttcacgaccagcttggaagacccaatggcaattgcccagcatcatgatgcggtctcaggtatagcaaaacaacacacgacagatgactactcgaaatgccttgctcttggagcatctaagaatgaaagcattaatggtatatagttggatatttcattcagagaggctcaagtgatagctgcaagtagttctaccttgtgcccagttttcttgttcttttaggtcaatgaaagttcccatttttgtggcgttgcttagatggttggtcctttcctcaaaaaaaaaagatggttggtcctgttgactaccaaaatgacttgaacttttggtgcatggacaaatggactagaagctttcctgtaacgtggcacatcataagatgttggttgattctcctgaaagcagattttattttactttaaccaaaggagaaccaagttggctgtcgtctcccactgtggcactattttttgggttaaaagtataacaccatcgtgagttgaaactcttgagacatagagataaaaaccaataaaactcacatccgacgtgattagcatgaccattactcatcaaaaa

SEQ ID NO: 111 - DNA, 1189 bp, Zea Mays
gtacacgccaaccagcaccttttgcctaccccggcaccaccccgcctttgccttggtgttgaaaagtcgccgcgttcctcttgcctgatgaaatcaatcctcttctcgtctagatctgagcctccgcgtggcttccagatcagatgcttggtccgatcaacgacgaccttcagagctgcgacgttccggcttccgggggatctggatcttggctgactggacaattgcgaggcgttgacgggcttctaaagcgtggctggattgctggatctcctttctgccccgcgactcgatgatatctctttgtattggtaattattggatgaaatttcgataattattagatcggagagatgttggtcgcggcggtccgtgcctaactgaaggcaaggtaaggtccgagacaaaagaggggaaaaggatacatgaaaaagaagtgagatgtgacatcttgaaggcctttgccatgttgggtgcgctcgcatggcaggcatcgtaataaagatgttggttttgtgtgctgggtgggagatcgcacagggaattgtttttttcatccctgggttctcccgcccattgtgtccctgtgccctgcttcgtgttgtttggcttctcgtcctacgcttcatcaccggtgctgctgcaaattgaacggcgtttctcgtctcacggcgtgctgcaaattgaacggggctacatcgcaacgcaacacacaagattaactgctgtgccatatgaagacctcctgcctcatcacggtgtttgtatataagatcaactgcagtgcctacacggtggacggagtatttgtatgatgtgaaggtcactattcagcatcgtcagtatgaaatggctatggccttcaaagctttctttcttggtcaccggacagggaagaaatattctgctcaagctcacaattagatacaagacataactcagataagagcttgttcaacttgcactatagttcatttgagtatttacctattattgatctcttgagttgaagctaggtttcaagtatctcctaaggattcgtatatgtgaaaaccagggattctcttttttttttgcactacaatctgtgacgttttaatatttgatgactagttgttcatgcattgctattgtatttgcatatcccctaggtttaagagcatttctaacaaggtgactcaatgatgtc

SEQ ID NO: 112 - DNA, 874 bp, Zea Mays
cactgctctacatacctttgagatcgagaggtgctcccatggtgtggtgatgatggaacgtgtgaactaactgcttcttttggttccaaactataagacggtttggtttttccggataaattggttggctagggattgccgccccagctggctggttatatattaggctgtcgccgccaaagaaagaaaggcctgcttcttcacctcgcgctccaggttcatgttttgagcgtgtacagtgcatgtggtttcagaaatggggacgctggcgtgcccatggagatctggccacctctttgctttcatcaccttcgccgtgctgttcttctcgacttcatttgccgggagacagtacagtttcttgatggatcaagatgccctacgtcaacaagaaggagagggagcacgaactgagcagaaggaagcgctagtgccactggtgcaagctcggcggctcagcgtcaagacgaacgattacagcagctatgacccttccccgtccatggacaagccacactccaagctcataccgaactgatcaatcatgtacccgtccaggttgcagcagtcgagttgccgatgagaaatttaacagcttaaatgtgtgcctgatttatatatacagaagcattatattactaggcttgcttaaactgttctcatgacatctaatatcatattattatagatgtgacatatagatgtttacttcttctttgtattcatacgcagtcacaggcttcttctcaagattagatcaagtagttagtataataagagtagcaactactttgtcaaactctgaatgcaagtctcctaaacaattttaacaacaagctggttctactgccagagcattcaaccacacaagagg

SEQ ID NO: 113 - DNA, 1398 bp, Zea Mays
gacacacgaaattctcaggtcccggtcccgggtccaggcacccttctcgctcggttgctcgggagctttccccttcctgttcctgaagcttccgacatccgaccgcctcctcctcctcgttctactcgccgccccttctagaatcatccagaggcgtgccggtgaagcgcgagagcggtgaggcatggcgatgcagacgggggtcgcgacctccaaggtcctcatcctcgtcggtgcagggatgacgggctcgatcctgctgcggaatggccgcttatctgatgtgttgggagaactccaggagattatgaagggtgtaaatcaaggaacttcttcgggtccctatgacattgcacttattcaagctcagattcggaatttagcgcaagaagtcagagatttgacattgtcaaagcccattaccatactgaatggcaaatctgactcgggaggcagtttatcatcctacatactgccagcagcagcagttggagcaatgggttattgctacatgtggtggaaggggttgtctctctcagatgtcatgtttgtcacaaaacacaacatggcaaatgctgttcagagcatgtcaaagcagttggagcaagtttcatcagcactagctgcaacaaaaagacatctaactcaacggcttgagaatttggatggcaaaatggatgaacaagtagaggtctccaaagctattagaaatgaggtcaatgatgttaaagatgacctgtctcaaattggatttgatgtcgaatcaattcagaaaatggttgctggattggagggaaagatcgagttacttgagaacaaacaggacgtggctaatactggtatctggtatctctgccaagtagcaggcggtttaaaagatggaataaacaccaggtttttccaggaaaccagtgagaagctgaagctctcacattcagctcaacctgaaaacaagccagtgaaggggcttgaatttttttcggaaagcaccatggaacagaaagtagctgactccaaaccaattgcggtgacagtcgacgctgagaagcctgagaaaaccgctgctgtaatgggcaccacagtgcacaggtctatcaggttctcatatcggaaggcaggccttgctttgtgatcaaatcctctccgcttgagatgcacgtggccttcctggttgctttgtgtgatggtcagaaaacatagaagaataacctgcaactggagtgacagaatttcttttccccgcagtagacaggtgtgcgttatttggttggaattatctccagtccactatcaattttttttccttggattttgattcattttatgtttcgatttgttgccttatatactgtaaagtcattggaaagaataaataaaacacgaatgttttttgtcaaa

SEQ ID NO: 114 - DNA, 3478 bp, Zea Mays
caaccagcagtagttctgatgagtatcctgactaaaacaacattgaacagagtttccaaatcaaataggtacaaaaggttcaacttcatattgctccatagccataactgtcaagatttacagcaaaatcataaattgtgaaaggttgcggtccttgtgatggtgtggcataactattcctcctaaataacatgcacttaacatacacgagacctaagccaacatgctacagcttactcgacctttcccttccccttggaatcatcactcactcgagaggatgttggctggttgatactcgctttggctttctccaggaaggtgggatctggctgtggctcttggtgtggagtctccttcatcgccatgaatatgtaaaagccgatcactagattaactgatatgacagccaggaacccactggcaagtgtctgcgccgaggatgacatctgactcacctggaaacacctggtagtaaaacccatacatgatcgcaacaggggccatccacatcaccatggatgtaaccgcgaactttgtgatcactcctgacattgcttctcctgactgggatgcgacaaaagatgaagtcagttcaatttccgattggatctccgctcgacgctgggcctgcagaggtgagggcagcaacggctcgaatcccggaagaactccttccgggcggctagtagagtgtggtcactggccggatgagattcgacgccgagagatagaagaagcgacgagaggagaggagcggtggctgcggagtcgtcgacgtcgattggatcggaacccaccacgacggggaaagagacgcagactggatcactggaccacaacagtaggccgtctcgaatgggccaaaatttctgtttgggctacctcgctcattctgtcattcatgggatgggaggatcctttgcaatctggaccgttgaatcgcgcttgccgttgccgaatgtccacctccacctgatggcagcggcgaccaaaccaccgagtgagacagggagaagagatgctgctccgcgttggcctcgcgcgcagcgcccgccttcgcggcggcggtggcggcgtctccctctccttagccatagcgcggcatctctccttcgagtcgccgccaccagtgcccccgtcccggcccgaccccgagtggacggacacggtggactacctggacgagtcgggcgcgctgctctcctcggcgcgcggggcgcggccggccgtgccgggcgccgaccccaccatcctatccggcgcctccgcgcacccgctcccgcgccccgcagcggcggcccgcctcgcggcgctcgcgctccggcaccgatcgggcgcgactctctccgccgcgctctccgcactgccctccccgccagaccccgcgctgctcctcctcgcggccgcctcgctcccggcttccgaccccgtcccgctcatctcccttgtcgcatgggcgcgcctccagccgtggttcgtcccctccgacgacctctcctcgctcctcgccgcgcgtctcccgccggcaactcactcctccgaactcctcgcgctcttcgacgacaccctcgggctctccgacctcgccaccttccccaagaccttcaacgccgtcgtctccgcgctcgccacccacggccttctcgagccggccttctactgcttcaagcgcctccgcgacgtcagcttcaggggcctcgagacgcccgcctacaacgccctcctctctctgttgctcaccagggggcttgcattcaaggccttcgaagtgctcgacgaaatggcgacctcgggctgcgccctcgacgagggcacataccagctcgcggtgcctgcgctggcgcgcgccgggaggatcgacgccgcccgcaagatgttcgatgaaatgaagcaaagggagggaattgggcgggcgccggtgggcgtgtattcggtgatggtggacgtgctggccaaggcagggaggcttgatgcggccatgggaatgtacagagagatggtggtggtcgggcatcgggtaagcacagcagtgagcaccgccatggtggaggcactggtgagatctgggaagctggatgctgggatggagctttgggaggagatgaggaggggagggctccgaccaagctttggcttgtacacgatggtggtcgaggccaatgcacggtctggaaggttggacatggccgccaagttgttcggtgacatggagaagtctggctttttccctacgccggccacatatgcctgtctggtggaaatgcatgcctccgcagggcaggtggatgcagcaatgcggttgtatcactccatggcgaattcagggacaaggccagggcttagcacgtttacagcgttgctcacaatgctggcgaataagagtctgctggatttggctgcaaaggtgctgttggagatgaaggcgtcaggtttcccgatagaggtgaccgcaagtgacctgctgatgatctacatcaaggatgggtcaactgaccttgcactccggtggctacggttcatgggttcggctggcataaggaccaacaacttcatcattaggcagctgtttgagtcttgcatgaagacggggctgtatgactcagcgcggtcgttgcttgaggcttatgtcgctggggcagccaaggtggacttgattctctacacatccatcctcgcgcacttggtccggtgccaggacgagagcagcgagcgtacaatcatggacatcctgggcaccagcaagcacaaagcacatgacttcatgtgcgggctgttcactggtccggagcagcggaagcagcccgtgctctctttcgtgcgcgagttcttccagggcatcgactacgacaacgaggagagtgcagccaggagcttatccgtgggcgcagctctcgtggctaccgtgcacacactgcatcggttcaggaagcggatgctctactacggggttgtgccacggcgcatcaagctggtgactgggccgacactgaagatggtggtggcacaggtgctggcgtcgctggagtcgccgtttgaggtgagcaaagtcgtcttgcgggcacccggcgactcggtactggagtggtttaagaagccgattgtccagcagttcctcctgaacgagataccatccaaggccgacgtcttgatgcacaggctcaacgtgatgtttccaagttcggctccggaggtccggtccttgtccattccaagatcccttggcatgcctaggtgataacacgacagaccttgttgcttgaacactgcaagctgaagcatagctcactactcagcggaagtaaacaaaacgtgagacgaaaccagtggaggacagggtgtccgctcatcctcgcgtgaggtaggactaggatgtgtgcgatttgtttttttaattatgcaatccatgttgggataaaaaatgtagcagggattagttttataaagaaaaaaaattaaattactccccttgcatatg

SEQ ID NO: 115 - DNA, 1166 bp, Zea Mays
atgtgattatcagcgtccctgccaagtggggcagccgagcaagcaagcccacttcaggcgagtccatgaggaccatgaccacgaggcggaccagcccaagcccatgaacgcgaaaacaaaccctagccacgaggtcggcagtcggctcctcgaccggacgacgtggctgcgaatctgcaggaggaggaagaggtgaaatggtgaaggccgcgacgtggctcctcgatcggctcctctacgtactcaagcaggacaagggcaacgacgccaacaccgcgcgtgaccgacggcgaaggaggcgtgctccggccggtggcgccgccaacgccgttggaaacgatgatggcgaggagcagcacctcaacacctttctcgacgctgcgaatgcgtcgtccgcctcctcaagggtgcagttcaggaatatggcgtcgcgcgcgcggtgggtggaggaagccggcgctgcggaggtggtggagaacaggggcaagctgtggctgaccaccggtgtcactcgggccggcaagctgtactacaacgttgaggagaccgggttcttggccgaaatgggtgccttgattcttctcaatgataaggatgagacgataggaattgaagatatctatgggaagcttgctggaggaaattatgggtgctcctgggataccttccaggcatataagcacttgaaatcacttggatatattgttggaagatttggtgttccctggacaatgaagcatggtggtactcatcacaccattgctccccagatcaatatacttgagactgatcagagcttaaatagagttgacggagcctccaatgacataaccaaattgctcaaggaaatacagattgacgggatatgtccatcttttgaagtttatctgccaaatagcaagttcaaaaagtcatccccagggtgccctagtttcctcttatgtctattaaggtaatagtagtcctttatcgactcagttaattttatgatcatagatccaatgcagtttcatttttctgcaattcatcttctgttgatctttcagtattttagtgtagggtaactaggtctatcttctaatcagggttttctttaattgtgtaattgtctgtctgtaaatatgaactcatatacaatgttagtacaatatcttcttgattggaac

SEQ ID NO: 116 - DNA, 1288 bp, Zea Mays
gaggagagtccaaatctaatcgccgggtttaggcagaaggggtgggacgcggcgaggtttaggcggggtttgttttgtccctttcgtgcgattctgctctccgcgcgggaggcaagtactgacggaagcgaagaccaaggcggaggagggggtccccggcggtggaagtggaacgcgccgatgcgcaagtttcaggactccatcaaggccctccaggccgacatcgatcatgccaatgcgatagcagggtgtcggaattcttgagggactacgatggctcggtcatccagatgcgggtggcgtacagcgccgtcgcgcatttcctcctgcagtggaccgactgcaagctcgccggcgcgctcggcctcctcaaggttatgctatacaaggtgtgcgcggacggctcgtcggcgcttcctgattgggacatggaggccagcatcagggagttttacggcgtcattttcccgttgttgctgcagcttccgagtggcatcaccgagctggacgacaggaagcagaggaagctctgcctcaagaaattcaggagcagggatgagcagctctgggaggtggacacggagagggagcttgagtgtgggatctgcctcgaggaaatgacacctactctactccgcagcttaaaacctcaagatatgtcggtaatcaaacaagtacaagtttcaaggaaatgggaatttcatggaaatacagacattgggtccatattacacattgatatgattttggctgacaaagagcgctgtctgaggtgcgtggtcaagtcgaggcgaagatgagcaaggaggatgtgctcaaggtgcagttcttgatttcagatctctgaagccaattacgtacacattttcctaccacgacttttattctgctttccgtttctcaacgtcttggacattgccggcgagcgcggtctcctcgacaacttctactgctaactcgggtgcaagatgcccagcaaacttcccaatccagctgccggcaaggagatgaggttcccgacggcgacaattttccactacacaaccggattcttcagcagcatatggatccgttgaagcgccgtgtgacaatgccaccaaagagcagcaacaaacaagctcaaagtctccgctaaccactaatctcataaagcttgaattttctcattgctatgtttccttctcctagcaaagttaagatgtttgcacatttctagcttattaggtccttgtgtggaatgtgtttgaacaatgatctcatttaaacaatatcaacatgtgtgatatat

SEQ ID NO: 117 - DNA, 2413 bp, Zea Mays
ctgtcacctaaaatctaggatatattattcccccaaaacaaacactaaccggccggcccaattctcacgcgctcgccgcctaggagcattcacgttggtggcgggcggtggctcggttcctctcctccaccgcacctccaagaatccacctccacgactaagctgacggctcggcggcgccatggcggttcaccggctccaaccttccctctctggcctacagtgctccaccgcccggtcgccagtgctcctccatgggccacggctgacgggtgcacgcaccggtatgcatcccttgctgctctaattcccgacgctctagctcgtgtaccagatgtgcagactgtcgcctagccctgctccggcgtgaaggacttctgcttctgcccctgcgcatcccgcccttggtcgcgcacctcggcatgttcctcggcccgacggctactgtcttgaggcatacggtggccgcccacctcgtacccagtcaccagatctcaagttccacctcaaaatccagatcaagtgaatgccatgtttcatccttggtccaatcggttcttactggaatttgttggcaggcaacgagcacccaccaccggttaagtctctccccttcggtccttcctccctttcttctgtgttaagccaccgagcacccaagcggtttggcctgatgccacatctctggtagctacaaacctacaagctttgacaaaagatgctatgattaggccgatacaaagttgtttctgcttctttatctctgtatcatactagcacttattaggttgcaactcgattgtttaggtactagatttgatctgattgtgaattaccagatggttggtgcaggcaggagaggtggatttggtggacctagattcgatgtgcagagagcgacttggaggttatttttccagcacttgacattcgagtgaaaaatgtcgcagggacatattctcttgaacataaaggagaaaattatctcttcgcacatcagacaaggcttctactctttcagaagaaagtcattttcaagagaatcttgaacaaaatgaccagatgtttaggcctggttggaaggacatttttcgaatgaatcagagtgagctcgaggctgagattcgaaaaggtctctcgagattctactcttgatccaaggaggaaggcctatctgatccaaaatctcatgaccagccgttggatagctgctcagcagaaatcaccacaaccaagcgtcgaaggacataatggatgtacacgacgacctggatgtgttccttcgtaccgagacccagggaaacaaatatttggctgtgagcattacaaaagaaactgcaagcttgttgctgcatgctgcaataagctattcacttgcatattctgtcacgataaagttagtgaccatacaatggacaggtatcttcaccacaaccattcattttaccgtccacacctttcctgctgagggatgctttcaaggatttcattttaacatcgaaccaatatcaattaagcatggcattttatttggaaatagatgtttgtggtggtgccatggacctgtgcgtcccttgtgaaatgaattgattttttgtcattgaattttctaactgaagctttttcattcgtttgattcacttgagctcccttaagttgtattgtattatttaatcataaatgccatccttcctcttatagttatataatcaaatattagttttaatcctatctgcatggtttacaatgtattgggttgtgtcattgtgtgaagaatgtttggtggttagtctgaccacatgtgttagctgaatatgagtgccgagcagtagcatgcatataagttccactgcattcaatatttacatttttttcttatttccaggtaactcaagaggtccacttattgactcttatgaccatgtaattggtgttaatacaactacattaacacgtaaaggttggtagatctggaaggtcttgatggtctaatacctgtctatgagtacgaaagaaaaggcgggagaagtcggtctctgcagcatcgcgcgtgaaaaaaaatcagccaattccatgagcattgatgttgtcatgacttcaaggagagaccatgctaagaataatgcattatgacatttgtcaggcttacatatcgattgtttgatatggatagatgtataggtttatgaccaatccagttcaaagcaatttgagtacaaaagaaataaggagcaggaaagctctgtacatcttgcattttgctgtttttttgtcgaagtttcaatgtctgtcgcgtgacaaaatatagttgtaatttatattttggcatgcacgaaacatgtgtatttattcatttttgaacgaaattttacgtcaaatcctctattgcgttatatacgaaattttaacgcgg

SEQ ID NO: 118 - DNA, 1847 bp, Zea Mays
tgccgctcgtcgactccgtcttcgtccgcgtcgactgcgtcatccccgacgacccaccctcttcctcctccgcgggcgccgcaccgggctccccgccgcaccaggcgccggcgccaaccgcgcgcgggcgcggcgcgctcgcgcgcgtcgcgcgcgccctgctcggcggcgtcgctaggcccatccacgcgctcggccagatcctctcctccgccgcggcgaccgtctcccggcgctccgagccacttcccgcttccccgccgcccgcgcccgttgcggacgtctcccaccactcgccctccgaggtgctccgctccttcagggagctgcggcgccttcacatcgagctgcccacgggcgagctcggcattgacgacggcgtgctccttaagtggaaggccgacttcggctccaccctcggcagctgcgtgatcctcggcgcctcgtcggtctcgtccaaatcgccggcagggtccgctcaggcggaaactgctgcggccgacagcgcggccgccgctcccgataccggtagggagactgaagagccggggagcctgcctgattctctctacacaaatggagggcttaagctccgcgttgtctggaccatcagctccctgattgccgcgtcggcgaggcattacttgctgcacccgattatctgtaatcacggaacgcttgagagcttggacctgacagatgccgacgggcaaggggtgctcaccatggacaagaggcagctgcaggaactgcgggtgcggcccgtctctccatcagggagctcgcaccgcacactcatgccggcactcagtatgcgtctgcactacgcaccactcattgaactgcctgggggaacgctgctgaaaggtgcaacactagtggcgatcagaccaagcgaggatgccttgagggagggccaaggggttgcaggtcctgctggtacatgctggatttcagaggcctttgaggagccatatcggactgcggcaaaggtgctcctcaagagaagggcatattgccttgaaatgaactcgttctgagcaccagggattcacttccacagagttctacccatctgacaggatgggggaagtgagatgcccttcggttaatatatgggaattcatcattcagtgcaaaaattggaccaactctccccatcattaatttatctgatctcggtgaagagatgacttcgtgtacctgtacctttagggttgtaattacagatacgtatttgtgctggactactacacgcggaacggaatgctatttggccgattcccacagagtgtcccatgaagagaagccgtatcacttgagcgtttgagcgtgacgctcctgggccaagctggcattatacttcttttctcaaaggaagcaccagagatttcgtttttagcagggcctttttgcttaaatcttaccgagtcatgctcctagcactgcaatactgcgtcaatttatactcattgttataaaaaaattatagactcgaatataatgtcccttttaagaaaaattatagtgcactctcttttttctaatgctttgtgtgcaccagatgaccagactgccatgagctcaccctcacctagggttaaatgtttcggtagggatttgtcaggaagcccaggtcgcagcagcagaagcggcatgtccaagtaaatgtggagcgtgagaaggaagaagtggttcaagacaacgattcgctgatgggccgtggccgtcgagtccgcaggcccagtgggcgctttccatctgatgtgtggaccaattgagtccttgtaattggcttataactggagaacagccaaaggaagaacttacgatgatgctaatggaaa

SEQ ID NO: 119 - DNA, 1195 bp, Zea Mays
agtccaccccagatggccctcaaagccgccgtctccgtcaccccgttgctgccgtcgcctcccctccgccgtctcctgctctccccctctcctagctccgcggcggctcgtaggatcgcgagggtttccgcggcgatggcgacgacagaggtgcacccagccgtggtggtgggcggcggccgcgtaggccaggcgctcgtgtccatgggcccgccgggaggtgacgtcctcgtgggccgcggagagaaggtacccgacgatgcgcctggaccgatactggtgtgcacgcgcaacgacgacctcgacgccgtgctcgaggccacccccaagtcgcgctggcgcgaatggaatgctggatccatggtttaagatcaagggcctagtgggtgcaaaccaggtgttggcctacttcgctgtatcaaaggttggagagccaccagtcgatgggattactgataccaacccagaggggttgactgctgcatttggcagctgggctcctgcagtggctgcccgcctgcaaaatggtggacttacctgcaaggtgcttgaaaaggaagcctttcagaagcagatgctagagaagttgatatggatttcagctttcatgcttgttggtgctcggcatccaggggctactgttggtgtggtggaaaagaattaccgatctgaggttgcgagcctgatagctgaattagcatcggctgcggctgcagaggagcagctcacattcgccgaaggcatggaggatcggctctgtgcttactccagggctgtggcacacttccctacagctgtgaaagagttcaagtggaggaatggctggttttactccctcaccgagaaggcgcttgcagcaggaaagccagatccttgcccactacacacagcttggctcaaggagattagggtcatataaattgttttcatgtacatgagcttcgttagaagcatgaaacagttgcatgttgcctatatagagaaaattgcttttgccacgttaaccttttggtatcgtgtgtcaaaacaaaatgcctgaaaggtttgctgccatccgtgtcgaaaggtcgaatcaaactgggactacacatgtattaaaccacatcatagaggccatgtaagagtatctccatgtaacacctcgttcaatctcggaccggcgatatttacttctggcagccctttaagatcatat

SEQ ID NO: 120 - DNA, 877 bp, Zea Mays
ctaaaacttaggtttcaggcaaatgattattatctcaaggaattaatagtggaatggtgtgaaggagttctgtctagtcgcagtgataatcaagatttttacaatttggatctacaacctgagactgagaggaaagaatcgttcaacctgtttcttgagaaagtcgtaacagtcttgcaaaaagatactgatcagaaccaaattgtcgatgttcgtggcctttcaaaggttgaagctcgaattgttgttctctctgtccttcggaagatcaaagagcaatacctcctaggaagagtggtccaggatgatgtggttatcatcacgggtcatgagaagacatcaacaactgaagctgaaaccacaactagtgcagttgacgtcgtgcaggcaatagttactgttttgacggatgatctgggtcttgaagttttgattggacctggaagctgccctcccgtttcatcaaaacccaaagcaccgactaaatctagaagtaatttagagcaaatatccaaagaatttactaggagaccacagggaatgataaaaatccctatcaactcacttaaccattggttaaggaagaaagccgtgaggattgcagagtgacatttccttaaaggcttaaactacctttttggtccatttagtataccagtaaatcagcacagctattccaggattgggtgtacatatgaaaacaggttactgctcctggtattccaggcacactgacacgacttgaaaagggacttgttggcaggcaataaactgtgcttctgtgttgatttaatggtcgtgtttctaaaggcatcaagcattcatactgttatatatcaatgtccagttcatttccattcaaaccgggttatcccat

SEQ ID NO: 121 - DNA, 4891 bp, Zea Mays
cgctccctccccatgaaacccccttcccccaatctacccctctctgtgcccccgacatccacgctgcctcagcccgccgtccagcgccctctctgcgcctccctccccacaccgcctcagcccgccgttcgccacgctccccacgctgcctccccccgtcgcccctccctcccgcgcggaactccgccatgctccccacgtcgcctccccccatcgcccaccagccgtcgcccaccagcccacactatctcacgccatggatggtggcaacagtccccgcccccgtacctcacacgcatcaggctgggctggccgatcccgccgccgcaaacgccgcgcccagccccgatgtcagcgcggcccgcccgccaacgcactttcggcctccccccgcccctcccttcgcccgcccacccgcaacctccgcgccatccgcaacctccgcccgcttctcacgccaccgacccgacctccgcgccatccgcaaccgtcgtgcgtcttatcccttctctaccgcgcactccgtgtggaacaacctccgcgtaggaagcctcctcccttccccatccccattccccaccacgcgcttcggggacggcgagctccgggcgggagcgaccgccgggcgcttctgctgctggtgcggaggaggaggagcggcgagggtggttcggcgcaggctccacggcggcggtgcccgagccgagttcgactggctggcgctctactgcaacctcacacgcggcgatgggccggacggtaacaatggcaagctggtcctggaggagctgctgtcgtgcgccgccacccaattttgttttccccaaatcctgagctgtgaagagaagaagaagacaaggacgcggcgagtacgatgacgagcgccgcacagcaagtcagcgaggagcacgatgacgcgatgaggaccacgagctgccgaggaagtcaaggacgacgacggcgcagagacccgcgagttgagacatcttcttcgccggcgtgaaccgcaaggctgagacatcttcttcgccgggttcggccacgccgacaccaccgacccgatgcctctcaaattgaaccgattgcttcaagggtgccatacatgattgtgttaaccatgagagggattggcctggcactggttcattctacgggaacctcgacttcggtggagaatgtggtgtccctgtccaaactgtgttctacactccaactgaaaaccgtgcaaagttctgattacgacatgtttagccttctgcattgctcacatggaagaggacttgagacccgggaccgagcagtacagattcatcgagcaatgccacattggcctcatgaagtttcacaatcacagtggtttttacaaggatttcagttcatggttgtacatagtttttttagttttttttttgaaaaatgaggcattttctttttaccggcggcggaggcgatggcaacaagcccttccctattcgaatctctgtgaccacagagcctacctcgctgagctcatcaccgagatcactggtgggatcaatgagctcgccgacgtagcacagttcttttgatgagagtggttcaactctattttgcttggttcagtggagatggtagcatggtgaaggataatgcctacgtgcgcagcaattttcatttttcttttagtttcttggagtcgtggaaatctcgctattcacaaggatttcatggcggcgttgttaatttgggggttgggcagaggctttaccttttgcgtcagacagtgctctctcacagcaattgtccttttgcctacctgtatcattctgtcatactatctgcaattcagctatgcacagaactatcaaaagcaagcaaagatgctctagagtacctgaggaaggctactttgtgctctataaggattgccaggaaagtgccagatttggcagagaacttcatgggcctggatgcatcattgttaaaggagaaacaccatgggtccttatatctgcaattcagctatgcacagaactatgcaaagcaagcaaagatgctctagagtacctgaggaaggtaagggcatctatttcttaccacaaggccccaacaaatataagtatagaactacagagctaggataaaactgttgattgttacagccctgggcaaggattgatgcttgctagcttcaagattaggaccctaccacttgatgagaacagatagtgctatactgctatgtacatctacatttctccagttatacataatcagatcttgcttctagccaactgttgcaaatacattgatcccttaggggttgagatggaaactgccacaagggagggaggacgtgagtcagctgcacgtgccgacatacacatcacttcctgcctcgctgtccttgatcgagacaaaatcagaagagctgtatctatatgtactccataccttgacgtatgcaggggctagatccataccccggcctatctgccctgtgaggaatgtatacttctgcaagtttgaatactttgacaccttgtgaggagcactctttgaaggtggagaaggtgttgttccaagggaagccagactaccaaaatgttatggttttttagcttctcaatagccggcgacagtgcatacgacctgccccgcgctggggctgtgtctgccttctcctccttcgatgccatgacactgtaaagtgaagccttcgagctaggcgcggaggccagggagatgctatgcgcccacatctaccacgccgccttcatattgctcaagctcgcgctccgcaactcctgccccatctgccgccatgagatgcccaccgatgctgccctgcgggctgccgccagcgtcggcgttgccgaacgcgccgccggggaggaacaagcgtgggatgcgccccacgcgcgcgactttcacctgcctcccaatttgatccgtgagttcaccaggaccagaacttcttcgatgatttgttggaccatccctgctgatacaaacacaatcattttgtggcaggaaatcaccatattagagcttacaaccttcgcatcaactgaagagtttgacactcatgatccaaaggagaacactttgctactcccttacttgaggaaaaggtcaaaaatcattgagatagttgcagcgcgtgatatagtctttgctctatcacagttaggagtatgtgctgcttttagtagcggtacgttcgccgaggacaagacaaaaccggatgctggtttccctctttttgactcaccatgtcaacatggcaatttcaggacccaacgtctctgcgagagaccttgggttcccttatccgaaggcaggcaccgctaagcctacagacgtggtggtgaagttctacgtcctctacgagaagtggcggaggggcgagctcctgggttcttcgtcagttgcgcggtacttgaaaagcatcactcattcgaacggtacgattattcatccttctggatcggagcgttctcttcatgcgtctgttgacgctctaagttcttgctacgtggacaaacagggcaacaagaatttccgggtgtgggtggacagactggtcacatcgccgatcggtacaagcaactggttggtgaggtttgataactgggagatggaaggtggcgttcggtactgctgccgcactactcttctgctgaataacaaggtaaaaattctctggttctgcgaggatcattgcttgtcctgctgttgcttagtttcgtgcacctgtatacataaagatagcagttaatttttttggcaaatcactgaactattgaaaacaaattgcatagacaatatttcttaaatttaattttggtccacaggcttttcctttctctttctctaaattcatgctgcaagaaatagtcttcaaacaaaagagaagagagaatctcgtactttggcctgaagctataagcaaaacaaagtgaattatttttgtcttgctctgttaggctcagttttgccatgacaaggcttaggggcagactatccccaacgtgggcatgtatttgcccaaaccagtactctcatggtcagttgtatgttgcgctatctagggccactgttagaccgaacatcaatatccttgcagttccaccctgtaaatcttacatttatattgcattactaactgcatttcagctaataggagtatgagataaaagatatttagcatttgatgacttgtggacatgctattaatgggatttactggttatatatatattaatgagtatccgtttgaattgtaagaccttgtgatatttcttgaagatttatataagtttgtaatttattgtgataatcttagcatttaaatgatgcaattgacatgacattattaaaatcatatatagaagtatgtatgatactgatggttgcaatgtagtggtgaaacaactggattaaaataacaaaatttatgtatggataggatcacaaatggattacgaaatcttttctcataacagtataacacacatttgtacataagttattatggtattatatgttttcgttgcaacgtacggacactcacctagtagatacattggtttcatatatctctactactctataagacaatagtgtagacgtacacacacattttggtgcacggttctgcctgcagtgcccgctctctctcgcgcccccgctctctgcgcccccgaccctgcccgcatcgccatccccgcgcgcaatccccgctcggctgctccaaggaaggaagggcgtcgtgtggagatcgccatccccgctggggcgttcctccccaccgccgccgcaatggaagggcgtctgtaccattcgcttccccggcagcccttccttcctcgacagcctgcccccgccagctccgcgcaccccgccagcc

SEQ ID NO: 122 - DNA, 1045 bp, Zea Mays
atgccaagtacatcaacgaaccccgacgatcacctagcgctcgtcatcgtggtcgtcgtcgtctatgcatgcgttcttgccacgggggtcgccatcgtcgtcacctccgtgcaccgcctcgtcgacgacacccacaccacctgcggctgctgcggcagcgttggcgaactgcagcctgagccggccgccctcgcgcgtggcctgcaggagctccttcccggggatcaccacctccagcagcacgaaccggccgtcctcccggaacgaccggaagcacacgtacggcttgccgccgcgcccgatggacggtatcggcggcgggaacgtctttggctgcctctcctccttcaccgcctcctcggcgtcgctgccgtccgccgtgtccgtgcccttgagcgcggcggcggcggcctcggcctcggcctcggcgtcgccgtccttgaacatgtcgtcagcgtccacggtgctctcggagccgagcccctcggtgcagagcagcagcgacgcggaggagcccttcttggtgcagaagctcgcgctcctcttcaccgtggccacggtggtcgctggcttgggcctcagcagcgcgtccagcgacgagtcgtccttgctcttctcggcctcggccgcgatgtcgagccacgacagcgtgcgggaaggagggagcggcgtcggcgggggcgacggcgacggcggcaggagggcgcctcggtcgggctgctgcttctcctggaagtggagctcgccgaagatctccgtgaaggacgccgtgtcgatgggcttgctgctggggtggtgcacgttgcggttccacgccgagagcgcctccagcagcgtcgggttctccggcagcggcttctcgaacagccgcctcagcccgccgtccgccgcggccatcggcgcagccatcacctgcttatctctggacaacatgcacctgcaagtctgcaactgcaaaagaaaggagctgaaggatgtgcagaacagttttgaggtctgtgactgtcaggagctagactcagatgtttgtatttctctcaactga

SEQ ID NO: 123 - DNA, 1571 bp, Zea Mays
gccgctaattgagcacacgttcgtcttcctccttccgtcccccggcgtccttatccccacacaagcgccgcttaccgccgggacaggactgttggaagtccccagacggcagcgatggcggaactatcgacatcttcggatggattggtggacgaagaagcgaggcagcaggaaccaggacaaggaagcgctgaaggtagccatggtctgcaagacacaaaggagcaggacataaaaaagggaaaggcggctcttgtttccactgaactgctgagggaggatctggttcagagtgctgttagttttctgaaacacccgaaagtagtagcctcttcagatggacagaggcgatctttccttgtaaataaaggactcaccatggatgaaatagatgaagcatttcgacgtctacaaagcccgtcatcgaattctgcgagctcaaatatgtgcacatctcaaggtatggcagagtccatttactaagttagctttttatatgatattttagttctatatgttcgtggatcatataatgatgtttcattgtttatgtgtgttttccgctgtaaatgatggtgattccatatgaaattacccattcagagtttcagacctaaatggcttcatcatgacaaatctaacttagtaacttcattgccttattattgcctgcattttgtcaggggtgtttgatcattcatgcaggattactgaggtcagcacaaactacaaataatagtattggccaggcatgactggtatctatgctgcaaattttaagctactgccattttcttcaatgcagcaggaaattaaagtcgatagaaagtgtatgaatggtttagagagggtggaacctgaagctggacctgtggcccctgtggtacctcgtcatccaaaatcatatatggagatcatggaaatgatacaaaggggtgagcggccagacgatatacaggatattaacgatgaccctccaaatcctgatcaaccaatctcagaacctcgtatggcaccgaaaccaaagccatgggaaaagcaaggtcaagggagtttggcctgtgatttgaaatcgctgccaagggaatccgacgtgctgaggtcagaagttcagcacgacgacggcaccaaccaggttacggagtccgccgatggcgccaaccaagcggactcattgctgcaggcaggcgtagctgctggatctgaatctcctggggttccagatgacgccgcttcttcgcttgagtaaccaccgcgaaaataaatgaatgacgccgtaatcagacgcgaaaacaaacgacctcattaccacaacactgttctgatatttttgggtcctgagagagccacttgagttcacaataaatgtagtacccatcactggatgatcttttttagttgctggaaccatatgatatgagcattgttggcacttgctctcagcagcaaggaagccaacaagggtgaacggtggtgacaacagggttacgcgcacgggggcaatagctctgttgatctagcctctcacgggcactgtgcgggggtatttataggtatctgagtgcccagcg

SEQ ID NO: 124 - DNA, 1274 bp, Zea Mays
caccagcctctgtgctgtacaaatcgtggctccattgactgcagcagtgattgttaccacccctcaaaagctggctttcattgatgttgccaagggagtaaggatgttctctaaactgaaggttccttgtgttgcggttgtagagaacatgtgctattttgatgctgatggaaaacgttattacccatttggacaaggttctggaactcaggttgtgcagcagtttggaatacctcacctctttgatttgccaatacggccaactggatccaatccaaatactccgattaacagtggtccacccctatagaataatctagggattcaaatggactaatgattaaaatctacaatccagattactgtaatccgattgggatctgaacaagcccctaaataagagagcaaaaatcacagtttggtaagttatgcagctttcggcttccggagatactggaattcctgaggttgtggctgatccgcaaggggatgtggctaatacatttcagaatcttggggcatgtgttgttcaacagtgtgctaaaatcaggcaacaagtttctacagcggtgtcctacgatagatccattaaagcaatcagagtgaaagtgccagattcagacgaagagttcttgctgcatccagcaacagttagacggaatgaccgatccgctcaaagcgtggatgaatggacaggggagcagaaggttcagtacagtgacataccagatgacatcgagccagaagagattaggccgatgggaaactatgcagtttctataacttggcctgatggatttagtcagatagcaccttatgaccaattggaaatgctggagcggttggtggaggctccgagtccagcagcagcgtctgcagtggcctcgtcatgatacagcagaaagaatgttcagttagcaaggggcaagaaggccgacttttagctcccagaaaatttatagctctgctacaaattttgaaagaattttacagtactgtagaaccatgctcattgaattttaaaaaaaggcagcagctttcgttcctcttaaaccattgtgcagacccccgttctcactaaaccacaggctagccttgacaataccaaaccataaaagaaaacggttactgttataaagatagttttttttcccagttatatagaaaattgatataaaactagtgacaaacagaaggtgcatgggtggatctaatatgtttgttacatatgaatatagtgaatacaagtattattgataaccattgcacatgag

SEQ ID NO: 125 - DNA, 1586 bp, Zea Mays
gctccacttaacacacatcgtatttgtggtttgattgaactgatgtgctgacttgtcaactttctcaaaatccatgttgaaaattaagataccagaaaacaaattgtcttggatggcccacggagttgtggtaaaagcattgcacttgcgatgcttgtccattgggcgcgtactgaaggatggctggtattttatgttccacaagggaaggattggactcatggaggattcttttatagaaacacatacagtgattttttcgatacaccagtacaggctgccaatatcttgcagaattttttgaagtacaatgaaacacgtttacaacagttaccatgccaaatttttgagcgtattcccctgggagaaggtgctggtgttggaatgatgaaaggggttgacacaatggaaatgcctgaagggtccacattatatgatctcattcaaactgggataactcaaacacatgcttcagttggtgttatggttcgcttaaggaaggagctgtcccttgttaaagacgtgcctgtactatttgccattgatcagtacaatagctggttcacattcagtgacttccaggaacctgtaactgtccgatcctgtcgatcgatccatgcaaaagagcttacaatggtcaatgcttatagatcaatgctgcacaatgatatgatggtgggggctttttcacactcaacagcagttggcaaactacggcaggagctgccagatgttccttctgatgctcgtttgatctttccacgttacaccttagatgaagctgagactgcatgtcactattatatgaggcaaaagatcattcggcgcgagaatttttcagaagagaaatggaaaaagatatactacttatcaaatggaaatggtgcagagatgagatggcttgctgccttcgtttgaggtagatatactgtccctgaagtttctgatacctggattgtactcagttttggtggtggtgtagaaaggttgccacctctgtttcagcattccgttacacaccacagttcattgttgtgtacttgtagtccgtctcttgacatctctagaagaaagtttggcgtcaacatcatttgtgctgagtagaacttgaggagataaggcataagtatgtggctcagttacatgattatatccttaggcttctttcagttctcgctcagatgctagatacaaaataatgtagcattgttattggagaagttttcacatgttttggctccgccgagcacgatgagtatgatgagttgatgccaatctactcagcatgcttgctactatgttgctgaattgagctccgttgagtattttttttaaattactgtacgaatcgaacaattatttgagttgggaacaatattcttctttgcggaactcaaaggttacgaggcatatcctcagtttgaatagtttagcttacccttgtttcctcagtttgaatagtttagcttacccttgtttctcggagagatgcaacatattgatttagctacattgtctattccggtgtactcctatgccgtttatcgattttccttctggaaacgaataactctttaactttttct

SEQ ID NO: 126 - DNA, 967 bp, Zea Mays
gcttgatgtatctgctgggaagaaagtggaagaggaatttagcacttgccctctgtcagtcctaatgatgagcgttaagaacaacaccaagatactgaaagcaaacatggcttgttcagtcgggcagcggcagcagaggggatggggccaatgacggaggcggagaggagaacccatcgatttggtggcgtaagtgggagctcatcgaggccggtgcgtttgggcagccaccggccggtccacctcttcaataatcgtccttcatcgcccttcagttaggggcgagggttgttcagtgctttgacatgtgtgcaactattcaagcacaatggttagatgatatccccattcattttagattattacattgtggtgttcggcttcttcagtcaagcagcaatcatgcaacatgccttactgtagttttttatcactgcacatgttgctggacaaatttatggactggaggattatagaggactaacaagtgctactgggagattctcgagcaccattgaactaagagattccaaatagttctttggagtctattgttgatgttggcggggataatctagcagagatttgtcagattttttgtgcaacacggaggctacatgaggcagcaacgatcccattcttctcgcatgccactttacacaagctaaggatagcttctggtctcactcatggttgtggcagggaaagccgagtcagtagggtttgtcatgtagctggagttatctcagaccacatattagatgcagtgatgatgttaatggaggatgtttacatttaccgtgcaagcaagatgacttatattatgccttaggacaataagtattgttttcactctaatgaaatacttggtaaaaagttgtctctgtagttgtatatttgactgtgaatatttgaacccactgttacaattgttgctaattgaggtcagatttcagaggccaaataa

SEQ ID NO: 127 - DNA, 2107 bp, Zea Mays
atgacggggacgaacggtggcatggccaaggagggcggggacaacgacagcgctaggctctgcggctggactggaggtgtcattgttgccatcctgaaccgtgttgccatcctttcggtatgcggcagcacaaaaatctaaagagaccacgccttgaccatgtcctcaattccgtccatcttctcctctgtcttccccttttccttctaacgacaccaggagagaaatttcctcctgtgcgcgtgaaacaattttcctcctcgccacgagatcatctccaactcaatggaagacctaaaagttacggcttcatagtcccatcccaccacgaggggcacggtggtcggtgggttgagggttctcagctggctggagactggagcatatgttttctttcaagtccaggcagagtcagggtttcatgggggaatcagacgtgaaggaacagcagccgaacaggctgcaggaggagctgaggaaggagaaagagaaggcacgcgccctagacgagatacaagacctgcaaggcgaactggaggcagcaagagattcagagaagaagatgctgctgtcattgcaggctcaaacaaagcagcttgagcagaccaaagtatccctggaagaggccaagattgagatagcttcgctacgagacagtaggcagccgttcaagaatttcaggagaaggggtttgatgtcattctcctttgccgaccctggcgaggcggagacatggtcgctacagcgtgagctcaggttagctgtggaatccgaggagaagtgcaacaaggccatggatgacttggccattgccttgactgaacaaaccacagaggccagagaagcaaatgtgaagctttcattggcgcaagccgagttgaataatgcaaggacccaagtggagaccttgaaggcctcgctagaaagcacagagggcaagctccagttggcactggaagaggcagaccggctaaaagtcgagtcagatgaattggcagctgcctcaaaagaaaaagagagagggctcgttgattgcatcaagatgtttgaggaggacctaagtaaaggaaaggaagagaacgataagctgattgaatcacagagggtgaccagagatgagaattctcggctgagagagatgctgaagcatgcggtgggcgaagctaatgtagcaagagaatcgctggagattgccagagtggagaattctcgccttaacgaagagatgtttaagaaagagagtaccttgcagagtatcaaccaagaatatgaatccctcaagatcagcgaggcagccgcacagagtagcattaaagaattgaaggatatgattgatgctatgttcagttctgagtcgaccaaaacgtcagcagaagcatcacctcgtgaggccaagggaagcaagatgaaggaaacttctgtggcagcagattatgtgtattctgatgtcgaaagatctactcgtctggacgacataaaaaaccctggaaagcagaaaaagaagacaattctcagaaaatttggtgaaataatgaagaaaagaaactcctaaattgtaatctagtattacgaaagcagtatatcttccattttgtttgttcagatcccttgagcacacaggacagctagaatgccaagatttacaatgatgaaaagatgtgtggggtaacattttttttctttttttacttcatgccatggatttagactacaaagaatggagcatactgtacatacatgtcaaaatacagagaatgaaataagaaagtgtcatagcctttttttatggttttataagtttctgcattttagaatctctataaatccttggcctgctatatgcaactaagtagcccatgttcccagagtacagtatgcccaaattaccccatcgttctgggaaatatgttgataatgaggatatttaacttgtgtcaaggttctgcaaagagcatatttacaagttaattatgtgtgatttatggagcactggaatccgccaccaactggataggcctaagtaaaactgcataaaagtatttcattacgaggtttaaggaaaactaaaatgtctgtggaggacacactgtctgaagtaccatatcac

SEQ ID NO: 128 - DNA, 4044 bp, Zea Mays
gaagattgtgcctatatcgattgttctagttttgaggcaaataacatcccacggtctatccgttacctatccatttccatgcaagatcattgtgctcagaatttcgaggaacaaatgggaaaactgaaagaaaagatatacattaacaatttgcggagtttgatgatatttggaaaatacattatgttacatctgctcaatattttaagggacacatttaaggaaataagacgtcttcgtgttctatctatattcatatactcccatagttccttgccaaacaacttttcagagcttcttcatctccgctacttaaaacttttgtcaccttattactcagaaatgtcattgccaaacacggtctcaaggttttatcacctgaaatttctagatcttgaacaatggggaagtgatcgttctttgcctaaggacattagccgccttgaaaatctatgccattttgttgtttcggaaaagattgattccaatgttcctgaggtggggaaaatgatcttcttacaagaattgaaagaattccatgttaataaagagagtgttggatttgagctacaagaattgggtaaactagatgagcttggagggaagctcaatatatacgggcttgaaaatgtgagaaccaagaaagaagctaaagaggccaagctgatgtcaaagaggaatttagttgagttgggattaatttggaacatgaaacaagagtccaccgaagatgatatcctagatagtatccaaccacactctaatgttaggagtctttttattgtaaatcatggtggtaccctcggtcctagttggttgtgcagcagcgacaccatatacatgaaaaacttggagactctacatctagagagcgtatcgtgggctaaccttccacctattgggcagttctatcacttaagagagctaaggctgagtaaaattgttggcatatcacagattggacctggcttcttcgatagcacgacagaaaaaagtgtctcacacttgaaggcagttgagtttaatgatatgccagagcttgtcgagtgggttgggggagctaactggaatctgttctcaggaattgaaagaatcaagtgtactaattgtcctaggctgacagggttgctggtttcagattggtctatttcttctatataagacagcactgtatggttccctaatcttcatgacctttacatttatgaatgcccgaagttgtgccttccacccttgcctcacacttcaaaggtatcccgtattcatatgggagacttttcttatgaaggtcgtaccatgttgaaaattaataacccctctagatttgccttcgaaaatctgggtgacctagagacattggtagcttgggatgcactacccttgtcctttatggatcttaaaaagctacattccttgagacgtataaatgtcactagatgtgaggaaacatttttgagaggactggatgatggtgttgtgctacccacagtccaatctctctaccttggacgatttacacctaccaaaaattatttgtcaaaattattcaaatgttttccagcactttcttctttgcatgtgatggcatcaccatcagatgaggacaacgaggaagtggtactgcattttccaccctctagctcgctgagagatgtcaacttcacagggtgtaagaatctgatcctacccatggaggaaggagctggattctgtggcctctcgtcgctcgagtcagtgaccatacacaaatgtgacagaaatatcacaatggatggattcaatcctcacatcacatccagcctcaagtatctatgcgtgtacaatgagagaaatgatggaactgatccgtattctgtagcagcagatctacttgtagcggtggtgaggaccaaaacaatgcccgacgtttccttcaaactggtgggactttatgtggacaacatctcgggagtgcttgttgctcccatctgcaagctgctctccgctaccctcgagacgttaaacttcagtaatgattggcggacagagaacttcacgaaagagcaggacgaggcgcttcagctcctcacgtctctccaattccttgagttttataactgcagggctctgcagtccctcccccaaggactgcaccgccttccttctctccacggaataactatctatgggcctcaaaacattagatcactgcctaaggagggcctccccgattcactacgaatactacgtataactaactgttgtgctgagatttatgaggcatgccagcaattgaagggaacaaggccagatataaatgtacttgcctccaaagctcgtgtgcaaaattgaatacctgcttctgcatgtcttcacagtcagctctgcttcaacatgcctttcactctacaggtaaatactgtgaaaacatcttcctatacgtgagatagttgatcttcatcgattctacagccaggatgatgtcttattggatgatgtgttggtcatggttggcacaaaattcagtagcgttcaaggcaataaacgagaacaagcatgggatgtggaaaattttagaaagtaaagacaagtgaattcttgacgacgttggcttggcaccttagtttgagtacataatgaaagaacaaccttttagcaaccctggagcatctagaaaatatcaggtgaggcagtaagtggatctgaatatgtgaaaaaattggcagtcactaatggacttcttgtatatggcattgtctccctctctctgctgttttatagttcaaggcattctatttacagctattgcaactttttttgtaatttcagtcatgtaactatcgttaatcatttgaaaaccactggaagacaggagatgtagcaccacaagccattcctttgatcatttgaaaaccattgcggctctttctgattatatcaaccagttgagtggatgaaagaccaaaaaatgctttggaagaagggctcacaattgtggataataaggcatccagtattatagaggaaacaaaggaaattcaaattagacggaaacctgctagtccaagttcttatatgccaaattcatcaatttgcatcctactggagacattgctggcagaggaattgagactggcataggagaactcaatatatgcttgtgaataacgcatccagtgaaagatagtagattttcatcaattcactacccaggatgttgtcgcattggatgagaatgacatggaagacggcgaactagaggaagacaacaacctcatctaagctgaaaatgtgttgcctgtggttgaagaaaatctagcagatgaacaacactgccttccctgtcctctctagacctgaatctctctgatgcatgctctagccaaaggcatgatcgtcatcgttctgaaacaaagaaaatgatgtgtattcctttcagtgagcggcctttgcatgctgcatgagatcaagcaagccgccgactggcaatgctccacctgccattcagttcgttggtgaggtattaatcaccagccatgttggcacttggcggcatgcagatggagcagaacatccaggtgaagcggacagatacatgatcgatcatgagttggcgcagacacaggccagacaaccagaggctatattccaattcatacattccatgataagcaaaggaagatccaagacaacacaaatatacaaatagttagttatacaagcaaaaatcctgttgttttgtgcctcccattttctagtccagaattaatatgacaatttttcactgaaactggttggatcagagaccaggaaaaaaagggaaatgacaactacagctgtgttttttttttcaaagaaggcagctgcccgtcgatgatgtgctcacttgaggatttcctctgccttttcagtgacactgcttcatccttttcagagtcaaatgaatctctacctcatttcactgcacatacttccaaactgatttgctgtaacatacttgagtttcggtatgacattaatttttaactcataagagaacaaaatcagaagaaaaaaaaacaacaa

SEQ ID NO: 129 - DNA, 2282 bp, Zea Mays
cgggtgcatgagccgggtccactcgggaagtgaccgggacctcgcagcatctccctcgccccaccccaacctccacctccaccgccacccattgaaaagcagagcggcagactggcagaggcaggcgctctcggctctcctcgtggacaaaaccaccggctcccgatatccaaattggaacaggggattctgaacttggggtttgttccggggaccgattctggcatcggcagacgggatgtcagcccccctcgaccgacttgctaggccatgttttgaagggtttgtacataacgatgaaaggaaagagagcagatctgatgcagacaactcagaaggagataagaagactaagatcggatctttcaagaaaaaagcaattaacgcggggaacaaattcaggcattccctgagaaggagaagcaaaaagaagaccgaaaggggggattccatcaaggatataagggacattaaagaacttcaagatgttgagacatttcgacaatgcttaattgacgaggatttgctgccgccacagcatgacgattatcacatgatgttaagattcctaaaagcacggaaatttgatgttgagaaagctaagaatatgtggtcagacatgcttaaatggaggaaggaattcggggttgacaaaatagaggaatttgagtacgccgagttagatgaagttaaaaagtattacccacaattttatcatggggtagataaagagggaagacctgtctacatagaattaatagggaaagttgatgcgaacaagctagtacaagtgacaactctagatcggtatgtgaaataccatgtcaaggaatttgagaggtgcttccagatgagatttcctgcttgctccattgctgcaaaaaagcacatagattcgtcgacttctatttttgatgtgcaaggcgtgggtttcaagaacttctcaaaatctgccagggaattaatcacacgattacagaagatcgacaacgataactacccagagacattgtgccagatgtatataattaatgcgggccaaggcttcaagatgttatggagcacaataaaatcattccttgatccaaaaactgcttccaagattcatgttcttgggaataagtatcaacataagttgctcgaaataattgacgagtgtgaattgccagaatttcttggtggcaaatgcaagtgtattgaaggttgcgaaagatctgacaaaggtccttggaaggatcccaacataataaagagagtcctcaatggcgaggcgaactatggcaggcaaattgtgaccatatccagcactgatggaaggatagtcagttatgcttggccagtgcacccaaatagaaaaggcagtgatgcatctgccgagtctgggtctgaagtggaagacgtaacatctcctactgcatcaaggaacctgattacacatcctattttgacccctgttcacgaggagtcaaaattgtcggcacatggttcttcatctgttgttcatgcttctattggagaaaacattcctgttgtggacaagattgttgatgatggatggggtagtcccagatctagtccacaagctgcttcttcaggttctttgtccctgaggaatttgcatggcacatttgaaggactcagagctcaaactatcacatggctgacattcttgatgatgaccctttttgccatgctttgttctgtcccaagcaagatggctagaaggatctccaaccaatctggtgcttgaaacgaagccgtctgagatgccgtttgaaaaggaagaattgctcaatgcagccgtccgccgtgtggatgcattggaagctgagctgatttccacaaagaaagccctttatgatgctttgatgcgacaggatgagctactcgcgtacattgataggcaggagctgatcaaatttcgtaaaaagaagttctgcttctaagatttgaccgtggagcagctgttcatgtccggagccgtttatgtgtatattggattgcggctaatatgtagtagaatgtaatgtgtccatctttagaagtgtgtaaagtatagtaggaaagaaaataggtgcgttgtggtgtgcgcctctcctccccgaggtgaatgtgtggtctagcacttgtgtgctaccctaaattgtaatcttggaagttggtgtatagctgattgcgtgctaatacgtagttgtaaatgaaatcgcatgtgctcgtgtttacatgaaaaactaaatatagcagcaccaaaaataaaaccggttatttggttagaatcatat

SEQ ID NO: 130 - DNA, 1812 bp, Zea Mays
tccctgcactatcctccctcaggccgccgccgcccctggtagccgtcgcctctccttgctctgctcctctctctcccaagcggctctccctctatctcctcgtttctctcccctcctcttctacagccgctgccaggcaaccgaccgccgagcagcgcagccacccgagccccacgcccgccgcgccaggaaccagcgcccctgctctcgccaggacgccaggaattgctctttctatagcaagtttatgagttcagtttatattccattgaatatttgttgcagtgaagagaaatgagagaaagccttcggttgtagccttcagtttatattccattgaatatttgttgcatccgactcatctctgtttcgattccatccggtttggctcattttttaatcgagtgtgttgtagttttgtaccctaatgtcgtgggagtgctaccgaagtactgatagcatcactttaatttcattagctccgtcctggcaatcactttgggaaggtggtcagtggaataactttgcttaaaaagcttgaagcagttggtagtgaaactggaaatccttcttatcaagtgaaaattgtagactgtggtgaagtttccaacacaaattctcaggatccgctaaagggagataaagtaagctcaaagacagataacagcagttcagacagtgaaaagggtggccatcgtaccaagcgttccttgacgaaaggtgagctctagaatgttgagccttggcgctctcaccacatttgattacttggggattgagtaaccgggaaaggcgtattgcacttgttgctgctggcgctgctgctggcattgcttcaggcttcaatgcagcagttgctgggtgcttctttgccattgaaactgtattaagacctcttaaagcagaaaattcacctccatttacgactgcaatgataatattggcatctgttatatcatctactgtttcaaatgttttacttggagccagaccagcttttatagtgccagcctatgagctaaaatctgctgccggttggaatggctgctacactagcttcagtctgttcagtcccattgacttcagtactgcttctctttgagctgacaaaggattacaggattttgcttcctctcatgtgaacaagggagaatattgtgaactgaaggtcatgtatcagcgaaaagcaggctttcctcttgtagcaattgtgcactgaaaaactacagtgcccttatgacaccacaatagtcgctcgaatgcaactgtccggcctagcatccaatcgacctcaaccactctgcatcccacgtgtgtgtggagctgatgaacatgtcgatgtgtactgattttttctcatatgtttctagccatgctttaattgattctttgtcaaattgtgcaacttgtgcaaaccatatgattacttggtattattgctttgatatggacatccagaaaaatattcaacttcgaatatctttggctttagtgactagtgactgatgtactttagcgtatccactaaaaaccatgaaagtctaggtatgtgtcatttggcattaggttttgtgatgtaacacttgactcaacatcctctaatatgtatatctgttttgacattatattttttcacatgactaacctttgggcatctctgttttcatattaccaatacaccaatgatgttaggcaaattcctccagctcgagtacttggagattacatagtcttctccattgtttttctagactttgagactacgcagacaaatagggtagctatgctagatgagatcctggattatgtgaa

SEQ ID NO: 131 - DNA, 2305 bp, Zea Mays
ccatgccctgcccgtgagtgcgaaccaattttgggaatatttgccggagtcctgcggctgaagctgtgtttcggaccctcgtaagcaagcgtgggcttgactccaagtttctcatagactctgctggtaccatcgggtatcatgagggtaataaggcagactcaaggatgagagcagcttcaaaaaagcgggggattgaggtcacatcaatatccaggcctatcaaaccctcggattttcgtgattttgatcttatccttgcaatggacaggcagaactatgaagatatattgaactcgtttgagagatggagacgcaaagagcccctccctgatagtgcacccaataaggttaagctgatgtgctcctactgcaaacaacatactgagtctgaagttccagatccttattatggaggtcctcagggatttgaaaaggtgttggacttattggaagatgcttgcgagtcgctgcttgatagtatcgtcgcaaacaatgcaagcatttctgggtgacatcgatgtaaatctccacatagacatctattttcagacgcaccggctgtagcatccatgcacaaccggagtaatttggttgctaatgcaacattgatcatgtcgttattacccaggtcttggtctggtttgtatataccaccatccttatacctggttatgtgataagtgacaaaaaaactgctcatcatcacttttttccactaaagataatcagaaacaatcagaatgactgacaaagcatgcttatgtccatttgaaacttactattttcgcataaggcatactcggttcctcaggaaccatgcttggaacaattgtttgactaatttatatgacatttgataagctggaacagtttctgggttctggctagatttctagctatccctttgtttgaattttgcactgttttttttttcttcttcccggtgcttttctttagcctgcagcaggctgcaaccagcacgacctccacaggtgactgcggctaccatgaaatcagtcgtcaccggcggtagcactgcacatgcaagaagaagccgccgggcgactgctctgtggcagctgtgtcgtcggccatccacagcctgccctccttctccgccctagccttcaccatgaactgcgcccccgagcccgcgctgccgccaccccgcccaccgaaccaccagtcgtgcacgtcccacatgacgtcgaccacctctccgtcgggcagcacggcggcgcggttgccccggaagccccagcccacccgccgcacctccgtcaccttctcgccgtcgatggtgacccgcagctccccctccccgcccctgcacgcgtgcacggccacctcgtgctcgtccccgccctcgcggaacctgcagcgcgtgacgtgcgccgccgccgccgctgccgcgcagcgcagctgctcccgccggctgacgaggagcgcgggcgcggcgcgagcgctcggtgcgaggccgaggcggcgggagagctcgcgcgccgcgccgcccgcgccgaggaggagcgcgagctcggcgtcggccacgacggcgaggcagtagtcgcgttcgggctccggggacgaaggcgacgggtacttggcctccgcggtgtcccagtgcacgccgacggccgtgccggcgccggtgaccagcgaccggctccctcttctcttgtgcagcaggaggacaggaggcctcgtccgggccggcgacggcttcggcgcgtcggaggtgccgccgccgccgtcgtcatcgaagtcgaaggcgaccgcgacgccggcctctccggccgcgctccgggtccacgtcacccggacgagcacctccttgcccgaggacagcgcggccctgtacacgctggtggtggccgcctgcagcgcccggtcgagcgcgccgcggccggagacggcggcgtcggccgtggccacgctgacggagccgtcgccgaagcaggacagctccctcatcgccgcagccacttgattcggacgccgagcaaagcgacggaacgctgcgaatctgctgcggatgcattggagggaggcgaggtgttttaatcggcgggtgtgcgtgtcgtttggctgggcttgcaatctgcgagaggaggtggcagtcaaacaaaggatttcgtgaatcaaccgacggcagaagcacccgccggtatcttgagttcagctgccgtgttgtattgtattgtattgctagctgaagctgagtgaattttgcacgacggcaagcatgcgtgcatgcatgttggcagctgacagggcgactaccagaccatatcatattccgtcc

SEQ ID NO: 132 - DNA, 837 bp, Zea Mays
aagaaaaacgaaaaacgaaaaactagagggtggaggacaacggtgtccagcaaaagagagagaagaggaggggaggaggtggaagtagcaagaatggcgtgctccaccaatctctgcttctcggcgtcgattcctcctcttccagcctcttcttcttcttctgtctcctcccccttcctcacggtggagcgtgtgtcctatgttccgtccttgtccaggtggacaatccgatacaagcaattggggcatgcatatcagagaagccacgttctggcctttgctagtgcagatggtaaaagaagctcaggtgagaatgttgtgatggttgatccactggaagctaagcgtctagctgctaaacaaatgcaagaaattagggccaaagaaaagctgaagaggcgcagtcaagcagaagctatcaatgggccattggcaatgataggactgactgctggattgatagtggaagctcagacaggaaaaggcatcttagggcaggagctgatgacacctgcaatggaatgatgagtctattgcttcgatttaacgtgtgattacatatatcttgaacttattataagccagtatgtcgcctgtagagtgtagacaggtacttttataatatataatcacaacttccatatgtactgatacattttatctttgttctgcttgctactgttttaattgaatacaagacatactatggaatatttaaatttgtcatttgtagtagttgtgtttgtaactgcaagctaaaaaacaatctgttgagcatgtgctatatgtaagtagcgtggatcggtttagggtccgtgcatgttaatgagatatgcg

SEQ ID NO: 133 - DNA, 1016 bp, Zea Mays
ctccacttgcactagcagcaggtacaccaatcgcttcgtccccgcgtctcgccgcgtaggcgccacagaaactcgcacgccgctccccgccgtccggcccgagtcgccgtcgccgccgaatccaatccatggctccgcccgccgcactgcaccaccgcacgcccctcctcctcccccgccgcaccgtcgccttgggtgccaccgccaccgcgcgcgccgccagggccgcttctctcgccgtcagggcccagccggacaccaccgccgcagccgtctccaccaccgcgcctgagccgacgcccgagttcaagcctccgccggggttcaaggcgcccgagcccaagaggttcgaggtcaagtccggccagctgggcagcgtcctcggcgcctcgctcgccatccccctccgcctcggcaccggcgtcttcgtcctcgggtactcgccatctcttgtttctgcatcagagataccatcagaccagtatgcactggaattcggagcttggaaggtgaaagaggaatcaaaaataggacagtgcaaacgaccagaaaagcctatcgagatatatgaatttgaaggttgtccattttgtcggaaggtcagagagatggtaacagtcttggacctagatgtattattttacccctgtcctaaaaaaggcccaacattccgacctaaagtcctcgaaatgggtggaaagaaacaattcccttacatggtggatccaaacacaggggtcgccatgtatgaatccgatgacatcataaaatatctagctgatacatatggcgatggaactgttccaattatgctatcacttggtctgttgacagcaattacagcagggcttgctactcttggtcgtattggaaagggaaattcctacattgcttcaaaagtcccaccgcagcccatagagatatgggcatatgagggatctcccttctgtaaattagtacgagagacgcttgtcgagttggaattaccacatctgctacacagagtgttagtaact

SEQ ID NO: 134 - DNA, 1898 bp, Zea Mays
ccacagatcatccttgatcgtcatccacataatccctatctcgtaatcaactgttctacttcgaagtatctatcaacttcactactacagactacagtccacaatctatcaacttcactactacagtccacaagagaggaagaaaattatccaacggacaattccctatatgccactacaattttgctcgtgtcttcaagtatgtgtgtgtctgataggtggtcttacctcaatggactgcttcctgaagagattcttcccaaaggtgtaccgtcagaagcaggacagcaaagtgagccactactgcgagttcaacagcgagctcctcaccgtcttcacgtcctccctctatatcgccggtcttgttgcaactctggctgcagcaaccatcacaaggaggtatggccgtcgcacatcaatgctgatcggcggcagtgtcttcatcgcgggctcagtgttcggtggtgcagccaccaatattcccatgctcctaatgaacaggattctactggggattggtctggggttcactaatcagtcaatcccattgtacctgtccgaaatggcgccaccccgataccgcggggcaatcaacaacggcttcgagctctgcatcagccttggcatcctgttcgcgaacgttctcaactatttcgtcataaaaatcacagcaggatggggatggaggatatccctgtccatggccgcactgcccgccgcattcctaaccatcggcgcgatcttcctccccgagacgccaagcttcataatccaacgtgacggcaacaacacggacaaggcaagggtgctgctccagaagctgcgcggaacggcctcggtccagaaagagctcgacgacctggtccgtgctagcgacctctcacgagcaacccggtacccattcaggagcatactcgagaggaagtacaggccgcagcttgtggtggcgctgctggtccctttcttcaaccaggttagcgggatcaacgtggtgaacttctacgcgccggtcatgttcaggacgatcggtctcaaggagagcgcgtccctcctgtcctcggtggtgacacgcctgtgcgcgacgtctgccaacgtcgtggcgatggtggtggtcgacagggttgggcgcaggaagctcttccttgccggcggcgtgcagatgatactttcgcagttcaccgtcggcgcgatcctggctgcgaagttcagggactacgaggagatgggtgatgggtacgcgtacctggtgctgaccacactgtgtgtgttcgttgcaggctttgcgtggtcgtggggccctctcaccttcttggtccctgccgaggtttgcccgctggagatcaggtccgcggggcagagcatcgtggtcgctgtggttttcttgatgacgtttgtgattagccagacgtttcttgaggtcctctgccgcgtcaagtcggcgacgttcttcgtcttcggtggatggatctgcctgatgacgttgttcgtttatctgttcctgcctgagaccaagaagctgcccatggagcagatggagcaggtctggaagacacactggttctggaagaaggttgtgggagaggaagcggataggaaagaagcaggagcagggaatatagctttgtcgggcttgtcttagtcattttctgagtcgggtgtgtgtatgtgtatttgatcaaaactgcaaagaaaaacatagtatacgatcgcgacaagctgatgtaaatgtacatttgtatgtaaatcgagtaaacttatcagtctggcgttgttgccagttcctacaactaaccgttccaaatggtacaagagtacagaagcactaatataacaagaatgttgaaacgcactgctgtttcttctttcatgatcggccgtagaaggaaaatttacctaac

SEQ ID NO: 135 - DNA, 2059 bp, Zea Mays
acgaggcggagtcgccgcacgccctccgctttccgagtgacagccgcactcggccctcgtagctggaggagtgggggcgcgggagagatgataaggatggcggcagcgtctcagccgccatcgtcagccttgcggatgcacgggtgcggcggcgcggcttctgcgtcgtccgcgcccgtgcgcctcttcacggagtcgcggggtagagtcgtggcgtcgattgggaggggcaggaggcggaggcgcgccatctcgtgctgctcgtctccagacgcagatggccctcgccccgccgcgccaccgacctccgcagcgccttccgacgggtcgatacagctctattcccagatcgagagggtaatcacggaggcggcaaagcagtcccgggaaggctggggttcgactggagattggaccgaagtcgagggatcatgggtgttgagaccgaagtccttggagccatcatttgttgtccactttgttggaggaatttttgtcggagccgctccccagatcacataccgcttcttcctcgagtgtctcgcgaacaggggagctttggtgattgctacaccttatgcgagcggctttgaccatttcttcattgcagatgaagttcaatttaagtttgacaggtgtttgagaaacttggatgagcctgtaaatgatctcccaacgtttggtgttggacattcattgggatctgttatccacatgttgattggatcaagatatgctgtgcagcgaagtggaaatgtactgatgtcctttaacaacaaggaggcaagctctgcgatcccactattttcacctgtaattgttcctatggcacagagttttggccctatattctcccaattggcatcgtatccaacaatccgatttggggcagaagcagctattaagcagcttgagaatctaagcccacctgttgttaagcaacttctacctttacttcaacaacttcctccgttgtatatggacctaataaaagggcgggaggacttcattccaaaaccagaagagacacgccgcctgataaaatcctactatggaatttctcggaatctcttaataaagtttaaagatgatcaaattgatgaaacctctacccttgcacaagtactaagctctgaagcagctattagctcattgcttgatatgtcaattcgatcacttcctggggatcatgggttaccattacaacaggttcttcctgatgttccaccagcaatggctgatgcagtgaaccgcggaggtgaacttctgacaaatctgacaacaggcacaccatgggaggctgttgctaaggaggttggcaccactttgggtactgactcaggcattctacgagcacagatctcaaaagacgttgaaactcttgttgatgtaattgcttcatggacatcttcaaattctggtccaagactacttcgcccatgatcacccagcagtctgcgtacagaaatgttagtaacagtgaagagcaacaggatttaatgatgcattgtgagtaacaaaaagatgatacgagacgttggcaattaaggagttatgttaccttggccggtggaggaaggatgcatggcactggcaataggagcttttgtggacaaactatcttaacccattggcaaaggcaagatctccttcccagatattttagtctgtaatcaatttggattaaaggtaaacaatataggcttataaggtgaactaagtaagttaggatatttctccccactaaatgtattaagatcttatattcaagatgactgagtaagagatgctagtaaatggacaatgaaattacgtatcttatattcaagatgactgagtaagagatgctagtaaatggataatgaaattaccctacgtagttatacataataagtattttacatgaaggcatagagcgtgtttggtttagcttcctgaactagattcgctcataaaaatctagaatctcaaccacacatagattcctctagttcaattcataatcacctcctacctagatttttcagattcttgttatccatgttacaaggtgccatac

SEQ ID NO: 136 - DNA, 893 bp, Zea Mays
  misc_feature (892)..(893): n is a, c, g, or t
gcaggcagcaagccgaccgcgcctgcaacgaccgcgactcagctcggcgcccaggcggaccgacgccggccacccggccaggcccgcggagccgcagccacgcgcgcccagcaagtcgagcttatctgaatttgatgatcttgtgggccaccctggattcgacaagcaagggacacgcttcaagcggctcatcaaagaccagaataatcataaggacctcgaggagggaattaaccgtctagttctttgctctggaaagtttcaggtgtactacgaactggatgaagaaagaaggaagacggagcgcactgatgttgctatatgtagagttgagcagctctgcccattcccctatgacctcatccagtgtgagttgaagagatatccaagtatgtgtttagaaaaaagtggttgctcgtttttactctgctgcatgatctctaatctgtcaagtgtatagtagaaaatgttttgctagctggaaggttagttgacatacaatctaatggatgagtcctagtaatcaacaaacaagctgatactatgtaaaccaggagaattttttattccatcctgtaatcactttattatttctaatcctcagggacactgaaaggcggacgtgcggattggcttatagagaaatgtattgaacttggagcttctagtgttacccctgtcctgacagaacaatgtcacacaatagcggaaaatcgggtggacaggctgtaatgccttgtgctggatgcagttaagcaatgtatggagtttgggtatcacctccgttcttggcctgttaaacaatgtacggagtttggggttaaatgattttgtaaagtgtttgcaaatttgttcaaaacatgataatgtgtaggttttgtgaatgattttnn

SEQ ID NO: 137 - DNA, 3330 bp, Zea Mays
gacgatatatacccaccctccactgaaatatccattcatttccatacactactaccattctcccaggcaaggcgaggcagggagctttccaggctccgtcgtcccgatgactgcgcagctataacctcgggggcgcggcagcatgcgtcttaacgaaggataaagacctgctaagatggccatggccatggccaggttcctctcgtggttgttcacatgcttcgcagctctcgccgtcctggaggccacggtccctgctcgttcatggcgcgctccgagtcccaccccgaggcacgaagcgaggaggttcgagcagaagacggacaggttctgggagtaccaggagcagagcaatacctgggtacaagtacgcgcgccgttcgacctcatgtcctgcatcaacggcacctgcacaaaggtaggatcgatcgggcggctggcgagggagcctggacgacacggccttcctcccgtccagagccaggaggaggaggaggaagacacgcggcgggttcagggagatggtgcagaagaagaccctgtcctgcctgtaaggaggagaatttccttgacaagaatgtcagagtcgtcagtctgggtgacagggcagagcggctccatctacgagaggttctggaacggggtggtgtgggtgattgctcctcatgagctccctgcctcggctgggtatgccaccgcaactttcattgtcaatacaactatccttgctctgtctgaagctggaaccctctaccagttgcagctaaatgagcatgcccagcctatctggacagagatggcattcaactcaagccagcagtcagcgaatcttggattaaaaacacaaagtcaagctatgcgtataagaaatgggattgtatccaatgatggaaggaaacttttcctgtctatcatgaatggatccctgcttgaggtaacagaaattcagcctctaaggtggaattaccatgggcgtcctccaggtgcagacgtgtcgtatatatctgatgctggaaatctgcggccagggaccctgttcacagtaagttccactggagacctctatgagtttgacaaagaaacaaagccatcatggaaaaagcatatatggagtgaagaactggcgaaaaatatctcattaaaatcatcggctggctttgctttgcatggtttgtcagggtctaactcagtgtctcttttcctgataagcaagattggcaggatggccttttagtggagcggcgcttgcatagaaggaagtggaagtgggacaaacatggagctcctacgggtcagagacttagttcaattgcagaagttcagaaggatgaacttaatgatgcgacttcaatgtttttaacgacaaccacaggaaaagtatatgagtatcagtttccaaaatatacaggtggggcccagagcaataagataagaggacaatggataaatcacatgtcccctgagcatgcaaaggttgcaagaaacgtcccaggtgtacatgttcaagtcggcagaatggtattcccactagatgatggtaggcttggggaactacattttcctgggatggggggtactgattttggtccgagtgcccaaagtaccataagaagaaaactatcaaacaagtacgagtggtccatcctagacgcaccagaaacagaaggttggaatgcagaatattgcaccgaagagcacggtccgacaaattgtattagtggagcaaagaatatagctgcagacacagaatcaaatgacttgagcaataacccaccttccaggaggcgtaaagtagaagagaagcagcactacctaaatgttaacagataccagcagagtgatgaaactgaatcatacaactttctatcaaggaccattgatcttaacttccacatgcgggtgatgcatgcagacagatcgcttttccttatagcagacaatggattgacttttgaatatctaaacagcaatggtgtttggttgtggttaagacatgaacatgttacagccatgaaaggaacactaggaagctacaatggcagtttgtatcttgtcgacgtgcatgggaacttacacattagagaaagaaatggagatgaactgttgtggattaactgcacagcgatgaagaagggaagacaggttgcaagtgggtctccatgggatggcatccctggtttattgcgcagagtgacaacagatgatgcactcttctttgtcaacaagcgaggcaggctgctacagttcacggttgcgctgcggaaattcaagtggaaggactgccacagtcctcctgacaccaagattgctttcatagtggaccaggaggtcttcagaagaaacatcatcttcgtggtaggccgcaacggtcgcctctaccagtacaacaggatcacggagctctggcacaggcactaccaatcacctcacctgttcctatcgtgctccccagggacggccatgcggccatcgccgctgtccctggccggctccctgttcatggtgtccgagcacggggggctggtggagtaccacttcagcccacaggacgggtgggagtgggtagagcacgggacgccccaccggggcgtgaccctcgtcggcgcccctggcccgtgcttcgacggctcccagctgttcgtggtcggctccgacgggcacgtgtaccggcggcacatggaggggaggacgtggaggtggacgagccacgggcacccgccgtcggagccggccgccgttgacgaacagagctgcgccacaccggacacgggcgccggcgcgcactacgccgacgggttcagggggagctgcgacgggaaggtggcagccgtgcggccggtgccgttctcggaggacgccgtggtcttcgagctgcgagatggccggctggcggagctgcggcggccgccctccgcggacgggtgcggcgggtgggagtgggcgcggattatcggcacgccggccagcgcctgtatgaccagctactggacggccgtcgccacgtagccgccgccgggcgcgactcacggagctggcagtccgctggtcgcttggctgattgaggtctccttggaagttggaaatgatccacaacaacagcggtcacgtccatgtttcctcgaaagacggccacgtccacatgggtctaggccgtatgatggccagatttgggcgcccaaagaaaggcagaaaggaactctctcgaaaaaaaaaacggctaaccgttacattacatttgattgtctgtttggtaatgcatttttagaatactatagttttaaagcatatagtactatagtttacaattgtatataacataagtattacaat

SEQ ID NO: 138 - DNA, 1465 bp, Zea Mays
gagaccacgtcgccttcgacccttctccgtcctcccggaacgcccgtcccgtccgtcctccccccatccacatccatcccgtgtgcttctactgctcctcgatttgatcaccgattaggggaggcggtttaccagtgagcacgcgcgagagataggataggaggaaagggaagctagcggcttcgctctcgcggggagatggcgcaggcggtggaggagtggtaccggcagatgcccatcatcacgcgctcctacctcaccgccgctgtcgtcaccaccgtcggctgcaccctcgaaatcatttcgccgtatcacctgtaccttaacccgaagctcgtggtgcagcactacgagatttggcgcctcgtcactaacttcctctacttccgcaagatggatttggattttctattccacatgttctttcttgcacggtactgcaagcttctggaggaaaactcatttagaggaagaactgctgactttttttacatgctcttgtttggtgctactgtcctaactggcattgttctgatcggagggatgataccttacatttctgagacatttgccagaattctgttcttgagcaattcattgacatttatgatggtttatgtctggagcaagcacaacccttttatccatatgagctttctgggcctgtttacctttacggctgcgtacttaccatgggttcttttgggcttctctatcctcgttggaagcagcacatgggtggacctcttgggtatgattgctggacatgtgtactacttcctggaagatgtatacccacgtatgactgggcgtcgccccctaaagacaccgtccttcattaaggcgctatttgctgatgacaatgttgtggtggcacagccacccaatgctgggattggtgctggtgcaaggttcggtgctattggtgtagatccccaggctcaatgatgaattactttcagtgacctgagggccgaggctgtgactgatctgggatgcggcagtttgtattctctgcgcaaattgcggaactgtacaagccattgttcttgtgtatttatacaggctagatgagagttattgtgcataacaaaaagattagtagtatcggaggcggctaagtttgtcacctgttggcagggcccggaggaaaatggatcgtgatgggcaaacaggccaacccctgttgcagaaacttgttcatcgagaatttggatggagcgctgtaattgcagaatggtgcaaggaatgactcctaacattgtggacgcctggatggtgttcgttttccttcctgattctgctgtgttcaccgatccggatgatctggtctcctggaagcagtctttgtccatttttccttcatcagctgctctttaaccgtaaaatcggcgttcgtcatttcaagtgttgtgaccgtatcccttttctgttatataaataaaatgtttcagttagctgtttt

SEQ ID NO: 139 - DNA, 1621 bp, Zea Mays
ggaccggagtggcatttgaccagctgaagtcaacaggcatgccgaacggtggcggcaagaggtggctgctgctgctgccgctgtcgcggtacgtggaggtggacgagcagcaaggtgtgcagctcttctactacttcgtgcgctcggagcgcgacccctacgaggacccgctgctgctgtggctgtccggcggcccaggctgctccggcatctccggccttgcctacgagataggacccttaaaatttgatgcccgagggcaaggtgaatttcccactcttctctaccgaccggagacatggaccaaggtgagcaacatcatatttgtggactcgccggtggggactgggttctcgtacgccaagtccgaggaagggctcgagaccggcgacaccaagcaagtgaagcagctagtcattttcctcaggaagaccatccccggttcgtgatgaatcctctttatattgctggagattcatacagtggtctcatcattcctactcttgcattagaaattgacagaagcatagaactcggtgaaaagatattttccggtctcaaggggtacattgctggcaacccgttgactggcggacagtttgatacagacagccaaattccatactttcatgccatgggacttgtatccgatgaactttacaagaatgctagggagaactgtggtggaaagtatagtgctccactgaatgctgtatgtgcagaggctgtccaagctatcaacaattgcacacgggatatcaataagcaatacatcttggatcctgcttgcccggatgatgatctgttgagccccaagactgtagcagagacagatggaacgagcaggttgatgctagagtctgcagattttctacttggttccaaatgtgcagaagctttatacattctatcctacgcttgggggaatgatgatacagttcaggagagcctcggtatccgcaaggggacaattggagcatggaaacgatacagccatgcattgccttacaattatgatatccagagtgtagtggattaccattcaaggctagccacaaaaggatacagggcgctgatatacagcggcgaccacgatgctgttgtaccccatgttggcacacaagcatggattagatacctcaacttgacaatcgttgatgattggcgaccatggtacgttggaggccaagttgctggattcacaaggagttatgcgagcggcctaacatttgccaccgtgaagggtgctggacatgttgcgccgttgtataagaccttggaatgccaaaaaatgtttataacatggatttcagggaatcctctttgatgcaagtctgatagaatgacccatcggttatctgagtgggcgtcagccgtcaggaatcctctttgaagggtgaacgtgcatatgttgttgctatatgcatacatggggacatggggtgtaggggtgcttgtgcgttcgtacaaaaaataaagtgccaatttggattacttgtttggtccccatgcaggtgtatgtgcagttgcgtgtaaaaattctttgcataaaacaattataacttgcttcctaaatcttcatctaatcttgctgttcggtactgacacgctgttaggtggg

SEQ ID NO: 140 - DNA, 992 bp, Zea Mays
gcccctgtcgattttctgtgcttgccgtcgactgttgtttgtcaggaatctggaaggctattagatgttagtttaacagcaacctgccggctttcatcctggcctaggtgaatatttttctccgaaaaccaatttagtccattgttagtaatgttgaaatttttatatcgtcttaaaggggaaaaaatcatcaaagagggcatttagaaagaacaagatgatacaaacaatacgaaagagaagatagcaacctgcattcgaaaggtggtctcataggagtgtggacaacatagagaagtacaagatagaaaagaagactacaagacgagttgtaagtgtggcaaagggtaggccgcatgagggtctttacgaacgtttgagtgcgaaggaaggaaagaatgacatatatgggatgactagggttcgtgagaggaagacaagggacttcaccaagttaagtgcactaaagatgaaataaagcacctcttggtgaaggaggatgagtgttgggggccttcgtcctccgaaggtcctcaaaaacatgatttgacaatgttttccaagtggattatgtgaacaggtaccttcggactcagaattacgaacatgaagtgcggtcaggacgaagcctgaaccagacgaaggacgggctgattaccaagctccacgaaggatggtacacagccgaagctgtgcgcagggaagcttcgtcgcgatagcagagaggggaaccgacttaaagatgaaaagactacgtggaccttgtcagatttccataagttattgacaaatgtaatggacataaatgtaattttacgtgggctgcgtcccgcgtctataaatagatgaacagtactcccgtactgttcacgctgacttggcatttgcttttgcgtcacgcttgtactttttatcttctctcaggaccgaaggtacatttgtaatttgaaatcatttctatttttccatgttaataaaatagaaatgattct

SEQ ID NO: 141 - DNA, 557 bp, Zea Mays
gaataattatgctttgatacttcctttaggacatcatttgctagatggcgcgtaccaagcagaccgctcgcaagtccactggaggaaaggctcctaggaagcaactcgctacaaaggcagcccggaagtctgcacccacaactggaggagtgaagaagcctcaccgttaccgcccagggactgttgctcttcgtgagatccgcaagtaccagaagagcactgagttgctgattaggaagctgccgttccagaggcttgtgagggagattgctcaggatttcaagacggatctgcgcttccagagccatgccgtgcttgctctgcaggaggcagcagaggcctacctggttggtctcttcgaagataccaatctgtgcgcgatccatgccaagcgcgtgaccatcatgcccaaggacattcagctggcaagaaggatccgtggcgagagggcttgcattcgagctagtttatcgtgttccaacttccaaccgtggcaggtggaaggggtgatgcgagcgagcacatcgagtggtccgcgggccattcagtggaaggat

SEQ ID NO: 142 - DNA, 3080 bp, Zea Mays
cgtcgggccgccggcacctgcccgagtggagtactcgaagcgggcggagtcggcgagtgcacacgtcaacacccacccgaatactagtagtggaatactagtagtggcagcgtttattagccgtcacactcccacactcggcctgccgaggagaaactgaagatggttaggggctagaacgagcgagaggcggccgggaggagggaccgatttgtcgatggcgatcggggcgttcgtggagggcgctccggcggacggcggagaaggttacagcggccgcgtgacgcccttcgtggtgctgtcctgcgtcgtcgccggcagcggcggcgtcctcttcggatacgacctcggcatctccggtggtcttacctcaatggactgcttcctgaagagattcttcccaaaggtgtaccgtcagaagcaggacagcaaagtgagccactactgcgagttcaacagcgagctcctcaccgtcttcacgtcctccctctatatcgccggtcttgttgcaactctggctgcagcaaccatcacaaggaggtatggccgtcgcacatcaatgctgatcggcggcagtgtcttcatcgcgggctcagtgttcggtggtgcagccaccaatattcccatgctcctaatgaacaggattctactggggattggtctggggttcactaatcaggtaacttatacttgaatcagtactcaacagggcacatatatttagctcaaaacaccataaatcggttgagcagtactccctttgtcacacatataggtcaatttagatttgaaggaaacaaaggcctaggtatggtcaatctagcacattcaagtagagaagatttttgaattgcttataacatgatatatagttcaagaaatcagcacaacagtttcatgctggatgaatgttctaatatctagatattggaaattaaatgtattgtgcagtaagtctagcatgaactcagaaaatcctgtgtggctatgaaatcagtatcagacttgagatcaagtatttcattgagttggacttggtggttaaaaacaaaggcttcttgtggatgtcatttgttcagctcccaagttggctacaatagatcgctaaagttgaacaaaagtacatgtttggcttattatgactttcaagtgtctttgctgctgatgaattatgcgctcttacagagttactgcttactaagcaaccttcaagctttcaacaagtgaagtgattatatatcagaatggagataaaatatagctgaaagtaaaagttgtgatgtaatctgaactttctagtttcagcttgcagtaatattgggtgtttggtttctaaggactaatttttagttcatccattttatttcattttagttcatccataagaaacgtatttggtaatttagggactaaaatggaataaaatggagagactaaaaattagtctctagaaaccaaacaacttctaataattagaatagctagtagaaaaatagtgacagaagttcacattgtgcaagagcaccaactatgaccacaagtcttaacacatcactgtctgcatagtactgtcatataatcacgtttcttatggattagagataattacttttgacgtacagactatactagctgcatgccgttcttaatatctctttctcccagagaacaattagatccatactaacatcatactatgcaagtcacatttgatttgcagtcaatcccattgtacctgtccgaaatggcgccaccccgataccgcggggcaatcaacaacggcttcgagctctgcatcagccttggcatcctgttcgcgaacgttctcaactatttcgtcataaaaatcacagcaggatggggatggaggatatccctgtccatggccgcactgcccgccgcattcctaaccatcggcgcgatcttcctccccgagacgccaagcttcataatccaacgtgacggcaacaacacggacaaggcaagggtgctgctccagaagctgcgcggaacggcctcggtccagaaagagctcgacgacctggtccgtgctagcgacctctcacgagcaacccggtacccattcaggagcatactcgagaggaagtacaggccgcagcttgtggtggcgctgctggtccctttcttcaaccaggttagcgggatcaacgtggtgaacttctacgcgccggtcatgttcaggacgatcggtctcaaggagagcgcgtccctcctgtcctcggtggtgacacgcctgtgcgcgacgtctgccaacgtcgtggcgatggtggtggtcgacagggttgggcgcaggaagctcttccttgccggcggcgtgcagatgatactttcgcagttcaccgtcggcgcgatcctggctgcgaagttcagggactacgaggagatgggtgatgggtacgcgtacctggtgctgaccacactgtgtgtgttcgttgcaggctttgcgtggtcgtggggccctctcaccttcttggtccctgccgaggtttgcccgctggagatcaggtccgcggggcagagcatcgtggtcgctgtggttttcttgatgacgtttgtgattagccagacgtttcttgaggtcctctgccgcgtcaagtcggcgacgttcttcgtcttcggtggatggatctgcctgatgacgttgttcgtttatctgttcctgcctgagaccaagaagctgcccatggagcagatggagcaggtctggaagacacactggttctggaagaaggttgtgggagaggaagcggataggaaagaagcaggagcagggaatatagctttgtcgggcttgtcttagtcattttctgagtcgggtgtgtgtatgtgtatttgatcaaaactgcaaagaaaaacatagtatacgatcgcgacaagctgatgtaaatgtacatttgtatgtaaatcgagtaaacttatcagtctggcgttgttgccagttcctacaactaaccgttccaaatggtacaagagtacagaagcactaatataacaagaatgttgaaacgcactgctgtttcttctttcatgatcggccgtagaaggaaaatttacctaac

SEQ ID NO: 143 - DNA, 2672 bp, Zea Mays
gttgccacagccacatctactagctctccccaatccgaaccgaagccacacacccacaccatatctgcaccagccatcctcgtgatctctctgtctcccatcgccagccgccaccgcgccctcctcccaccggatttagaggcgattcatgggagtggtgcgcaggctgctactgcggtatcaatggaggctgactgccatggaggatctgagcatcgaggcgaaggaggccgcgaggacatgttgatggtctccatgatggaaggaccacgccgcacggagaagcccaccggtgtcatcttccgcaaggtccgctcggtcgtccatgtccgttcgtcctcttcctgggcggttggcgcgtgatctggcgagacctcccaatgggtcaaaatctattttgtgcttggcgatgtattccttaaggaccgccatgctcttctcctttggcgcggtcagctgcttcgacaaaggataccatactcattgttgatagcaaatgattgggttccctaaaccaggttaaagcgaatgaaatgaaccatcatctgtaacaaggtgctatatcaatgacaagcagcaacaaagcgtaacacactaaaggcaagtttttttaacaacctttggtctaatatttgccattataatagcatatagttgtacttgtagaatataaatagcagatacaaaacataacaaagcatacctttagtatatcttgaaactatttagtgtataaataaaagtaccaattattcaaaacatatatcaaagtttcattccaacatctggcttgaatatgtagacaaaatgatttaaatagactaaccaatgatcaatgttagtggttctacttcagcaattgtaaagggatgcttattttttggtcacgatgcggtgtcgtgctttcagccgtggaattatgtttaatggagtggtcaaaatttatgccgccatgtcagtccactagatcagaagcatctgtgtcctgcggcagcatgatgggctcacctataaacaaatggataagccttccctgacccagaacagaagaggctttggctcaagtctacgacatcttaaaccattttgtttgcagtcatgcacggagaagacagaggaattgcacccaacaagcccttgatatccaaggaccacgagcgtacctaatttgattctacagactgggtcgatctctctatgattaacaaacacaataaaaaaactatatctgctaggaaaaattcagaactgaaataaaggacacaacaatttttgccacttcagcaacttcatagcatgttttccaacaaggatacaactccaagaagaacgatgttggtctgttatgaccggtcgccactacaggcgccgggcaacagcataggcatgcagataaggattataagatgataatgattagaagattaaggagataagatttgttagagagaaaagagggaatttatctcattagataaggacaagaagggagtataaataattgtaagcaccactctatagggattaagcagaaacaagattgttctggcttcctagagggagccgggagattactgtgacctagccgcccctttcctcgcgtctctcatctcgcgcgcggtgaacacggcgccccgccgttgtgcatcgcgcctcaaaccccggccaccaatcacccaccactacaacctgagatcgatcagggaatccgccccgattcctatcatggtcattgtggatgagatggactatttaataacaagagattgtgttgtgctacatgatcttttaatgcttacaatttgttctatctctagatgcatattcataggtgaagtttattttctgtactgtttaatttctaaaaactagatgaactatcttgttcggttaattttctgtactattaaatttctgaaaactggagtttttgcatgtactaatttctatgtgatggtttctatgtgtgctatctgcatgtctctttaattatctctatatatctggttagacgacaaccttctatctatgaattatatgtcatgtctctttaattatctctatatcaatgtctacctatgtgatataagataccgtagcaacgcgcgtgcacctaattagtgaatttggaagtgtgactttataaaaacaaatgagttatatgttcaagataatgttaatagtcatactatttaaagtccttttactttcttatttggatgagtcttttttcacatatcttccttcttaatgtaccattcatggttctattgatagctcaaggtcgtgtgaatgttgccgctgagtactacaaacaacaggtagagatgttagagggttttagtgagatgggcgcatttacagatcatgctttcctacctgtaatgtccaaggaagaacacgaaaaagttatcaggagtgaaccattagccatatggttgtctaatattgcaaatatggttctctttgctgcaaaagtgtatgctttagtaaggagtggttcacttgctattatcgcatcaactttggattctcttctagactttttgtcacgatatatcttgtggtttactgccttttcaatgcaaacgccaaatccctatagaaacccaattggaaaaagcgtatgcagccgctggtgagttcttttttgccataacctgtacttccaa

SEQ ID NO: 144 - DNA, 1279 bp, Zea Mays
cagtagcaaaaaagcacgaaaaaaaaacggttttacaagaccatttgcgggatatactttcttcaagaaatcttccccacttgttccctcgcgtccatggccttgctccagcctactcttctcactcctcccccgctctgctgctgctcgcatggcctcctctacccagggttcctgaaactgcctcccaaattctcaaatggggcctgctgttccacggcgagggcgtcggaccggagcgagctggcgggtaaaagcgggggcttggcttggagagcggcggggagaaaggggcggctgcttggcgtcaccggagctgggcgaggccccttctttggcggcggcgggaggcgtatggacaagggcactagccgggtcgtggggaacctcgccttcgccgccgtcgtgacgtacctcgccgtgaccggccagctccggtgggttattgacgccatcgtctctctctggctcctcacaatactgctgcctgtactggctctcggtgcatttttcttctttgcaggacaagatatactgcagggcgattgtccgaactgtggaaaaagcttccagatactgaagtcagctttgaaggatggcccacaactctgtccctattgcactcaacctttctccgttcaaggcaacaaatttgttagagaatctgctagattttcatctgggagggctgctactgctacaaatggtccagtgttcaatgagttcttcaaccgcaacatgagaggaaacgcggcgccttctgagacgatcgtggatgtggaggctgaagtcaaggacgtggagtgatgtttcttctcagcagaagaagagcacgatttgcttctgaatctgtgagaaatggggagaaaactgaaactgtgagagactaggcaaacgtgcatatagatagatgggtatcggggatgggtagttgtgtagtgcccgcgcgcatgagaaactggacaaggcccctgtttgtttcagcttctggcagcttctggccaccaaaagctgctgcggactgtcaaacgctcagcttttcagccagcttctataaaattcgttggggcaaaaaccatccaaaatcaacataaacacataatcggttgagtcgttgtaatagtaggaatctatcactttctagatcctgagccctatgaacaactttatcttcctccatacgtaatcgtaatgatacttagattctccccacagctagattttcagaaaagctggtcagaaaaaagctgaagcattgctttgtggtctacgctccatt

SEQ ID NO: 145 - DNA, 1581 bp, Zea Mays
ttctataattgcgaaaatatcccgaatccgtggcttcccttccctggcgcgcgagtgacgagcgtgcgcagaagctagccaagcgatgccgctcctcttccccgccacgccgccgctaccgctgtgccgcgccgcgcgcgtctcacgccgcgccacggcctccgtggcgtccgcggccaggagctcgtcgtcgtcctcggcctcgttcgacgcggccgccttcgaggccgagcggctgcgcctggacgccgcggcgcgggccgggatggagtccaccgccgcggcagcggaggccggcccgcgggcctggaagtgggcgatacggaagcgggtgtgggacgcgctcgaggctgagggcatcgcgcgggacccgcgccccgtccaccaccgcatccccaacttcgacggcgcccccgccgccgcagacgcgttggggaggcttgacatatttcagaagtcccattgtgtaaaggtcaatcctgacacacctcagaagcaagttcggttcttaacattgtcaggagagtgcgagccatttattgaacaggaaagagtatccaagtgtacaacaccactcacacaagacagtaggtcctagaaaaggtttcaaatgtccctatagccctgactccctgagtgcgcactgtaaggctccctcctctgctgttcacaccagcaagcttgtgctcagagaaaaattaccaaagagtgataaaaagctgttgactccgcaacctcggctaaggacaggatttttctcagttatggactctcagatgatacctgttgggtgcattcctgaagcatgcacttctgttggtgcagctaaatatgggaggccaattggtttagatgaaagccttaaggtggatttgattgtgattgggtcagtggcagttgatccaagttcaggagcacggttagggaagggagagggatttgcagagctggaatatggaatgcttcgctatatgggagctatagatgattcaaccatgatagtaactactgtgcatgacaagcagttagttgatgacattccagtggagaagctgctagttcatgatgtgccagttgacattatctgcacccctactcaggtcatcttcacgaagactacgatcccaaagccacaagggatttactgggaaaagttatctccagaaaaattgggccaaatccgaattctaagagagctgaagcaacgtatagagcaagagacaggaactatgcttccttgtggaccttcggagaagctaccgccaacagctcagagaaagcagaggtggcagcggcgacgatgagacttttgtatgcttctcttaactgtttcttttactcaataaagagctatgtgcacccttttctttcttagggcaaatcaaggtcacaattcaaaactgctagcattagactataggaacattaccagatgtaatagaaatgccaaaaaaaactttgtttgcacttaagaggcaatgaggatagatagtatagctctttccacacatatttaatttctttgcaagtatgaagttccatttggaaagtggtacttaaaatttgtatcttggatgtagc

SEQ ID NO: 146 - DNA, 1472 bp, Zea Mays
gcactgtagtggagctggagcgcgcacgcacacacgagtacacgacacgagacacaagccgggaattgaagcatcaagccctttctctgagcgccgatggcacggaccagcaaggcgcggcacatcatggcggtggcgtccgagcaggccgcgccgccggccaggtaccccaaggtggccgcccctaccaccggcccgatccccgccgccgagctgctcggagtcatcgaggccgccgcaaaagctggggccgatgttataatggaagctgttaataagccacgcaatatccactataaaggtgttgcagacctggtgacagacacagacaagttgagtgaatcagtcattttggaagttgtcaccaagaacttcaaagaccacctcatacttggggaggaaggcggccttgttggagattccctatcagagtacctctggtgcattgaccctttagatggaacaacgaactttgcacatggttaccccagcttttctgtgtccattagtgttctcttccgtggaaagcctgctgcttctactgtggtggaattttgtggcgggcctatgtgctggagcacccgtacaatttctgcatctgctggcggaggagcttactgtaatgggcaaaagattcatgtcagtcagacagacaaggtggaacaatcacttctcgtcacaggttttggatatgaacacgatgatgcctggacgaccaatatgaatctgttcaaggaatttactgacattagcaggggagtgcgaaggctagggtctgctgctgctgacatgtcccacattggacttggtattacagaagcttactgggaataccgacttaagccatgggatatggctgctggcgtcctgatagtagaggaagctggtggggtggtaactcgcatggacggtggagagtttacggtcttcgatcgctctgttcttgtttccaacggacttgttcatggacagcttttggaccggatcggccctcctactgaagaccttaagaagaaagggatcgacttctcgttgtggttcaagcctgacaagtacccgactgacttttgagctgcatcaagggcaccaccaccagccatgggccaccataataaagcagccatcatttttttttgggaaatttggatctgtaatcttttaatggtatagatccaattattccttttttttggggggtgtccttcaagaagaaacaataatgtttttagttcaatagcactgtacttgtaatggcaatacgatgtacagttcttcgactcgagtttcaaatcagagtttcaagagagccaagctcctgaaagaacagagcttcacaactgaacatggaatgtgcccccattgctctggcttttcgattgttacatgtatcggacgagatcgagattttggaagaggccagctcatttctacatctaagaattgattccatcgtgagccgctttggcctgcta

SEQ ID NO: 147 - DNA, 2804 bp, Zea Mays
gccgctgctacattccttcccgatacgtcgtgcgctccgctaggatcggccatggggtttgggtccctcaagcgcttgaagggacccacaatcttgcaatggaagcacttcagccaaacatccaggctgggatccatactcgtaacctcccagtaaaacagcttggagggatgatctttggttgcaagcctgatacaattgaagaatgcttcaaaaaacagctctttggtctgcctgcagtccattattcatatgtgaagaatgtaaaacctggtatgcctttgtttctattcaattatattgacagaagactccatggtatttttgaggctgcaagtcttggtcagatgtctattgatccatatgcttggagtaatgaggacttattaaagacaccttttcctgctcaggttcgtatttgcataaggactcggtatccaccaatgttagagagcagatacaaaacagtgcttggtgctaactattatgatcgtcatctattctactttgagctggaccatacacagacagaagctttaatttctttgttcaagttgctgccccttgttaataatcaagttccagctgctccaagagaaaggagtattgctgtgtctttaccaccaactaaaaggaaggcaccagttcttcctgacccaaagaaagtcaaagaaaattcaaaggatatcaatccatttagtgttttatcaaatgcaagtgatggtgctcaagaaaactgggttgattttgattctgacgtggaaaatgctagcatcaatgaaaattcacacagtgacactgatgagaaggaatttgaggagccagtttctgattgggaagatttggatgacaatgctcttcaataccaattcagtccttattcaaattcagatgaggtcagtcaaaactcctcatacaaaacagtttgccaagaagtggagcttgctgaatgcattcctccagttgtcaatcctgcgagtgaagaaaaactcaccatgcttgtacataatgagcataaagctgctgtgtgtattggcaaaatagagagtgaagttaacagtatcatggatggtgttgggctacagcctgaaagacacactatcctgaaaaagctgaaagagttattttccatgcgacagcaaggggtttcttcgcaggattgtgttgagtcaagcccagatcaatgtgtacctgaagaaaccctttcctgtgacccattagatgtcactgtggaagacaaaacctcttttcaggaacaccttggagaatttgatgagcttcgacaaatcattgctgatttatccaagagggctgaagcattggagaagaagcagaaaggatcagatcaagatctactttttttgagggaagttgttaaagattcaggaagaaaagtacagcaactggaatatcttgtagatgagttacaattccgatttgactcttcattgtctcttcctggaagcatgcacaatactttagccaagccatcgatatttctgatcggtggctacaatggtgtgacctggttatcatctcttgattctttttctcctgagaaagacacaatggtgggtctcacaccaatgagttttgcccgctcatatgcatctgctgctgcattggatggtcacatatttgcttttggtggtggaggtggcaagtcatcatggtataacacagtggaatgctatagttcgaggaataacgagtggatagaatgcccctcgttgaaccgcaagaaaggaagtctcgctggtatcagtcttaatagcaaaatatatgctattggtgggggagatggaaatgaaactttttcagaagttgagatgtttgatccataccttgggaaatggttatgtggtccatctatgctgattcctcgatttgctcttgccgtggctgaattgaatggaacaatctacgccactggtgggtatgatggaagcatgtacttacaatcagcagaacggtatgaccaaagggagggtgtctgggtccgtcttcgaagcatgaacacaaagaggggatgtcatgcccttactgtccttggagaaagcctatatgcaatgggcggatacaatggagacaagatggtttctagcgttgagatcttcgaccctcggctcaacgcctggaggatgggagatcccatgagcgccccaagagggtacgccgctgcagttactctggatggaagcgcgtacttaatcggtggcctggagtccaatgtgcagatcctagctaccgttgaagtttacaacgcgagctccggctggtcagttctcggtttgagttcactcgggaagaggtcctttgcatctgccgtagtcatgtagttactgatcacgatgttaactactgtcgataacatcaggtttaacatagtcgctgcgttatgcaaggagtagttagggtaaggtgggtggggctagatcacccttccgatgtgtaatgtgttgagatcttcatcaggggaaattcgcatggtatgggagactacggcccgtatacctttgaaccctcgtaggaagtcttgagaacccttgcatgcattcgctgttgtatgcgtgccatgctgttgaatttagctgtactacaccagatagtgatacccgaactcacggagtttaatggaaccggatagaaagctgcccatgtagtttggtgtttgttgcttacgttgtggattttactgtagtgacttgtctaatgctccgtttctccgtttggttatcgaccatattggagggcatggaattaaaataagttcaataccaaatcaaatatagtattgaaatagt

SEQ ID NO: 148 - DNA, 1550 bp, Zea Mays
gcgactatgatgaggcggaacccgggcgacatgatggaggcgagccggtgccggtgacgaggatcccacggccatggacgtcgtcaggacatagctgatgccggaggaggaggcgctccggctctgcatcggctgcgtccacttctagacttccttgcctcgcttgtcacctacaggaagcgatgcccaccttggaagaattttgggatgaggagcctagcgggttccaaaagaactagaagtacagattggttgaacttcaaacaaatacaaagagctatgcatacaagtggtggaggcctggtggtaaattgtttatcaagatcgctagagcagttaaatttactcctattatcttctgggatagatttggcaggatcaaggtcgttgtcgtctccaggtccatcaaatgcgacaaggtcgagcgcacgcaattcagctccgaagtcatctcctttcaacagaaagatgcaagtaacaccaagtcacttgcctttgatggttgatacatttcactgtatatcattgcacgacagatccatttagtacctttttctgagttaaactacttcaaacattgctgaagactacaaccagcctacagttgttgtaattgaagcgggtcaagacatagcatttgcaaagatttagttcattctcatcactctgcaatattcgggttctctactatgtgtaatctcatatcaagattaatgagtatcgtgatcgtataattttgaatcctatcaacccatatggcaaggcaaagaaaaatgacagtggacatcattctagattttacaaaatcaaaggagcaaccagacatggctgtcatgatctaagatacttcaacgtgattggatcgaacccaaacatatgactaggagaagctccaaggccactttgtcaagggtctctgcaatgcacctactggtgcatgatttactggaggttgtgcgcatgaatgtgccacacattggtatgggggttggagttgaagcaggtgattttcaccaacattggtttgcgaactggagttgaagcaggttattcatttgatgaaagtgggagagcagtccaaggcaaatttgccatgttggagcagtcacaggagccaaggggctgcagtcacaggtcctgctagccaggatggagcaatcataggacctcctagcagtccaaggaaaatttgcgaggtggagtagttgcaacttttgaaacccacgtgataacatgctcaagcgttcgtatgataaaaaagatggcacataatcaaaagaagatctcatgttctgcgtttgtgaacctgtttgtattttttgaacttgttttgtgaacctctatttgtaaacctgtaaaatctgaggttgtgaatagatttgggtaacttcatacaagtggtggaggcctggtggtaatcctggatgcatataaagcgaggcatgcaatatccatagcactcgtttgacagaaggcaacaccatcaaccttgtcctccacctttaaactagcatgagcaccatccttcttcacatttatattcatgtccc

SEQ ID NO: 149 - DNA, 2727 bp, Zea Mays
tggactctgacgggaattgtctggcggcttttgcggggtggaggcatcgacaaaccatcttgccgagcatcagggcacgcccctctacaacctgccatggaagataccctgcaagctcatgaacatggagctgaaggctgagccggatactgatgaggtgtacgcccaactcaccctgctccctgataagaagcaagatgagaatacatctgcaagagtggagaatgaggaggcagaggaggaggtggtgcctcatgtgccaccagccacaagtgaggggcttcgcatccattccttctgcaagacattgactgcctcagacacaagcacacatggtggtttctcagtgttgcgccggcatgcagatgagtgcctcccaccactggatatgagtcaacatcccccaaatcaagaattggtggccaaggacctgcatggggttgagtggcggttccgtcacatctttcgaggtcagccacggagacacctccttcagagtggttggagtgtttttgttagtgccaagcgtcttgttgcgggggatgcattcatatttctcagaggtgagaatggggagttacgtgttggagttcggcgtgcactgaggcaccaaaccactatcccatcttcagtcatatcaagccacagtatgcatcttggtgttcttgcaacagcatggcatgcagtgaacactgggagtatgttcactgtctactacaaaccaaggactagtccagctgaatttgtggtttcacgagctaggtactgtgaatcactgaaacgaaattattcaatagggatgaggtttaggatgagatttgaaggtgaagaagcggcagagcaaagattcactggcacaatagttggaatatgtgtttctgatccatctggctgggctgactcgaaatggcgttcccttaaggtgagatgggatgaagcttcttctgttcctcgtcctgaaagagtttctccttggcaaatagaacctgctgttagcccatctcctgtgaaccctcttccagtcagattcaagaggtctcgttcaagtgttaacgcctcaccatctgatgtgtctactgtaaacagagaagttgcttctaaagtcatggtagagtcgcaacagaataatctcccaagggccttgcacaatcaaggaaggacacaattgacaggtcgataccgtgatagcactgatgtgaagactgctcaggatcttaccatgtggtcttcaggaactgagcaacagagaaacaatattgctgcccagacaaaacgatgtctggagggttggacgcaatctagaactccagaaggttacaatcaactgttctcggcatttcaaccactgaaggatgcacataatccacttcgtccttttcctaataaaatatctgggactcgctcaagtacctgggtcacagccgatgcccgttatccagctcaacaagccaatcacaacatgttacatggcacattgtcttttatgcctcatagcagtggttttaggatgattcaacagaataatctagtgacacctgaagctgcaaattttactgggaaatcagctttcacttcacttcagggccatgtcactgatcagtgctccacaggctggtttggatctattgagtcaaattcccacacagaccatgcatcgtcaagtttgatcaggtcccagcctttggttattggaaatgatgttcagaaaaccaaaggcacttcattcaaactatttgggattcctcttggcagtccagaaaaatctgaacctctggtatccccaccaagtgtcgcatatgacgggaaacttcaaacttctccaacagacaacaatgagccttgttcagaagctacccagaatatccagaacaaagtgcaaagtagttcaaccagaagctgcaagaaggtccataagcaaggcagcgccctcgggagatcgatcgatctaacaaagttcgcttgctacgatgagctgattgccgaactagaccagatgtttgacttcgatggtgagctgaagagtccttgcaggaactggttggtcgtctacactgacaacgaaggcgacatgatgctggtcggcgacgacccctggaatgagttctgtgacatggtccacaagatcttcatctacacaagggaggaagtggagaggatgaacccaggcgccctaaacgcgaggctcgaagactgcctgtctgactcgctgggaagagggctggcttccaaagagccccggagcggcccctcgacttcggctgtcgattctgagaaccgcgctaacttgtccagtcagtgagcccttttgaaagtggtgaagcagacaaaaggccacgtgtcagagtgaccggaagaacgagaaaggggtgtgtttcagtggtgtgtagtaggtaggtaattttgtgtgtatgcctccgggtaaaagccccgcggtacccagtttgtagatggtgcttctcctggtgctagtttcccgtcgtaagctggatttttttggggggtgtgtgccctgctctgtgtgctgacccgcctgggggtaagttgtagcagagcaggagaaagcaggcaagaaaccgctggtgcgcctgcttggccaatccttttccttgcggagcgctgtaaatagccttggatctgaagcgtagtaatgtattgtcatggtactcgaagtcatgctccagtttgtgttgggtatgacctgcaactgtcggttcgatgggtgcggat

SEQ ID NO: 150 - DNA, 1136 bp, Zea Mays
agagctactgcttgatgtatctgctgggaagaaagtggaagaggaatttagcacttgccctctgtcagtcctaatgatgagcgttaagaacaacaccaagatactgaaagcaaacatggcttgttcagtcgggcagcggcagcagaggggatggggccaatgacggaggcggagaggagaacccatcgatttggtggcgtaagtgggagctcatcgaggccgccaccggccggtccacctcttcaataatcgtccttcatcgcccttcagttgacctgagatctagaaggacacaacaggcaaggtggatgtattcgtagttgattatatgttaaaagcaaattttggatgacattggtggagattgcttatctctaagacacatctactcattctttgaatggaaatcacatccacgttctagaaagtctatttttacttcaaaaaggggcgagggttgttcagtgctttgacatgtgtgcaactattcaagcacaatggttagatgatatccccattcattttagattattacattgtggtgttcggcttcttcagtcaagcagcaatcatgcaacatgccttactgtagttttttatcactgcacatgttgctggacaaatttatggactggaggattatagaggactaacaagtgctactgggagattctcgagcaccattgaactaagagattccaaatagttctttggagtctattgttgatgttggcggggataatctagcagagatttgtcagattttttgtgcaacacggaggctacatgaggcagcaacgatcccattcttctcgcatgccactttacacaagctaaggatagcttctggtctcactcatggttgtggcagggaaagccgagtcagtagggtttgtcatgtagctggagttatctcagaccacatattagatgcagtgatgatgttaatggaggatgtttacatttaccgtgcaagcaagatgacttatattatgccttaggacaataagtattgttttcactctaatgaaatacttggtaaaaagttgtctctgtagttgtatatttgactgtgaatatttgaacccactgttacaattgttgctaattgaggtcagatttcagaggccaaataa

SEQ ID NO: 151 - DNA, 1208 bp, Zea Mays
ctccgtcatgacttttttgattcattcttgacattgacactgtgggtacatacacaatgtgttatgaagccctcaagtatctcaaaaagggtggaccagggagaggtccttcctctggtggcctcatcattaacataagcgcaacgctgcaatacactgccgcttggtaccaaattcatgtctctgctgccaaggtacttggaccttctctgaaccgctctgcaagagaaaatcgatgaagtgtgtagatttctgctgattgatcggcttctataggctggcgttgacggtatcacaagatcattggctctggaatggggaacagattacgacattagagtaaatggaattgcacctggaccaattcaagacactccaggaatgaggaaacttgcacctgaagaaatgggcaataaggggaaacgagaaacgatgccattatttaagcttggggagaaatgggacatagcaatggccgcactctatctagcttctgatgcaggaaaatatgtaaatggggctataattattgttgacggaggtctttggttgagtcgccctcgccatattcccaaggaggaagtgaaggcactctctaaagttgtcgagaagaaggttagggcatctggtgttggggtgccatccagcaaattgtgatgacatctttgactacgtagctcttcgatgtgttctgtacaacatatgtctatattgttgtcccactaatgttgtcagtttggctatgccaccagtccatgcagatgacttgttagggcttgttcgcttatttttaatccatatggattggaggggattgatatggattgggggagattttcacttactagggattaaaaccctctcaatccatatggattggggtagaaccgaacatggccttaagcggctgagcagtccatttagttgaagaaattcaaatatttattactgttgtcgtccaatttgtattagaaatagttgagatcggtatgggatcccaaccaagaggtgcgtattgccaaatatttacatgctgtctattcaggttgtcgattaaaagggtcatattaaagatttaacagtttgcgtctccccactgttgcaactctatgcaaatggttcacctcaacatgtgtgcaaatcatgacaaattggatgccggcagttgcaactagcctgaagttcagagaaataagagaaactgcatg

SEQ ID NO: 152 - DNA, 644 bp, Zea Mays
tttgtggctgcctgcacacctttgccacaaatcaatctgtagatcccatggcagcgactagcgagttcaaatgcttctgcttctgcatctactgaggccagtgacagcgaaggtatttattggaacagagtttgtcggtggacaatctctttgtttttgttctggtctttaagtatttcaaagtgccaaatgaataccagaatcgagtactttcttatggtattgctggagctgtggtcttccgggctgtgatgatcatcctaggaacagctaccatccagaaatttgaggcggtgaatttgttgttggctttgatcctgttattcacttcttacaagctctttgctgaagaagaagaagaatctgatctatctgataacttcattgtgaaaacatgccaaaagttcattccagtcactgattattatgatgataatcgttttttcacaaatcaagatggtgtatggaaagctacaccattgctcttgactttggcagtgattgagctgagtgatattgcctttgctattgactcaataccagcagtttttggcgtcacaagggatccacttataatactatcatcaaatatttttgctatttctgggtacagttgctgcacttctagataatgtcaagagcta

SEQ ID NO: 153 - DNA, 1311 bp, Zea Mays
cggccggggccatctccaccgtacgtccactccatccgcacccagtctcggcgcctcaccccccaaaatcctctcgcggtcgcggatcgctcttccctccccctcttatctctttctcttctcccattccttccttccactcccccgcccagcgccaccatggcctcctccgtcgcggtgtccctccgcgccctcgctgccgccccgctccccaagtccagccccgccacttcctgccccttcttcgtgctccttgcgccggcgctgccccgacgcctgctccgcctccgctccgcacgccgcctgccgctcgccccgctcgccgcctccgattccgccttcgagtcctccgtcggagttaactacgcggagcccgacgactcggagaaggataaggaggtggagttgttcggatcgggtgacgacgagggggcgggtgagttggtggatgaccattccgtagaggtctcagccgctgtcgaggacgaggtggaggaggaggtcggggagtacgttgagccgcccgaggaggccaaggtctacgtcggaaacctgccctacgacgtcgacagcgagcgcctcgctcagctcttcgaccaggccggcgtcgtcgaggtcgcagaggtcatttacaacagagaaacagatcaaagtcgtgggtttgggtttgtcactatgagcactgtcgaggaggctgagaaggctgtggagatgttccatcgctatgatgtcaatggaaggcttctgactgtaaataaagcagctcctagaggctctcgtgtggacagacctcccagacaatctgggccttctctcagaatttatgttggcaacctgccttggcaagtggatgattctagattggtggagttgttcagcgagcatggtaaagtagttgatgccagagttgtctatgaccgagaaactgggcgttcgcggggatttggttttgttactatggcatcgcaggacgaattggatgatgctattgctgcccttgatggacagagtttggatggccgtgccttgcgggtgaatgttgcagaggagcggccacggcgaggtttctaatgagtttggctcttctgctttcttggcgagatcatgttcacgaaacgtacacttgtagctgccagccggcggtggtgccaaaatacacaaacaccgtatcaatgacacatgggccacatgctagaggaagctagccaatggctcgatgatgtacaacatttatagagaagggatcccatttaggacttgttcggttattttcaatctatatggattagagatgattgatacggattgaag

SEQ ID NO: 154 - DNA, 1693 bp, Zea Mays
ctttttcaaaaacaacaacaacaacaacaaccagtgaccattggcggaaaaatatgtctgttctagccatggcacacagggtatatgctatagatctaattggttatggctattctgataagcctaacccacgtgagatcgaagagaacttttatacttttgagacatggggagaacagctgaattcattttgtgctgaagttgtccagagtgaagttttcttcatatgcaattcaattggaggagttgttggtctgcaggcagctgttatggaacctaaaacatgtaagggaattgttttattggatatttcactaaggatgcttcatatcaaaaagcagccatggtttggaaagcctttcatcaaatcttttcaaagtctcctaaggaacactattgttgggaagctattttttaatgctgttgctacaccagaatctgtgaaaaatattctttgccagtgctatcatgacacatctgcagtgacagatgagctagttcagattattctacagcctggtcttgatcctggagcagtggatgtattccttgagttcatctgctactctggaggacctctacctgaagagttgcttccattggtgaagtgtccagttttggtagcatggggggagaaggacccatgggagcctgttgagcttggaagagcctatgcatcttttgatacagttgaagattttgttgtcttgccagatgttggacactgccctcaggatgaagcacctgagcttgttaatccacttgtcgaatcatttgtccagcgccatacttagcacatgggcgagcatctttcagggccctgcctgaggcagggcgggaggagcggccgacctgggcccccatctcccaggggcctaccgtacacaaagttcaataggaatataggatagaaacggatattatttactataccaatatatttttgagtttgttaggagaatggattgctgtcccaatatatttgttgtttatcggatattatttactataccaataactgtggcatcagctgaaaggagcttctcaaagcttaagttattgaagaattatttaaggtctacaatgtctcaagaaaggttaaacgaactagcaactttatgtattgagaagaaattattagatgatgtcaatattgaagccatcattgaggattttgcatctagaaatgttagaagatatttttaagttgatctctacaatatatttgaggtaataatcttacttctattttttactgctcaagtctttctgtggtacatcaaatataattagttgatatatataatagtaaaaaatagtttttatggtgttgagacctctatttataatcttgtcccgggcccctcaaaagtcaggaacggccctggcatctttctatgtttattaatgccctttcccagcagggcctcgtgctggaaaatgtgaacgtaaggttatgttatttacaaatgggtcctgttatagctactgtaagtgcttcccactgctaaactgttaacaaaagacatgtttgcctggaactgactgcaaactgtttttggaggactaagttttgcccttgtgaattgtgacctgcagtacttgcatctgagagccgggggcaaacatcatttgacagattataatttgattataagagatcatgaagaaatatttgatttcataacagcaa

SEQ ID NO: 155 - DNA, 970 bp, Zea Mays
gcaccttgtgctgagcactgggaacggagtcaatggcttcactctcgatccttcccttggagagttcattttgactcatccaaatatcaagataccaaggaaagggaagatctattcagtcaacgaagggaacgccaaaaactgggatgggcctacagccaagtacgacgagctagggggctcgtttctgtccaaaaactactactgtgatttcgtaacaagccaggctgaattttatgccgtttcagattcgtggagaaatgcaagtatcctgaggatggttcaccgcctagatccttgagatatatcggaagtatggttgctgatgtccatcgcaccttactatacgggggcatatttttgtacccagcagaccagaagagtccaaacgggaaactacgcgttctgtatgaagtcttcccgatgtcattcctgatggaacaagctggaggccaggctttcacaggcaaacaacgggcgcttgaacttgctcccgctaaacttcacgacagatccccagtgttcctcgggagctacgatgacgttgaggagatcaaagcactgtacgcttcaatgtcaaacagcggttgacctttctgcctgaggaaacgagcgagatcaaaagcaccgtacgcttcagagtcaactgcttgatctttatagattgtaataaaataataaaagagtttgtaaaaaaaaacaacaacactgcttgatctttctgcatgaggataaaaagcgcatagtttccccggttggatatatccatcagatatttattatgttgttgccttctacacaaatttaacgtgctttcgtgattccttaatgcaactttggattcatgtacggagggagtttatgtgaagacatattacttggtgcagtttatctccaacaaaatacaaaaaaaagaaccttgtgcagttatacttcagtcttaatgtcgtgttcatcggatttgtgacgc

SEQ ID NO: 156 - DNA, 4450 bp, Zea Mays
attgccctcatcgctgactctgaaccacgttgccacagccacatctactagctctccccaatccgaaccgaagccacacacccacaccatatctgcaccagccatcctcgtgatctctctgtctcccatcgccagccgccaccgcgccctcctcccaccggatttagaggcgattcatgggagtggtgcgcaggctgctactgcggtatcaatggaggctgactgccatggaggatctgagcatcgaggcgaaggaggccgcggtacgcataccccatcctccgtgtggcggcctccctccgagcacccacccgccccaccccctttcttctccctccatcgcgtcgtcatcatactacagaaagtacaaggaggacatgttgatggtctccatgatggaaggaccacgccgcacggagaagcccaccggtgtcatcttccgcaaggtccgctcggtcgtccatgtccgttcgtcctcttcctgggcggttggcgcgtgatctggcgagacctcccaatgggtcaaaatctattttgtgcttggcgatgtattccttaaggaccgccatgctcttctcctttggcgcggtcagctgcttcgacaaaggataccatactcattgttgatagcaaatgattgggttccctaaaccaggttaaagcgaatgaaatgaaccatcatctgtaacaaggtgctatatcaatgacaagcagcaacaaagcgtaacacactaaaggcaagtttttttaacaacctttggtctaatatttgccattataatagcatatagttgtacttgtagaatataaatagcagatacaaaacataacaaagcatacctttagtatatcttgaaactatttagtgtataaataaaagtaccaattattcaaaacatatatcaaagtttcattccaacatctggcttgaatatgtagacaaaatgatttaaatagactaaccaatgatcaatgttagtggttctacttcagcaattgtaaagggatgcttattttttggtcacgatgcggtgtcgtgctttcagccgtggaattatgtttaatggagtggtcaaaatttatgccgccatgtcagtccactagatcagaagcatctgtgtcctgcggcagcatgatgggctcacctataaacaaatggataagccttccctgacccagaacagaagaggttcaatggttcggcatataacattagaagtcgattgttttttcctttattttttggagggcagattcatatttgggcgtttggcacaggctttggctcaagtctacgacatcttaaaccattttgtttgcagtcatgcacggagaagacagaggaattgcacccaacaagcccttgatatccaaggaccacgagcgtacctaatttgattctacagactgggtcgatctctctatgattaacaaacacaataaaaaaactatatgtactaatcgatttataatgtttgtatgtactaatcgatttataaggcttgtatatactaatcgattttataatgtagctgctaggaaaaattcagaactgaaataaaggacacaacaatttttgccacttcagcaacttcatagcatgttttccaacaaggatacaactccaagaagaacgatgtaataatcgcttgtatccgctatgattattgggattttcttgctatttggtcttgttatctgacttgcatggtgctgttgcaggttggtctgttatgaccggtcgccactacaggcgccgggcaacagcataggcatgcagataaggattataagatgataatgattagaagattaaggagataagatttgttagagagaaaagagggaatttatctcattagataaggacaagaagggagtataaataattctcaaggtcgtgtgaatgttgccgctgagtactacaaacaacaggtagagatgttagagggttttagtgagatgggcgcatttacagatcatgctttcctacctgtaatgtccaaggtatgttatatatggactttctgtttgaacattagggaaggtaacttatgtggatgttaataatcaaattttcttcactatattttttcttctttttaatagtgacgacatcaatagatatctggccactttattgacctgcaggaagaacacgaaaaagttatcaggagtgaaccattagccatatggttgtctaatattgcaaatatggttctctttgctgcaaaagtgtatgctttagtaaggagtggttcacttgctattatcgcatcaactttggattctcttctagactttttgtcacgatatatcttgtggtttactgccttttcaatgcaaacgccaaatccctatagaaacccaattggaaaaagcgtatgcagccgctggtgagttcttttttgccataacctgtacttccaaaaatgatggttgatgttgacatctagatctattgtccagaatgttttgtactcttttctgcgaaaatgatttacttatcttttacgtaatctgaattattgtctctgcattttgaatagaatgagcattgctttccatgtttctttctgaggcaaacaataaagatctgaattgacaggaaatcaataaacttactcaacactgtgtgctcactactcagtaattcttacttactggaatataaattacctgtctataaatactaattgttgagttcatgattgaagtcatagaaccatggaccctttttatccagtcacctctgtttgaattttctttaagttaatgatgaacttgttatgacttccaatttgacatttgcttttgagatgcgttgtcacttgttggggcaacttccatgtgtcaaacttttgtttgtcatgcctttttttcatattcttttttctttcaactttactgggattttctaatagatcgcctcttagttatattgttgatttgtgatccttccaaaaccatactatcacctaaaaatgatcagttcatccagcaatgttttgtttgtctatttcttgtcatggtgcacttattagaattgttgcccacttttactttttacatctgataatatgtttaagaaactatttttacttgattcttgacttgtagatacctttttatttctgtattgtatcccacaaactttcctgctagatattcagttgatgttttgtacttgtatataccttgtccacataaaacttgtgtgatatacttttatgaaattgatacatatgataggttgtttaatgttttagagaaatgctcttgataaccatagttggtcatatattatagttcatctacttaaacatattgtagcttaaccagaacactaaagttcaaattccttacctttcaatgctcaaggtttttatgtcttgtacagtaaatgcggccatttttgtttggtttgagaaaaaaagatttttttgttttgtttgaggcaaattctcaactgtgctgcagtgtagtactgtagtggcaacattttacttctgtcacgttgcagcaggtggccccaaagatctgagcagcaattgtgatttagtgaattaatggtaaccctgcaataataatatctgttttatgacaacaactattgctaaagaattagatattgatgaatatcgtattgatatactatcaaattttagaaatatatttcgtttttcagaattattgttgaatgcaaacaaaacaatgagatatctatatatgtaacacaatttttcgtcatacttatttggttcagttgtgctctacgtttcaaagcagggctgtgatgattggttgttaaatgatgtaggttaagaccatataaacagttgtaattaaattctttgctatatagaaatcatagcaacgcacgggcacttaagaaacggagagggggaggccgttgtggctttgtgaagcgcttcgtcccgagcgggcgtgggcgggtatggcaccacacgtatcagccggctctgttgtggtattttaaaaaatattttaatttaatcaataacattcttaatttcttacgtacccattttaacctatatatctatactatattaaagcatcagtttcaacggtcgttctgcgtcatatttttacagataatccctcacatctatttcaaattaatacgctgcacgtctgtctgctctgcgcaaccaacctccacgttacaaaacacaactccatatatagatggctaaacagcggttcggcacggtcctgacgcccacgggccacaactctggcctaggcatggcgtgccggcctgctgactgtatcaggtcatttggttaaatcagtgtaaaatgttaaaaaagtagtgaggaggtggggttcgaacccacacattgatggaagaagggcggaagacactgagtgaagctatctaagcattagaacatcatgctcagatgtttttattattaaatat

SEQ ID NO: 157 - DNA, 2641 bp, Zea Mays
tggccaagtacactcacccgctcgcgcgcgtgagcgatgaaagctctcgcctcgcccgccgcctccttcctcccgggtatcccgagccctagccatctcgcgcgcgcgcttccccgatccgcggcggccgcgctctcgcggcccccttccgggcgctccatcgccgccgcggccgcggccgccacaggggaccactggggcgccgaccaccagcactaccacggaggacgcgcgggcgcgtcggaggccgggcctaccgcgtcggcgcgcggcgtcaagtgcgacgtggacgtggtgtcgtggcgggagcggcgggtgctcgcgtccgtgcctgtggccgccgacgtcgacacgctgtggcaggtcatcaccgactacgagcgcctcgctgacttcatccccaacctcgtccagagtgtgacgattccgtgtccgcatgaagggcggatatggctggagcagagaggcctgcagcgcgcgttgtactggcacattgaggcgcgcgtcgtgttggatctccaggaaatccctgactccgataagtgggatgggaggtcctctagtgcagttttgctgtatgaagttaatgtgataccaagatttaacttcccggctatatttcttgaaaggattataaggtcagatcttcctgtaaatcttcgtgccttggcttgtagagctgaaaagatttatctggaaaatcaaggatgtggttcaagaaaattttttgttgaggacttgaagccatcatatacttctcagcttaataacttccatagtacgacagttgagacttctaagtttaaacaagcacctcccaggtctggtgttagcagtgtgcttccttcaccttcttctgaattgattagcaaatggggtgtatatggaaacatatgcagaattgataagccttgtgtggtagatgagatccatcttcgaagatttgatggcatgttggaacatgagggggctcataggtgtgtttttgctagtatcactgtgaaagcaccggttcgagagattcgtaccaaacctggctatcagtaggattgttcttcgtgataataacaaggttcggataatgcaggagggttgcaaaggcctgctttatatggtccttcacgcccgtgttgttatggatcttcgcgaaaaacatgagcaagagatcagctttgaacaagtcgagggtgatttttacacatttaaagggaaatggcgcttagaacaacttggggatcagcacaccctgttgaagtacatggttgaaactaagatgcatagggacacctttctctctgaatctatccttgaagaggtcatatatgaagatcttccatcaaacttgtgtgcaatccgtgattatattgaaaaggctggagccaagagtagcaattccacaggtcattctaatgtgcccacagatccagatccagatgttgatcatgatgaaagcaggcaatctgagcaaacgtgtgtgtcttgctcatccagtaccatgaagcagagaccaaaagtcccaggattgcaaaaggacatcgaggtcctaaaatcagagcttgataatttcattgcagagtatggtcagtatggtttcatgcctaagagaaagcatctccggtctcatggaagagtggatattgagaaggctataacaagaatgggtgggttccggaagattgccagcataatgaacctttctctttcttacaaaaatcgaaaaccaagaggctattgggataatctggagaacttgcaagaagagatcagccggttccagaaaatttgggggttggatccttcttatatgcccagtagaaaatcttttgagagggcaggtcgttatgacattgctcgggcattggaaaaatggggtggggtgcaggaggtttcacgccttctttctcttgaactaagatatcctagaagacaagcagacccggacgatgagagacagtctgaatccccgtctgggatgatgaagaagcacggagtgaaacctgatgaaggcaatgtttccccaaatgcgcagaaatggctcctgaagctgaaggacttggatgtcaattgggtggaatactaggtttagctttggaaaaagatatggtctctcatcatgaactcagctctttcctttcttcggaggtgttctggatgcattccgacaaagacgccgcagattgtgtacagaacagcgcggtgcacgggccaaccccattctgaaggcgagctaccagcaggcaacatgttttcttgccagtaatcacgactcttggctactactgcgtatctagaactgctgacaatactactcagcttcttttgcggtcaaaccgatccatggttttgacaaagtcaggccataaaatgcagaaaagggtgtcgatttcgtgcgcctgttcaaagctgttttgagtcagccacgcctttgaaaaatctgaggtgttcacaggttggtcgcctactttgttattactggtgatataagttgacctggtccttttgaaagagaaggtttacccgtctagtaatagtttcagtcggcacgtttgcattacattggtctcgatcaggaggcacagctacatactttacgtctttacctattgctgcttcaattcttcatgggatgaatgaaaccgac

SEQ ID NO: 158 - DNA, 1435 bp, Zea Mays
atatacacagtgtctcggagttgctcttacaacccgtagacagtcgcgcaaatgttgcgagcggccgcgtcgaggtgcgcccgcggcgccgtccggcggctgtcgtcgtctgcggtgatggaggcttcaccagtcgccgtggggtcgcggtggcagtctctccttgacgagggtgactggtcgtaccatcgggagtggtggggcgaggaggacggccccggcgagggcgtgcagaccgtcttccgccgccactccgagtgcggcaacggcgtcgtctccgtctccgcctaccctgcttcccttccggctagtgagcattggccagccatggagagatggcttcaagagagtaattcaagactatacccagaatcagccagctctgaccagtttaaggtactaggctaccagtggcgagtgatgcgttttaatgaccatacacggcaaagcactgcaaaagtgatgacatgttataggacttcgggtcagagatcattattcttgatgcagcaaccacatgttttagctgttccttatgtcaagagtatggtatcagcaggattgacagcgctctcatgttcttcgtatgatctaccacaagcagcatctggacagaacaccatgaaaattctgtgcatcggccatggtggcggcagcttaccattgtttttggctagcaagttcagaggtgctaccatccacattgtggaaatcgatccggtggttgtttcagcatcagttgaatccatgggtttccccgcgtcacccgttaaaggcttatcgcccgagtccatgctaccttccgacgccgacgacctattatggggaggcatacacgaccgcgtcttcctgcacacagcagacgccgaggatttcattggcagcgacggcaacgagtatgacatcgtcttcatcgacgcctacgacggagacgacgtgttccctcgcaagctctgggacgtggacggggcgttcatgaagagcctagagaagagagtgcaccccgtccacggcaccgtggtcgtgaacctgcactccgactcagactccgaggccgcggaaggcaacgccgacttccagagcgcgcttcccatgggcaggcacgtctcccaggtctgcagggcttacatgcagcacttcggggtggccttcacggccgcggtcccgtggctctgcaacatcacgctcgtcgcctgccgcgccggcgggatggcgggcggcgcgcgccgggggctgagccgcagggatctcgtccttggcaagcttctgtccaagtccgacacggtggagcgcgcgctgggcctgccgttcccgtgtctgccctacatcaagaacggcttcacgatggttcactgacatgcatggggtttatgtggaatttggttattttgaatggtatgttttggcctggaaaccgccttgttttgctccataa

SEQ ID NO: 159 - DNA, 1345 bp, Zea Mays
cgccggttcgcccacctggccttcagcttccagcgcatcgttcttctccgtgctcgccagtgggttgctgacagagatggtagtggccgccgcggccgcactctacctcgctgtaaagcccctgcccctcgtcctcgtcctcgtccaccacagccgccccgcgccctcctccgcgctccgcctcccccgccgaaccgccagcgcctggctgccgcgcttcccctcctgctcgacctcagcgccgccgccgttcgcagccgtcgcatccatggacgcgccgccccagggttaccgcaccaacgtcggcatctgcctcgccgacccatccctcaccaagattttctcggcttctaggatcgacattcctagcgcgtggcagatgcctcagggtggtatagatgcaggggaagaaccaagggcggctgccttcagggaattgagagaagaaactggtgtcacatccgcagagatcgtggctgaggctcctgtctggttaacatatgatttccccatggatgtgagaaccaagctgaatgccaggtagggaaccgattggaaaggccaagctcaaaaatggtttttatttaggcttactggaaatgatgatgagattaaccttaatggtgatggatctgagaagccagagtttggtgaatggacatggatgactccccaggaagttattgaaaaggcagttgatttcaagaaacctgtatatgaggaagcattgaaacactttgccccctacctacagtcagatcccgccgcttcatcatagaagattcgaccaatttgcatacattatattttttttttatttggaaactaccctgctgtatctggacccccaataatttgacacgacgcattggagccatggaggtgtgctacaatttgatagtgtgtggcctgtttcagtgaattatatatgccagcattggatcctcgccctctacttagtcacataagtatacaataagtggtggaaacagtttcagccaatctggaacatggtggccagtgtatcttgtctgccaatgactgaatgctttaggttgaagcagtaccataactctagagagactgctgtacagcaacctcaggtttatagcactggctacggcagataccagtgtctggctggctggctggcatttgttgtggggagcacagaggaaaacaaattgttggttacactctgtactactgcgtcatgatattgtcggctttggcttttggaggaactggagatttatttggcagctttggctttatggttcttggaggaacaggagattcacacatgcattttgctttttttttttttttttttttaatgcagcag

SEQ ID NO: 160 - DNA, 1117 bp, Zea Mays
caaaaaaaacatgtgtggcgcgcaaattagtggctgccccaaataccagccgcgccgccgcagcccaaaaccctatctcccttcccgtaattccagtcgtcgcgctccacccaaaaattgatgccgccgccgccaatcgccgtccacagccgcgcgccctagccggccggttgcaaccgccgtcccagccgcgcgcccaagcaggccggcccccaacgccgtcgccgtgatcctattacctgatgcggcggcaccaaacctcgcaaggtcgaagcccgtacgccgccctttgtcgcccaccgacacctgaccacacaaaatggataggtttttttagcagcaaacaagactttatcgatgtagttgaggcaatattcagaggtgcgatgaaaggcaaactgatagtgtcttgcccccttcctcctgagaggataccaagattctaacttcttttcaaggatgtctgagaaaactgcagctcatcacgtgcacacaatcagctacctagcccaaggtttgtatttaatcacgttcatcaaatatgatgggtatagatttcttgtttggtctactagtcaagcaagagaatgcccttcgttttgctgaggatgcaaaccagttgtgctatggcacctgcctttagtgtcttccttacttcctattcatatggcgattctatgagtatggcacgagcagtagaagctataaaggtaaaattggccagctatgcataactatgaattcccaaacacttgttttgaccctttttgtttgaccatcattttttatttgcacgtgaactgctcaaattatatggtacaaatgtcttgggttagagatgtaagttttttctgaactactttgtttacatgtgttttcagtatgcaaatattgctatgtctcaatttataaagcaataaaaagtcattgttgtctatttaacacgcaccttctgtgacaatggccatttcgtcacaattaatggcgtcaccaaaatactacctatgacaaataaacactagttagtgacgtaatcataatgtcactgaaggcctaaaatgttgtagtgtattttgagtagcagcaaggtgtccttgagtagcagcaaggacacttg

SEQ ID NO: 161 - DNA, 2584 bp, Zea Mays
tctagtatcaatcaaaatattcgggaaggattgcttgaagtattctatggagtttatgaaaaggatcctgacaaagtgcttcaagcaatggttcaaatgggtgtccttgttcctactggagatatgactgttgtcagaagaaccgctcaatttttccttaatagctttcaagagtgcctaacagcacaaaggaaggagagagaaatggcaaccgcagaactgggtttcaaaaagcaattaactaaggaggagaagtttgaaaagaggaagcagagacttgctgcaatcggagaggatcttttggcgattgctgctgatcaaccatttcgcttccctgccacatttacatttgtggtcagagcattctcagttctagatggtactgggaaaggccttgatcctaggtttcatattacagagattgctaagccaaatgccaaggaattgctaagatttaatgacgctggtgttgaaatagttgtgaaggcaagtttcaacatttggtgtgtggagagacatgtgtattcctcctatgacgaattccttaggctccatgaagtgtatcaatttgtcttagtatttttattcgtggggatgcctgactcaaatgaactcatgttcaacactgagcaacctacttataattttggagcctataaaatttctaagctaaaaaaggtaataaaaaggaatgatattatagtcacatcatctgaacaacagtgaagggaagggagggatagatggtctgaatgcctataaatgtcgttcccttggtctgcttcttaaatttgaaaccaagatactatagtcaaatacttctaaacttgaagcctgtaaattggaatcaccaagttaaataagaacaggggtaactattcatagctcagatggttgtcatccaatacgtgcgctaaggcacagacaggtgaggttgcatattcaatccccaagacagtaaaccattgaggcatattaaaacacattttccatgaggtttcctaagtgatcctttaggtaaacagaaccatacctagctccatatgaaactatttcccgatttgaagtacacctaagttaaggttcatacattggagctctggcagtaaaacaatagtccttaccttgagacagcttagattagaatgaggtggatggtaatatggcatgagcaacataccacagttcatgcatggaggaaatcatttttactttctttcctagccatggtagttgtgttgctccttaccaaggcactacatggagcatcatatggttcatgatgtaaacatggttttagatctgtctatactcacactcaagaaccagccaaaatgtgatattccacaacctgagagaaatcaaaatgaaatcatgtacaacatagtacatatgatgatgtgcggtgatgcgggtgcatgtgtgttgtgtgtgtaggagaggagggcgcagcttgattcaatccatgtcaagtcagaggctgctgcgaggtttgcacatgcaagtagaatttagatggtcctgcttcgctttcatgtggatttatcttgcaaatggtatgtggatccgttccagaggcaatgagccttgcagccagtttgcagtataaaaaacccaattatgtccactgttggttcgacgcagcgtgtgccgaggatttctactgccaagcataagaaagtgaattgcagataaatggtctgttcgcaactggtgctctcgggcgactccatcactgagcaacccttcgccccggtggctgcggtgtcgcactggctgacacctgctcgcagttgcattacaagttttactgactatgtattttcaggtttattcaatttcagttgtaatgcttctgacagcagttgtatcagtcctcttgttcagcttccataataatgtactaaacttcagtttggtgtctatctcagtgtacctacactcagttggaaaacttcaaccacactgcaacaaggtttataaaaggtactgttactattgttaaaattagtcattttagctatccgcttctatttcaccgtgcttgcaggtttgctatgaggaaaaacaaatttatgggctcaaacaaagtgtgatagtgaaagtcattttgcttccagcttaagaaccaagccaagaaaacagatatcaactgtgacgccacactcaaaagcttgtttggtgagagggataaggttgggatgctggagatctctaagcttttgagccgtggcttcccgaaaatctccaagcttttgtggtccatggagccagggatggctctttggtaaaagacttcgttgtggatggcctcttttatggtccatgttaagtcccaagtcccactaggtggttaagcagaaaaatcttgtgatggcattaagactttcagactttgtttttgggtctgatgcatgtaaaaaggattcccagtgtttctgttgctcttgcgatcctgtgaggacacatatgagagaaatatttagtttgttgatggcaaatcttgtcttatgttcatgcctgtacctatctgatcaagcgttatgatatgatcccatgcgtggtactgtgttctttagagatg

SEQ ID NO: 162 - DNA, 1611 bp, Zea Mays
atgtgattatcagcgtccctgccaagtggggcagccgagcaagcaagcccacttcaggcgagtccatgaggaccatgaccacgaggcggaccagcccaagcccatgaacgcgaaaacaaaccctagccacgaggtcggcagtcggctcctcgaccggacgacgtggctgcgaatctgcaggaggaggaagaggtgaaatggtgaaggccgcgacgtggctcctcgatcggctcctctacgtactcaagcaggacaagggcaacgacgccaacaccgcgcgtgaccgacggcgaaggaggcgtgctccggccggtggcgccgccaacgccgttggaaacgatgatggcgaggagcagcacctcaacacctttctcgacgctgcgaatgcgtcgtccgcctcctcaagggtgcagttcaggaatatggcgtcgcgcgcgcggtgggtggaggaagccggcgctgcggaggtggtggagaacaggggcaagctgtggctgaccaccggtgtcactcgggccggcaagctgtactacaacgttgaggagaccgggttcttggccgaaatgggtgccttgattcttctcaatgataaggatgagacgataggaattgaagatatctatgggaagcttgctggaggaaattatgggtgctcctgggataccttccaggcatataagcacttgaaatcacttggatatattgttggaagatttggtgttccctggacaatgaagcatggtggtactcatcacaccattgctccccagatcaatatacttgagactgatcagagcttaaatagagttgacggagcctccaatgacataaccaaattgctcaaggaaatacagattgacgggatatgtccatcttttgaagtttatctgccaaatagcaagttcaaaaagtcatccccagggtgccctagtttcctcttatgtctattaaggggtaaaccgccctcaagggttgaattggaagcagtggaaaataatttcagaggcattcctctgaagtatgctcatgtggataatggacgggtcagctttctctcctttgatgaagttacactccccagcttgccctgatgggtagcagcagaacatgtgaagtgcaaaagggtctgagcttcagaacaatcttgtcagaaatgataaagggtctcagcttcagaacagtgtcttgagatgcattcgccgcaagcgcagggggggcaaagtatttcagtactaacttttgaacatactaaagtatggaattccctggagtctcacaatccagcgatctgttgtacactccagattgtatgttggaaggagaaatcatgtctagtcttcttgttcgtctctgatgattttgtttctgaggctgcacctgtgactttcggatttccaactgcaacaaatgctactctcttcctagttcctagcctcaggcttcaggtgctcgcgagtactgagggtgtcaggcactgaacaaacaccgctttcactttctagttgcctccccgtctgagaatctccggcatcattgcagtagatcattttatctggttgctccgctagagcaacgtctggttggcgagttcgctccttttagacttttcat

SEQ ID NO: 163 - DNA, 2593 bp, Zea Mays
ggacgtagcttatcgtagctattctcgtgtccctctcccagactcccaccaccacacaaactgccctcgcggcctcgcccgtcgcccctctcgatcacttctctcccgacactctctcactcccgtgtcgtgtctagcgccgacggcgttgctaccggagccggccagcggccacgatgcctacaatgcacgcgcttcgcctatgcccgctgctctccaccatccgatccacaccaccgcgggccactgccgcagcccgccagggcgcgctcttcgtcgcccgctgctcctccgccgggacgccgtcagccgcccaggcgctcaagatcagttcaatcccgaccaagccagttgaggggcagaagactgggactagtggcctgaggaaaaaggtgaaagtattccagcaggagaactaccttgctaattggattcaggctctattcaattccttgccccctgaagattatgtgggtgcaacccttgtacttgggggtgatggccggtactttaacaaggaggctgctcagatcatcattaagattgcagctggaaatggagttcagaagatcatagttggcaggaatggtctactgtcaacacctgctgtatctgctgtaattcgtaaaagaaaatttaactacagcagtggacagccagcaccggagacgattactgatcaaatttatggaaacacactatcaatttctgaaataaaaacagcagacattcctgatactgatttgtcctctgttggagttgtaagctatggtgatttcgccatagaagtgatagatcctgtttcagattaccttgaactaatggagaatgtgtttgacttccaacttatcaaggatttgctttctcggcctgatttcaggttcatatttgatgcaatgcatgcaattactggtgcgtatgccggacccatttttgttgagaaacttggagctgatccggactgcatattaaatggggtgcctcttgaagattttggaaatggccatccagatccaaatctaacttacgctaaggagcttgtttttactatgtttggaacccatgcccctgactttggtgcagcaagtgatggtgatggtgatcggaacatgattcttgggaaaaggttctttattaccccatcagactctgttgcaataattgcagccaatgcacagacagcaattccttatttccagtttggtacaaaaggactcgcgagatcaatgccaaccagtggtgctcttgatcgtgttgccgagaaattgaatgttccattctttgaggttccaacaggctggaaattttttggcaacctaatggatgcaggaaaattgtctatttgtggagaggaaagttttgggactggatctgatcacatcagagagaaggatggcatctgggctgttctggcttggctttccatacttgcacaccggaacaaggataagaaggtcggagagagattagtgtcagttgaagatattgctatggagcactggaaaacctatggcaggaatttcttttctagatacgattatgaggcgtgtgaatcacacagtgcaaaccagatgatggatcaccttagagatgttatggcaaatagcaagcctggagagaaatacggaaattacaccctccaatttgctgatgatttcagctatactgatcctgtagacggtagtacggtatcaaaacaaggacttcgatttgttttcactgatggatctaggattatcttccggctttcgggaaccggatctgctggagctactatccgcctctacatagaacaatttgaatctgatatctcgaagcatagtctcgatgctcaaacagctttgaagcctttaatagacctggctttgtctgtttcgaagctcaaggacttcacaggaagagagaaacctactgtcataacataggccctgtttgtttcggcttttggcagcttctggccaccaaaagctactgcgtactgtcaaacgctcagcttttcagccagcttctataaaattcgttgggggcaaaaaccatctaaaatcaaataaacacataatcggttgagtcgttgtaatagtaggaattcatcactttctagatcctgagccttatgaacaactttatcttcctacacacataatcgtaatgatactcagattctcccacagccagattctccccacagccagattttcagaaaagttggtcagaaaaaagctgaaccaaacagccccataatatttagatgttgttgtcctcggccataccaactgagcagcatgggccaagaattgaactgatggaaaatatgtatcattaggacaaattccgccagaataagttgttcctcggaagtgttttgagcacctccagcatcttccaaatatatctccaataagatattagtgggataacatatggcagatgttatcaaataatgtaaatatagatcgaacacgagacatgttttacgtggagaactcttgtatgaaaaaaaaatcatggatgctaactcgtgattttcattgtattcactatactagtaaagttcacaaaacacggaagatgagtagtcgactcttgatgtgcg

SEQ ID NO: 164 - DNA, 233 bp, Zea Mays
gtatacaataacagagtgtatagagataaatgtcacaataacatcagagtatttattacatagcgaaagtcttattacaaaataaaagataaatatgaaacgaactaaggatcatccttggcgccaataagtcaactaggaaacgccacctagatcagatcgaactcctcattgtgcggctcctcctgaaccacctgttcttctcctgtgggggtgagacaacaagggtgatc

SEQ ID NO: 165 - DNA, 1647 bp, Zea Mays
aaacattcctaattgccaattggagccagagcgcagagcgcgaaaggcgagcggcgactccctggcgttgaccagagccccaccccactcgccgtctcgccctaaaccaaatcctccccaaaggcaaatacgaaggtacagtgccccagccccgcgccccctagaccaaagcagaccagaatccgccctaccaatcgcctccccagatcggcggtccacccggaggcggcgatggcgtcgtcgcaggcgaacctcgacaagatgcagctccgccagagctaccgcaacgtctggcacaccgacatgacgaacgccatccaggccgacttcccctactgctgcctcgcgctgtggtgtggaccttgcgtgtcgtacatgcttcgcaaaagggctctctacaatgacatgtcaagatatgtctgttgcgctggctacatgccatgcagtggaaagtgtggcgagagccggtgcccagagttctgtcttgcaactgaggtgttcctttgctttggcaattcagttgcatcaacccgcttcttgctgcaagatgaatttaacatacagaccactcagtgtgacaactgcatcattggcttcatgttatgccttcaacaagttgcttgcatcttctctatagttgcagctattgttggtagcgaggagctttcagaggcttcccagatccttaattgtctgtctgatttggtctactggacggtttgtgcatgtatgcagacgcagcacaaagtcgaaatggacaagagggatggaaagttcagcccacagcctatggcagtgcccccggtgcaacaaatgtcacgcatcgatcagcctatgccgcctcctgctggatatgcaccgcaaccagcatatgggcagccttatggtggctatccatctcctcctggccaaggttatccgcctcctcctggccaaggttatccgccagctggatactcgcagggcggtgcataccctccacccgctcaaggttacccacatggtggtggatatcctccacctggtcaaggttacccccagggtcagggtggtgcatatcctccgcctggttcttaccctccacaaggttcctaccccccagcagagggctcctacccagcacaaggttcctaccacccagcacagggctcctacccagcacaaggttcatatcccccagcacagggctcgtacccagcacaaggttcctaccccccacaggcttaccctggcaagtaaagatgacacgacaggtgaaccaaatatcgtgaacatgtaaacagtaggaccgctttagcgctataggttattttgataaaattcttgttactgttcagggtggcattcggtgaacaatatttctattttatacggtcaacatcttgtgttgatcatgtcgtgttgagtctatcctcttttttcttttcctgaataaggaatggcattcaactggaatgtatttgaatttggtgacaactcacgtggatattgttttggttcagagttgtcactttgctgtgtatgatagtcgcaacttttgatgacgtttgataatggagtgaaggaatggaatgcttatgacttgtgagcacgagcagtccctttcacacacgttactattatcataggacgagatgaatagacaga

SEQ ID NO: 166 - DNA, 1299 bp, Zea Mays
aaattttaagcaaaaatggaggtagatgagctagaaaagacaatctcagttgcatcaagggatccggcatactatggacttgatgaagttgagctttccagacgaagaaactggactggttcttctcataagcaggtcggtacagtcaagagagctattgaaaagggcaagagcaatgcagcaacttcaaaataccaggatacaagcaggaccaaccactattctgcccaagataatgatgactttctttcttcagaatcagatagacagcttctactcatgaggcagcaggatgaagaacttgatgagctcagtgaaagtgtccaaaggattggtggcgtgggactaaccatacacgaagagctgtctggacaggaaaggatcctaaacgacctaagcttggagatggagactacttccaacagacttgatttcgtgcagaaaagagtggccatggtgataaagaaggccggcatcaagggtcagatcatgctgatcgtgttcctgattgttctgttcatcattcttttcgttttggtgttcttgacatagccaagtgcaccagggtcctcggttttctctctcatttgttgtgcctccctagtacgaacactagtaaattggtcgcgctccgcgtgagttgttgcttgatgtgcttacataagatgtagaatcttgttgctataggcatgtatcaacaggtgctagcagcttgcagttctcctaacagaaacaggtcgaagcagattttttgttctccaagtgatcagtttgtccaaggttgttaggctttccgtaatcgcttcgagtttgcttttcaagatcatcattcacatgttgcttgttagactttggctcaacataaggaggcagcatggattctttatgtttgcaacatttagcttagtgtaaggagccttgtttctagtggtaccaccacccggtatactaagaagactcaatgaacgcccttgattctctgggtgctgagctcttacccctgaatctgcatgtctcccattgtgttcatgaccaccaggccattgagatcaagttctactacctccatcagcttcttttccaaagggcgaacaactcttctgtttagcttctgaacatccttttttgggtcctgttagtgtccacaggagacactggtttatgcaaatgttcattttcaacagacacatcaggttgttgcttcctcgaattcttatcaattgtatggtgtgcgttagcaacagaacgaatatctttttggatcaacagtatctccactttatcagtatggtgtgcagg

SEQ ID NO: 167 - DNA, 1452 bp, Zea Mays
cggacggttaccacaagcaactaggaggactcgtcatcgctatctactgtagctcgctattttccacactctggctggcatgatttggccccgcctgtcgcgttaggttctggttcttttcggagtcgcgagtacatgcgacggtcgggtccttgcttcgcttcttcagaaactgcttttcctctctgcgggcgcatctgcgactgcgattgcgttggtaaagatggcctgctgctttctgtttggaaagaaagcgaaacaaaccactgaaggcgatgaagatctacatagcgtcaaggtattctcttacagcgagttgagaaaggctacgcaggatttcagcggcgcgaataagattggcgagggcggtttcggttctgtcttcaggggagtgcttaaagatgggacagtggtggcggtgaaagttttatctgctacttcaaggcaaggcatccgcgagtttttgactgagcttacggcgatatccgacatcaagcatgagaatctggtcactctgatcggttgctgcgccgaaggatctcgcaggatccttgtctacaactacctcgagaacaacagccttgcgcagacattgctaggatccaggcacagcaacatccggttcaactggcacgcccgcgccagaatcgctgtcggcgttgcccgtgggctcgcgtttctccacgaggagatccgtccccccatcatccacagggacataaaggcgagcaacattcttctcgacaaggacctcacccccaagatctccgacttcgggctggcaaggctcctgccgcccaacgcgacccatgtcagcacccgagtggcaggaacattagggtacttggctcctgaatacgcgatccgaggccaagtgacgaagaagtccgatatctatagctatggggttcttcttttagagattgtaagtgggagatgcaacaccaacacgagattacctagcgaggaccagttcctccttgagaggacatgggcactctacgagcaaggacgtctagaggacatcgtggacatggacatcggcggcgaccgggacgtcgaggaggcgtgccggttcctgaagatcggcctgctgtgcacgcaagacgcgatggcgcgccgtcccaacatgaccaacgtcgtccggatgctctcgggggagaggaggatcagcgtagagaagatcactaggcccgccatgatctccgatttcgcggagctcaaggtcagcagcaaggagcgaaggccgggcgaggcacgctcgcccacgacggctcccaccacgaaatcgttcaccaccacggagccgttctcgtcgtcggagacgcccacgcagtcgtccatgtgaagtcgtgggcgtacgacgcatttttttttttggtttagtttgtatagtgtgtggacgtgttaggtgggcagggttacaggttttttttttgaactaatgaccac

SEQ ID NO: 168 - DNA, 2353 bp, Zea Mays
gcatagcaaattagaaaaactagactgactgataatctggaacagaaggagtaattagtaactaataaaaggaaaaaaatgacataactacccggtgcccataaagctcactcagccgagcgcccggatgatttgcacgtcagcccataaagctcctatttttcttggcccgacccagctgaagcaccacttcgaggccgcttcttagcaaggcccagagttaaatcgtccgtgggcgtggcgctcctctcgcggttagggttttagggtcttcgtctcccgctcccccgggtccattcgcacccaacgcagctacagacggtctccatggcgaagaaaggggcgaagagaaagcagcagttgccgccggctcccacggcgaagaacgggagcaaggctgtgctcccactgaagggccgcgaagagagcgcccaagaagcagaaggttctggagtcctccgacgattctgatacggagcagcagcagcagcttcaggaggaggactccgacctcgacgtttcctctgattccgacgccgaggagctctctgggtcggacgctgaggctgacgagctctcgggctcggacgccgatgctgacggaggctcgacccgcggcgacgacatggatgatgacgacgacgacgaagatggtgaaagcgatgatgactctcttgcggacgacttcctcgctggtagcgacgaaggaagcgagggtggtgactctggtctggagtcagatgggtctgatgaccttgaggcaaagtcacgagcaattgacgagcagaaactcaaggcggaagaagatgcagaggaggaacttcaaaccaacataagatcagaatctgatgaattcagattacccacaacagaggagctggaggaagaggcacacagaccgcctaacctaccaaatctcaaaaggaggatatccgaaattgtacgagtgctctcaaacttcagcaaactgaggcagaaagatgttccgcgaaaagattatatcaatcaactgaaaactgacgtcatgtcatactacggatataatgattttcttgttgaagcgttaattgagatgttcccagctgttgagcttgttgagttactggaagcctttgagaaaagaccgcctgagtgcttgcggacaaatacactgaagagccggaggagggatcttgctgctgctcttataccaagaggatttaatttggacccgataggaaaatggtcaaaggtaggattagttgtctatgactccaccatttcagctggtgctactactgaatatatggctggacattacatgaaacaaggtgcaagttctttcttgccagtgatggcacttgctccacaggagaaggagcgaattgttgatatggcagctgctccaggcggtaagactacatacattggcgctcttatgaagaatactggaatcatctatgcaaatgagttcaatgagaaaaggttgcatgggcttatgggaaacatccatcgaatgggcgtgacaaataccataatttgtaactacgatggtaaagagctacccaaagttcttgggatgaattcggttgacagagtattgctggatgctccctgcacaggaactgggaccatttggaaggatctacagatcaaaacttcaaaggacattgaagacatcaggaactgtgcctttgtccaaaaggcctggttctctaaatagagcaaaataaccatggtggctagcgagtagcgcccacaagccactgaccatcgcccagcagcataagctatgctttttcaccgttctaaaatggcctaggaggtgttcagtcttatggtgctacatcactagtccctttgttaattgatgtggacttttcctcgttgattggatcgtacagctttgcaaaatgaaggaagaaattgattgatttgaagtccacgtgggaaagagctgcgtaaactactgagatttgtttagtttgaacaatctctccgttaatttatatatggttaaatgtactttctcgtatattggattaaaaagaaaacataaatggaatacccaactcccaaatctcttggctctgccactgatgcagttataagattggaagggaaatttggggtttggatatgcacgaggggcatgttggtataaaattatttcctttcttttgctttaactggtataaaattggtccacggcacaggtgtatcaaggaggggcaaacagcctagcagattccattttaaaaagatgggcgaacaagcaaactaaaaataaaacaggacaaatcagtagttaaaattcaaacgcaacaagattaccagaaaccacgtattataaatgagggcaagtacatattaa

SEQ ID NO: 169 - DNA, 1233 bp, Zea Mays
ttcccttattgggcaagggttgggttgtgtagtgagctaccacttatctggtctcaaggttcttcatggccttgactctcaaagatcagagtattcttgtcaatggggatatcaatgaaggcttgcttcgcctttgtcacaagcttcatcgtttaaggaaagaatatgcatacacatttgaaagcacaagcttatcttatcagtgttctgaggttagcaggatcttgcaaggtaggggcaccatagttagcatgagacccactgaacgaatatgcataactacatttgcattaaacagaagattgaaccaaatgagctacaacataagattttatttgatagaagggtctaatgaaaacattggaccatgagagtgcagaggcagggccattgctactgcaagtcgcccctaagcctggtactaagagttgtaggaggcaagaattcacagttatcttagcctacatgctattctctgaacacaatatttacgagcttgataggcctgttttggaatacaaattatgtgtccgataggtaaataatttatgcaatgattcttagacctttggctcttactgcttcaaggattaatgtgtgactgtttagccttcaatccaagcggtatgccactaatctcaaaaattgcttctacgcaatatttacttgacaatttatagatttgttgtttcttagagatattttttcatgtaataggttataaggttgttcatgacataaagaggtttgttggtcataacttatactatatgaagattatgggagtcagccctaaattcacattttctgcaatctacagattcatgtaaaaaagttcaatctacaacagcatttcctcaaaatgtctaacagacttgttttcttcaggctagggacccaggggctacacatcttataactgaaaaacacatgagcagtatgttgttaacacttttttttcttgttcgtgtttcatagatagaggtatataatatggagacgaataatatttaaaccattagagacccatgtaacaataaaacagattgtttagctattatgctcactcaatatggagatcctcaagtatcttagaatcagttgggcaaacacaaatttacagtcatagttttctttgatggtttttacaaatacttggtttgcactattgatgaaaacatggtattgtttcaagccaaccttgagcattcatctgagaagtttgaaaatgtt

SEQ ID NO: 170 - DNA, 1159 bp, Zea Mays
gtttcataagatggtggaaaaggccatagaaatttggaacatcatctcaaatggtggttacttgtatatttgcggtgatgccaagggaatggctagagatgtacacaaaatgcttcatacaatagtccaagagcagagatctttggatagctccaaaaccgagagctatgtaaagagcatgcagatggaaggcaggtacctccgtgatgtatggtgacacatcacctcaaataagccatagctctagcgtgtggaagtaaagctggctttgcgtgagcacgagatgagcgcgttgatgtacttagtactgtgaaatcaaactggaggaggctgcaattctgcattacacctacaaaaaattctcaaacctaacctcaagaagggatagatgtggctgcaaaccaactaaagaagatgtgaagcaatgttttatcttggaatttgaccgtttggtaccgggaacatgttgcatggaccgatagagacaccaacttgaaacttttaaggaaggatgtattaacacatatatatgtgcccatggcattcatcggtggcctcaaggaatccgacgtctatcaatgcaataacatcagcgaaagcacaataaaaaacaaagtcatcaaacatgggtctcggaaacaaggaccacatccggctaaactgaactgctggtcagtccaaattggaaggcggtcacgggaaggtgcaggtaagcgtcagaaagatcctagaaatggttgatgcccaggaaggagcagcgaggccgccaatgtcgcccccaggttttcttgagctggctgaaagcaccactgccttttcatgacattatgtgaggcattgtttgagtattgactgaggttggtttaaccatgcgtgatacatgcagccttgagcatacagtgagtcactcaacaactttggcgaaagcccagatgttttcttgcagtttttgaaaaatattccgcgccctgatttcatgattgtgtgccatcgcaacacacgggcaactggctattatatatataagttatcatggtattatatggtcccgttgcaacgcacgggcactcacctagttattttatatgtgtatagtaggatttaggagatgatttaggacttgtttggttattttttaatctatatggatggtagagga

SEQ ID NO: 171 - DNA, 3582 bp, Zea Mays
cgcgagccactgcacccatccactcgtacgccgcggtgcgccgcagcccgcagcccgcagcccgcagcccgcagcccgcgactccaggcatccacaaaaaaccatctcccccgcggccccggcaccgcacgctcccgacccggcgagtcccactcccacctaagctgagcggccatggcgcggcacctcgcgccttcgtctggaagcctccaccgtctcctcgcgtcctgccactacccgcccacctcccaggcgccgcctccccgtccgctcctcctcccgaagacccgatcggcggctatgcagctcccgcgacgcgggcggcgcgacgtcgtcgccgctgcagctgcctccgcaccgtccccctcttctccgggtaccgaggtggcagtctggggtaaggtctccgccgtgctcttcgatatggatggcgttctctgcaacagcgaggagccctcgcgacaggccggcgtcgacgtcttcgctgagatgggagtcgaggtcgccgtggatgactttgtccccttcatgggcactggtgaggccaatttccttggaggtgtcgcaagagctaaaggagtgaaagatttcaatcctgaaagtgccaagaagagattttttgagatatatcttgacaagtacgcaaagccaaattctggcatcggattccctggggctctggagctcatcttggagtgcaaaaattctggtcttaaggttgccgttgcatccagtgccgacaggattaaggtggatgccaatctggctgctgctggtttgtccgtgtttctatttgatgctattgtttctgctgatgcgtttgaaaaattgaagcccgctccggatatattcctggcagcatcaaagagcttaggtgtcgacacaaatgagtgcattgtgatagaagacgcgcttgctggtgttcaagctgctaatgctgcagaaatgagatgtatcgctgtgacaactactctagaggaaatagcgttacgacaaggcagtccctcgttcatacgaaagaatattggagacatttcaattaacgacattttgtatggtggttctaatgctcgccacaatgaaggggcaggaagtactgagaatagtagttcggtagggaatgctttgtctgagagtctaaacggagcaactgctgctggacattctgacacaaaaggttttccaatctcaaaaaataaagggctgttgggttctcgacgcgaaatattgagatatggaagtctgggaatagccttgtcctgcctttttgttgcagtcagaaattggaaggcaatgcagttcgcatctcccaaaggcctactgaattttctcatgggtggaaatagttcagtttttgccagaaatgaaggagaatctctgtcatcaagagttcaacaaataaagaagtatctagctgagtttgaatctgggggttctgccacatatgttcctgagtttccaagaaagcttgactggttgaatacagccccacttcagtttggaagagatttgaaaggaagagtggtgctgctggatttttggacatattgctgcattaactgcatgcatgttttgccagacctggattttgtagagaagaagtataaagaaaaacctttcactgttgttggtgtgcactctgccaaattcgataatgaaaaggaccttgaagctatacgtaatgctgttctgcgctacaacattactcacccggttgtaaatgatggtgacatgtacttgtggagagaactgggggtgaactcttggcctacatttgttcttattggacccaacggaaaggttctagcacagatatcaggtgaaggtcatagaaaggatctggatgaagtaattggtgcagcactggaattttatgaagagaagaaactattacaaaatgacccccttcccttggcattggaaaaagacaaggatagtcgtttactaacttcgcctctcaaatttcctgggaaacttgctgttgatgtgcaaaacaatcgattattcatatcagacagtaatcataatcgaattgtggtgaccaacttggaagggcagttcatataccaagttgggagttctgaggaaggattgcttgatggcccatttgatgctgccctatttaaccgccctcaaggtattgcttacaattcaaaaaggaatatcttatacgttgcagacactgagaaccacgctctgcgagaaattaattttgtggacgagactgtgagaacactagctggaaatgggacgaaaggatctgattacagaggaggaggacaaggaacaaaccaggtcctaaattcaccatgggatgtatgctacgatcccgcagaggaggccgtgtatattgcaatggctgggcaacaccagatctggaagcacaatttacatgatggaataaccaaagttattagcggtgatggctatgagaggaatctgaatggctcaagcgccaccagcacatcgtttgcacagccttctgggatttcattagcttttgaaatgcatgagttacttgttgctgatagtgaaagtagttccattcgagttgttaatctgaagacaggaggctcaagattgctggctggaggagatccagtatttccagaaaatttgtttaggatacttttgtctcttcagtttggagattatgacgggactggctcagatgtgctacttcaacatcccttgggtgttgtttatgccaatgacaatcaagtatatatagctgattcctacaaccataagataaaaaagttagatcccgtcacaagaaaagttacaactattgctggaacggggagtgcaggatacagggatggtccaggcttgacagctcaactttctgaaccagcaggacttgttgaagttggagatggaaggcttcttgtagcagatacaaacaacaacacaatcagatatataactcttagtgacaaaggtgctgaggtgaagacactagagttgatcggagtacaaccgccatcaccaaaaccgaaggtgttgaaacgcctaagacggcgattatcggcagatacagatgttattaatgtcgatggtggttcttcaaaggaaggattcttgtctcttgcagttacagtacctgatggttaccatttctccaaggtcatcaataaccataagacattgttttttcttatcttacttgcaagtttgcattattcatggtagtcactagtgactgtgtggtacagcattcaacagtgcttgtattaaagttttttcgctgaggtgtaggaagcccgcagtaaatttgatgtggaaacagagccgcctaatgcagttgagattgaaccagcgaacggttttctaaactcggaagggctggcatcactgaagttcagaaggatatcatcatccttgtcaatgggaaggataaactgcaaggtttactactgtaaagaagatgaagtttgtctctaccaatcgattgcttttgatgtcaaattccgtgaagaggcggaaccgaacccagcacaaattacgctatcctatactgtttcgccaagagataattcagcacaagacgaccctctcttggactaatgagcatgctcg

SEQ ID NO: 172 - DNA, 2598 bp, Zea Mays
aacgtaacaacctcggcttctacgactaggagtcgaagtcgactgacgactcacgactggcgtagcgtaggaggcggcggttccaagcgaccatccaataatcgccaccctcacgcgagaaatccccgttttgggggacttcgtctctcgtaggagggattctttggctgaggtagtgaggttgccctcggattggtccaaaaacgaaaaagttagccctcttcctcaggtccaatttggcatttttttcagaacacatacgatttctgccagtctgaagttttggactttatgtgagctgttgccaattcaactgcttctgctacacgatccattaactgctttccgatccgtgttctgtgatgtttgccctcttcctcagggccaatttggcaatttgtcagaacacacacaggcaacttttggggaactacacgtgtatggagttttattagtattccaggggcgtcacaatggcatactttcctgatgaagtagtagggtatatccttggttatgtaacgtcgcatcaggaccgcaacgcggtgtccttggtctgccgggcatggtacgacattgagcgtcatggccgccattcagtgcttgtaagaaactgttatgcggtgtgcccagagcgtgtacacatgcggtttcccaacatgcgtgcactgagcttgaagggcaaaccgcactttgctgaattcaaccttgtcccggcgggttggggtgccactgcaaatccatgggtggatgcgtgcgcccgtgcatgcccaggtcttgaggagctccggctgaagtttatggttgtgactgatgaatgcctcaagttgctttctctatcctttaccaactttaaatcacttgtccttgtttgttgtgaggggttcagtactaccgggcttgctaatattgccaccaattgcaggtttcttaaggaactagacttacaaaagagttgtgtgaaacatcaagaccatcagtggattaattgttttcccaagtcttcaacatcactagaatgcttgaatttttcctgcttgactggggaggtgaatgctgttgcactggaggaacttgttgcaaggagtccaaatcttaaaagtttaaggctgaatcttgcagttccatttgatgttttgtccagaatcctttctcgcacacctaagctagaggatttaggcacaggatcctttttacaaggcaatgaccctgctgcatatgccagtttatgtagagctcttgagaactgcacttcactgaagagtatatctggtttttgggatgctccaggcttttatgttcaaggaattttgtcaaattgcaagatcagaaatcttacatgcttgaatctcagctatgctacattgattcagagtacccagcttatcggtattattcgtcattgtaagaagctccatgtcttatgggtgttagatcacattggtgatgagggcttgaaggctgtgtccttttcttgtcctgatcttcaggagttgagggtatatccaagtgttgttgcaccaagaggtactgtgacggaggaagggttggtagccctatcttcgtgtcggaagttacagcatgtgctcttctcttgtgttcgaatgacaaacacggcgctgatgacaatagcaaggtactgcccacggctaacgtccttcagactatgcattcgcaagcccaggtcagcagacgccgtcacaggacagccactggacgaaggctttggggcgatagtgcggtcctgcagaggcctgaggcgtcttgccatgtccggcctcctcacggacagcgtgttcctgtacatcggcatgtacgcggagaagctggagatgctctcggtaacgttcgcgggggacaccgacgacggcatggtctatgtgctcaatggctgcaggaacctcaagaagctggtaatcaaggagagccccttcggtgacgccgctctcctcgcgggcgcgcacaggtacgagtcaatgcgcagtctctggatgtcgtcctgccagatcaccctgggtggctgcaaggcccttgcggccaccatgccaaacatcaatgtcgaggtcatcggtggggcgagctttggtgcgatggatggtggtgtcagcggtgcgaggaaggtggacatgctctacctctaccgtactctggctggacctagatgcgatacgccagggttcgtctcgatattgtgagctgtatctatggctactgttggtggcgttcagggaaacccgatgttcttaaccgtgcctgctgcgggctgtggctgtgctactgtctggtagtgtttcggaaacatgatgtttatttgcgtaaggtagtgtttggttctggaaccattttaagccttgttcagatattcatatacctcatggattggaagtgattagaaaaaaatatgaataattttgacttactatgtattgaaactcacttaatcccctctaatccatatgaaattgagatgaaaccgaacagacccttaatccatatgaaattgagatgaaaccgaacagacccttagatgaaatggctctgttttctagatcctaagaacagaatggcttagatgaaatggctctgttttctagaacc

SEQ ID NO: 173 - DNA, 1716 bp, Zea Mays
cctctgctcagtttccaccgccgcactcctccacccagaccctcctccctcacggccccacccacctcgcgtcctcgccggaaccctaacggtgaccgcctgccgtgcccatcggcggcgatcgcgttgctgcgcccccgatgagttacctctgcgcgggcagttcgtcgttcgatgaccccgacgtggttgaggtgtcttcggccaccgccgcggctgcggggtgggcctccggccaccacaagaggaagcggagccaggttgtccctcaagaagtaattgaaattgatgatgatgatcctgatggagtcataattattggtgataaagcaccattggacaagaataagcaaactgttgtatgccctatggattggccaaagcatgccaagagtggttgggttcaggacatcgctggcccaagcacatatgcttcaaaatatatcgattcctgtgttgacctgaaagtgtttcaagatgaggcagtttacaactattctgatgactgtccctatgcgggatttgaagactatatgtatgatgaagatgagtttgaggttgatggttatgatgctctgcttattgaaagtgagtttaaatttggtttgtctgccaagtttgataacctccatgctccacctgttctggaggtttctttaccatggatgcagaagactgctattgatattgcaaataagaccaaacccactaaggttgtagatgataaaatcgaagaaaaatacaaggccttcaaacgatttgatactgttgatgatcatagtgatcattattattcaaagccaacgtcgagaaaggttcaggtggtaaaaaagccatcaaaagactgggtgaaacgtatacagcatgagtggaaagtcctagagagagatttgccagatactatatttgtgagggcatatgaggatagaatggacctgcttagaggtgtcattatgggaccggctgggactccttaccatgacgggctcttcttctttgacatatactttcctcctcggtatccaaatgtcccaccgatggtgaattaccgtgctggtggtttgcggcttaatccaaacctgtatgattgcgggaaggtgtgccttagcctcctcaacacctgggacggcagcggatgtgagaagtggaatccggccaattcaactatgctgcaggtcctggtctctatccaggctttggttttgaacgcaaagccctttttcaacgagcctggctacgctatgcatgctaacacggctcacggggagaagaaatcgctggcatataacgaggacacgttcctgctatcctgcaggacgatgttgtattctcttcgaaatccaccaaagaacttcgaggatttcgttgctggccatttccgccagcatgggcgcaacatccttgtcgcttgcagagcctacctggacggtgcccaggttggatgcctatcgggcgatggagtgcaggacgttgatgaaggcgacacgagctgctcggtgaggttcaagcagtcactgaagaaactcgttgaggagctgttgacggagttcactgtgaagggcgcggactgcggcaagttcctcaccgaggagaaggcaaagaggtcgtctggagcttgctccacatggacagcggacaccacattgaggctgacatgaagcattggcccctcatagctcccctgccgtcctacgggagaggaagggacgagcctgg

SEQ ID NO: 174 - DNA, 1741 bp, Zea Mays
tgcttacccaagcgtgtctctctccctggcctcaatctccagccgccactcactaggagatcttctccttcacgccacctaacgtgccatcgtcttcacccggccgtcgtccaccctgccttctccagcttgcgccaaacgtgcgctctttgtgccgccttcgtgacctcccctagctcggccatggatgtcgcgccgcccttctcctatctctctgctcgaccgtgcctcttcttccttgagccacgcccggtgctcctccaccaagcctcgtcggcatgctctcctggcagcggtcggatctggcctcctgcttcccctctagtacgctctcgcttccagctcgttgtgcctctgtactggagttcgccggacagtgcccttgctcggcttctccaatgcgccctaccgccagcacccctctcttggtcatcccttcccctgcgcatgcgctgggcgtgtctcccagccgccagctcggctcctcgcttcaaccgtagacctggtactcctcccgtcgtgcctgtcctctgtgcgcacgcgccatcgccttctctagccattgtgctcggccgatgactcacttcgtgccactcaggggtggatctacgaccggggctgcctgggctgcagccccggtcgcggccagtaaagcgaataggctcatcacgcgtgacagcccagctctgcatccagccgcctagctctagccgtgtccagtccgtgctgtgattctgtgagcatttttcctaccctaaaccagctgccgccgccgcccgccagccgtggaggagccacccagacacccaccgcctacggcccgccgccgcagcacgcagcgctgctagcttggaggccgcagccagcccaccgccgcagcacgcagcgctgctcgcttggaggccggagccagaccgccggacggccggagcctcggagcaccgccgccggcccgccgccgcagcacgcagcgctgctcgcttggaggccggagccagaccgtcggacgcccggaggcccagaggccggagctagaccgccggacggccggagcccggaggcccagagcactgccgcagcaatggctgaactaccaaagtgtacactgctagtatttgctaatgatcggattcggagctgcacgtttcagaagggaatatagtagctcaagttgataggccatatatggctgaggacaatctggaagcatcgacatgacgccacctcatcgctcgcggaacgcgtggttagttgatggtcctgcgatgtcgacccatctcagttgtcctccagccctaccgtacgcctcgtgttgtcgatggcagcccatgacttcaacatcgacatataccaagagtcggcaattgcatgtgtgtgtggtggtttggtgaagatggagctatggacggagtagagagtgaatcccagttcgacgctcgtgacgaaaaaccaaatccaagaattattggcattcttgcgaattttgagccaggttatttgtgcggagtcccgatgtgtcgctcgccaagggcttgataaaacgactgaaccagaaatccattgccattcttgtgatatcgtgtcgacttggtcttggtaagaaaaattattgtttgtgttagttcggctgatgaatggagtaactagatatcttagttgtgagcattgatatggtcgcaatcgtgattggcaaatcagcatttttgtcgtgtaagctaagtttatgtttgaagatttaggt

SEQ ID NO: 175 - DNA, 1083 bp, Zea Mays
aaaaaaaaaaaaaaagagaaattttctcatcacaggggactttcttctggaacgacagcacttacagcaatgatttttggaaggtcccttctggttgcgaatgccggtgactgcagagcggtgctctcgcggcgtggcactgccattgagatgtccaaggaccacaggccttgctgcatgaacgaaaggaagcgcgtagagtcacttggcggctacgttgacgacggttacctgaacggtcagctggcagtgaccagagcgctcggtgattggcatctggatggcatgaaagaggtgggcgagccaggagggcccctgagcgccgaaccagagctgaagatggtcacgctgaccaaggacgacgagttcctgataatcggcagcgacggcatctgggacttcttctcgagccagaacgccgtggacttcgcgcggcggaggctccaggaccacaacgacctgaggctgtgctgcagggagatggtcgacgaggcggtgcggcggggcgccagcgacaacctgacggctgtgatggtctcgttccacccggacgcccctcccccgagccgagccaacaagaggaccggcagggtcaccaggagcatttcggctgaggggcttcacagcctcagagtgctcctggaaggccagtgacgtcgccgggcggcgcggcgccattgctgcccgttcgtccctgatgctgtgctacgttgctgatgagtgttaactgtaagtagcggtttccggtatcttggtgcttgctcttcttcttccgctgagggcgggcgactattcttgtccttcctccgacaataaaccaacgggcctgagatctcactgtgagacgctgtaaataaggaaatatggaagttggagctcgtcattaaggacgagttagcggtgtgcatccagggggcttttgtggctcagtatgtgatgccttttcgcccctcctgattttctgtaaataaaacgatgctgggagccatcggtgtgattgaactagtgttctgttatgcgtgctccccatcgattcaagatctacagtttttatttactaattactactagtacaagtcttta

SEQ ID NO: 176 - DNA, 1111 bp, Zea Mays
cttcccttccctggcgcgcgagtgacgagcgtgcgcagaagctagccaagcgatgccgctcctcttccccgccacgccgccgctaccgctgtgccgcgccgcgcgcgtctcacgccgcgccacggcctccgtggcgtccgcggccaggagctcgtcgtcgtcctcggcctcgttcgacgcggccgccttcgaggccgagcggctgcgcctggacgccgcggcgcgggccgggatggagtccaccgccgcggcagcggaggccggcccgcgggcctggaagtgggcgatacggaagcgggtgtgggacgcgctcgaggctgagggcatcgcgcgggacccgcgccccgtccaccaccgcatccccaacttcgacggcgcccccgccgccgcagacgcgttggggaggcttgacatatttcagaagtcccattgtgtaaaggtcaatcctgacacacctcagaagcaagttcggttcttaacattgtcaggtgataaaaagctgttgactccgcaacctcggctaaggacaggatttttctcagttatggactctcagatgatacctgttgggtgcattcctgaagcatgcacttctgttggtgcagctaaatatgggaggccaattggtttagatgaaagccttaaggtggatttgattgtgattgggtcagtggcagttgatccaagttcaggagcacggttagggaagggagagggatttgcagagctggaatatggaatgcttcgctatatgggagctatagatgattcaaccatgatagtaactactgtgcatgacaagcagttagttgatgacattccagtggagaagctgctagttcatgatgtgccagttgacattatctgcacccctactcaggtcatcttcacgaagactacgatcccaaagccacaagggatttactgggaaaagttatctccagaaaaattgggccaaatccgaattctaagagagctgaagcaacgtatagagcaagagacaggaactatgcttccttgtggaccttcggagaagctaccgccaacagctcagagaaagcagaggtggcagcggcgacgatgagacttttcaacctcaaacaccatgaag

SEQ ID NO: 177 - DNA, 2055 bp, Zea Mays
cctcccgcatcgcatagcacacacacacaccctgcgccaatgccatttccgtgcttggatagatcgcagatctacgaggtagcatcagatggctctgtagggattggaggcaaggatggaggcgtcggcgggggtggtgaggatgaaggcgactatgatgaggcggaacccgggcgacatgatggaggcgagccggtgccggtgacgaggatcccacggccatggacgtcgtcaggacatagctgatgccggaggaggaggcgctccggctctgcatcggctgcgtccacttctagacttccttgcctcgcttgtcacctacaggaaggttccaaaagaactagaagtacagattggttgaacttcaaacaaatacaaagagctatgcatacaagtggtggaggcctggtggatcaaggtcgttgtcgtctccaggtccatcaaatgcgacaaggtcgagcgcacgcaattcagctccgaagtcatctcctttcaacagaaagatgcaagtaacaccaagtcacttgcctttgatggttgatacatttcactgtatatcattgcacgacagatccatttagtacctttttctgagttaaactacttcaaacattgctgaagactacaaccagcctacagttgttgtaattgaagcgggtcaagacatagcatttgcaaagatttagttcattctcatcactctgcaatattcgggtatctcacataaagtttttattgcagttctatttccttttctcatgctgtgcatctttcttatttttgttcaaacaatataatgataagttcatttacttattactgtgattgtttggagcagcacacatgttattataagtcaaattttaagtcaaattattctcgacacgtgattcggttcatggcctatagtaaaaaggatagtttacagtaataacatgtgtgctgctccaaacattatgaggatagtaagtcagttcatttttagtttagaattggctctctcttatttttggtcaaattctagaatgatcagatgctcgacaatacttattattgtgattgtttgctcattttcagttcatggcctgtcttattttttcccctacaagtcatctacgacagtttgccagtagcactaaatcttttaactgtggttctctactatgtgtaatctcatatcaagattaatgagtatcgtgatcgtataattttgaatcctatcaacccatatggcaaggcaaagaaaaatgacagtggacatcattctagattttacaaaatcaaaggagcaaccagacatggctgtcatgatctaagatacttcaacgtgattggatcgaacccaaacatatgactaggagaagctccaaggccactttgtcaagggtctctgcaatgcacctactggtgcatgatttactggaggttgtgcgcatgaatgtgccacacattggtatgggggttggagttgaagcaggagacatgattgttattcctatcatgtgcacactgcctcctcgctgtcatttgtcgtcactctcgtagtcctgataccggagcatggttgccaggggagagcagtccaaggcaaatttgccatgttggagcagtcacaggagccaaggggctgcagtcacaggtcctgctagccaggatggagcaatcataggacctcctagcagtccaaggaaaatttgcgaggtggagtagttgcaacttttgaaacccacgtgataacatgctcaagcgttcgtatgataaaaaagatggcacataatcaaaagaagatctcatgttctgcgtttgtgaacctgtttgtattttttgaacttgttttgtgaacctctatttgtaaacctgtaaaatctgaggttgtgaatagatttgggtaacttcatacaagtggtggaggcctggtggtaatcctggatgcatataaagcgaggcatgcaatatccatagcactcgtttgacagaaggcaacaccatcaaccttgtcctccacctttaaactagcatgagcaccatccttcttcacatttatattcatgtccc

SEQ ID NO: 178 - DNA, 1595 bp, Zea Mays
cagaaatgcagtctgtggctgagatggcttctaatgcctatcgcaaacccagtgtcagtccatcagctacgatgctgaaagctctgcctatgcggttcctcgcctcgccggagcccggtgggtggagccggcgactaccacgacgatcgctgcggtcggtttcggcagcgctcatgaccaaccccgcttacttcgaggtgggaagattcttgggtggctatggcttcatgaacatcacaagttactcatcatctcaatttggagagccttcaaatgttgccggtattcaagaccttggtcttggatattcaccagaagagatcgaacggttgagggtccaagatattggagaaggagaagtgacaattagactttatgagggaagagttgttcaaggtccattcaggggcacacgggctgtatttaaggtataccctggagcccgtgctgatgcttctgaagctgatttgatggcactgaatgagttaaggactcatgcgtttcttcagagtgatgctagtgacatatgcgagaacatccagtttcttttaggggccttcgagacagcaactggagaacagtggctcgccttccgtgatgacgggagatatagtgctgcagactatgcaaatgtaactagtgcaaggcaattgaaggaaaaatctggagggacgccattctggaaccctttcgatcgagcatacaaattggagttaaggagatactttgttcttaagttgctgaacggtgctatgagtggccttgttcacatgcacaatcatgatagactgcatcaaagccttggaccttcttctgtaattctcaatacggcattggataaagagggacgctacttggttccaaggctgagagatttggcattttctgtagatattgggtactcatctattggggctggagtgctgtcggacggactatggcgtcgagcctctgctgctggggcttccactcctttggagaagcgagcctttggaatagctgatgacatttatggagctgggctgcttcttgcatacatgtcattcattccattctgcaaagcgggcgttatggatggtatctccttgcagagacttttagagagcacctttcggcttgacatttacgctgcaagagagtattgtctggcagatgaccagctgtcggaagcagtaagttttctagatttaggggatggtgctggctgggagttattgcaggcaatgcttaatccggattaccgcaagcgaccaattgcagaggctgtactgaaccacaggtttataactggagcagttttacgaaactactaatcagcattttttttacttgtataaagttgctacgtggaaattgtaaaagtacaataattttagtgggtgaagaggtgatacgtttcttggatgaacagtgcgtgttctctgtctgtcgcttcccattgcatggctatggctatggcgagcaaatagccgatgagcatacccactttcagctgcgctgcaggcaatcacctgagggaccgtagtgctgggagtagagatggcaatgggtacccgaaacccgatgggtttttaccccattagggtacgggtttg

SEQ ID NO: 179 - DNA, 4290 bp, Zea Mays
atccaccatgtgaccatgtcttctccgctccatccctaaaactgccttccgctcatggtcatgggctcatggcgctcacgtcgttcccgttcgcgccatccaacacctcgctgtcctactcctcccgcgcctcaaccgccgccgcgttcgctcctcgtggggttcactttgccgcgcccggaaggagcggcggcggccaaccgctcgcgtgcgctgcgcctcggtgccgcggacgggctccgaggcggcggcgcggagggggcctgctggtctgggcagcggctgactactacgcgacgctgggcgtgccgcgcgccgcgagtaacaaggacatcaaggccgcgtaccggaagctcgcgcgccagccgggtccgcgcaagcctggccagccgcatacgcaggattcgagcgtaccggtggatgcagaaaaatagcagtaagatgaattattttgcatctactcgtgcagctcacgtctggcacatacaggtaaccaaacaggtgcttatataaagtcaatgcatacgctagctcaggattaaatggtgcgggtaaccaatcacgtggagtatttttcactatatttgtctgagattaatatgcttggggtttgtgccaacagcaagtttgtagcagatagatcataccaactctcatccggtccggaaggcctctttttttttcccttctgaaacgcattttattgtttttgagtgttgtattacgtgctagaaggctaagtggaggcagttgcggggatctgacattcacgatcacttcgatgggtctgaagtgcctagctagttgctactgataactctgtagttttcaccattgcattgtaaatcctggcctgaccatgacttgaataaccaatgtctgtctcatgggtatttcattgctaatgattggtgacttaatttgcttgctcatccagtttagttttttttgggggttcgagggttgtttttatgccataaatgatattgtgctcttagctatagtttttgtatacctccagtacctaaatatttgaagcctgaaggcctgctaacatgcttccttgctagtttttgtgatcagatattcagatcactcagacactcactataaaatttctagaagcataaaccagtcgaaccagtgaaaggttatttggatatttatatttttgcacaggtcaacatttcaacaatgcattgtacatttttttctctcgaacgcgcaggggaactgcatatcaatacattaagaagaaaaacgtgggtccaaaatagaccagtacagtacaaggcgaagccatatgcattgtacattgatcctgtgtctttcaatgagtggagagaattgaaactcacaattgtagtttagtcctgtgctcacaatgtaacattttactaacaacatctacacttttgcgccattccaccataatgtttacagtttgtgtgggtttcaacagtttagtcgatatcacatattttccttcattggataagaatctttctgattgattttagatacataaaagctctaccctggcccctactggcatctgtgtgccatccaagatctgccagtgcctttgctgattgttgttagtcatcacactcggagcctaaggccctagaccaccctgggctactattagggaatacttacatatgcagtccctgtgtcacactgtcacctataccttctatttttggaatcacctaagttgtgtaggaggacttgtaaggattggacgataaaaaatgtgattttgcagaaggccagacctccactataaatattcttgtgtgtattgccatacctgcccatgttctcatttcgtttaaccttgttattaagactgaagctagagcggcatgcttagtatcctggaacgaccctctttttcaaccagagtattttatttactccaagattaggttagtggacctaaaataccccacttagcaggcacacaatctttcaattcatagctgtctgtttatctttcaatctaccaagtgaaaagtcttgctttgtctctagtttttggatgctctcaatacatactatagatttgttttttctggaaaataaatcatgacatctttttctgtcttcagtaccatcctgatgtcaataaggagccgggagcgaccgaaaagtttaaagagataagtgcagcatatgaggtgctgtcagatgaaaagaagaggacgttgtatgaccaatatggtgaagctggggttaagagtgcggttggaggctcgggtggagcttacacaaccaacccatttgatttgtttgagacattctttggaggcagcatgggtggtttttctggcatggaccagagcacgtttaggacaagcaggcaaaatactgttttacagggtgaagacatcagatatgatgtggttttggggttcacagaggcgatatttggaacagagaaatatattatactatctcatttggaaacatgtgatacatgtggtggttctggatcaaaagctggctccaagatgagaatatgttcgacatgtggtgggcgagggcaagtaatgcgaactgagcaaacaccatttggtctgttctcccaggtttctatttgccccacttgcgcaggagagggcgaagtcatctcagagtattgtaggaaatgttctggagaggggcgtatccgtgtcaggaaggagatcaaagtaaaaatccctccaggagtgagcaaaggcagtactcttcgtgtacgtggggaaggtgatgcaggatcaaaaggtgggcctcctggagatctctttgtttgcctcgatatagaggagccatcagatatcaagagggatggtataaacttgtattcaactgtgtcaataagctatcttgaagctattttgggcaccattaagaaggtcagaacagttgatggaaccaatgaccttcgaatacctccaggtacccaacctggtgatgtaattgccttagcgaagcaaggggttccatcattgaataagccgactatacgtggtgatcatctgttcactgttaaagttgcaatacccaagcgcataagtgggcgcgaaagggaattactggaggaacttgcatctttgagtaatggtggctttgttcgaacagatgccaagccaaaacctgcccagccaaaacgtgtacatctagagaaagaagttggtgctagccaagaagatacagacaaatctaaagcagcgggtgattggttgaagaaacttacacattttgctgggtcaattgctaatggtgctgcaaagtggctgaaagaaaacctgtaggctgtaaatatttactgcaggatagaagatttcttcagttaccatggtgctgtagtccaatctccaattcttagattcattggggtccccaagagctcttacatttttgttttgttttgttggagagtttcaagattttcaggctgtgagtaacaaccgagggagtgagaattgtctactaatactgtcggcatattggtcccttgtcattcttgcaaagcaattattttttatgtagttggagttattttcagtttggcaagtgcatgcagcagtctgaaagagtgaaagttcgccctgaaagttatgggatgctgctgctggtcccaaaccttgagacttagacaacactgtaaatatgtctctgttcctgattctgtacttgaggttttgggttaatcaaattcaagatcaacgggcgttctttttctgatttcttctggagctgcaaagcttgcatcgagcgatgccaaaaaaagatcattcagcagagttcaaacattttcatcttacaatgaagctatcattagaaacaagtttcagtaatctcgaattctaggtttcgtggagtcctcgcgtcgtatcactatcaatccaccgagctcgctttgagcaaagccaagactgcggctaccacgggcagggacaccatcagcagagctaccacaatgtttggcctcgtgatgtccgggagcaggatgcttccgtacttgataaccgcggcgccaccaagggacccaagcaccaatgtccacagatagccggagtcatcaccctattcatcaacacatcataacaaaggaaggaaacggactataaaattctttgcatccaaataaatgttgctatcgaactagtcgctcacaaggatgaaggatctacagccacaatggttgctgttgctgaatgttgacaagagaatgcagaggtaccttgaggatttgccccacgcccgcgtcggtcccggcctcgccggggtcgcgcccgg

SEQ ID NO: 180 - DNA, 1258 bp, Zea Mays
ctgggatagatttggcaggatcaaggtcgttgtcgtctccaggtccatcaaatgcgacaaggtcgagcgcacgcaattcagctccgaagtcatctcctttcaacaaaagatgcaagtaacaccaagtcacttgcctttgatggttgatacatttcactgtatatcattgcacgacagatccatttagtacctttttctgagttaaactacttcaaacattgctgaagactacaaccagttgttgtaattgaagcgggtcaagacatagcatttgcaaagatttagttcattctcatcactctgcaatattcgggttctctactatgtgtaatctcatatcaagattaatgagtatcgtgatcgtataattttgaatcctatcaacccatatggcaaggcaaagaaaaatgacagtggacatcattctagattttacaaaatcaaaggagcaaccagacatggctgtcatgatctaagatacttcaacgtgattggatcgaacccaaacatatgactaggagaagctccaaggccactttgtcaagggtctctgcaatgcacctactggtgcatgatttactggaggttgtgcgcatgaatgtgccacacattggtatgggggttggagttgaagcaggtgattttcaccaacattggtttgcgaactggagttgaagcaggagacatgattgttattcctatcatgtgcacactgcctcctcgctgtcatttgtcgtcactctcgtagtcctgataccggagcatggttgccaggggagagcagtccaaggcaaatttgccatgttggagcagtcacaggagccaaggggctgcagtcacaggtcctgctagccaggatggagcaatcataggacctcctagcagtccaaggaaaatttgcgaggtggagtagttgcaacttttgaaacccacgtgataacatgctcaagcgttcgtatgataaaaaagatggcacataatcaaaagaagatctcatgttctgcgtttgtgaacctgtttgtattttttgaacttgttttgtgaacctctatttgtaaacctgtaaaatctgaggttgtgaatagatttgggtaacttcatacaagtggtggaggcctggtggtaatcctggatgcatataaagcgaggcatgcaatatccatagcactcgtttgacagaaggcaacaccatcaaccttgtcctccacctttaaactagcatgagcaccatccttcttcacatttatattcatgtccc

SEQ ID NO: 181 - DNA, 1915 bp, Zea Mays
tttgaagttggcttaccactgcttgtttcatgatataatccttttattgcttactccttcagatcggcttgaaaaatatgattacaagaggtatacaacaactcattgttgcaccattacactatgttcaagataaattgtcaacaatggagtcaacagagataatcaaggaggatgcaagtgagagggaatctgatgaaatcgaagtttctagtgcaacacatgataagaaggctgaagcaataactgacgattcaaggcaaaattacaggacagcaatcgccagccattttctattcagagttcatacagatcctgtacatgaggaggctttctctatattgaagaagcttcagataattgagaaagatgttagctccagtgatttttgtacacggagggaatttgcaagatggtttgttaagttaagctcaaagtttgagaggaaaaggatgtgcaggattgttcctaataaattaacttctgacacagtccaatgtgcctttgatgatgtaaatattgacgacccagatttcctgtatatccaatctttaggagaatctggtatcgtatccagcaagttatcaaactccttggaaatgttgacaagtggctctccttgttccaagggaaataccttgttcctacctgatagttacctatctcgattcgatcttgtcaactggaaagtgcttgttgagcatccacgcgcattgagaatagacgaaaagtccagataccgagtcaaaatgtttgcattttggatctgcgagcttgcccagatgtgtctccatccatgctcatagagctaatggctggtgaaaacaacatcatcagcagagtttttggaaatactagacgccttcaaccgggcaaacctgtaactaaagcgcaagcagctgctgcactgactagtggccgaatgaaggaagcagttcatgaagaattgaataaacttgaagcagaaaaccaagcccatctttctcttatagctgaaataatggaagagttaattagtaggggagatatacaacaacaatgggagcaaaagatgaaaaaggagcaagaacgggctcttgaagttgacaataatcttcaacatgtattgcatgagcatgcaaatgagaggacagacagagaagaggaactagcagacttgttgaaagaaagagcagctctagaatgccagaatcaggaactcataaatttaaggtcagaaattgacggcatgtatgatagattggcaactgagaacgaagaggtcatggctgatcagcagactttggaaaacctgatgtctgacatgaccagcaagcatcaagctgtcaatgaagctaaatcatatcttgaagctgagaaggaagctcttactatgttaaggacttgggtggaagatgaagcaggacgtgtccatgaacgagctgagacacttgagaaggctttgagaagatggcgaatcccagaagattgatccctccaaactaactgtgctttgcataggaaaagtcttgttcaaagtttttggagctacttggttccagagcatctgccatcagatctgaaaaattctcaatggaatggaatggtcgtgccataatgttctttgagatggttcattatcctttggtgcttcttggcatcttgttgccatcttaggggccgtctgtatcccttcattttggagaaattataatctatttaataaagtaggctatttaactttaaatttaacattccataactttccaaagttcaaatataagcctatcacaaaactatgttactttagagaaattgattttatgtatttctaaacaatgttactctgtaatttataacacactctttgactcacctcctgtagtagaaatatagcaaataaatatctctccatatggtcaacagtggtacacta

SEQ ID NO: 182 - DNA, 2792 bp, Zea Mays
ggtgctccctcaaccctggcttcttttggttcttcgtttcatcgcgtcgcctccgccgttggtacccttctcatagctcctgtacctcgttcccacgcaggagagggtggttgtgctagctccagtgttgtagacctggacgtcagggactccagcctcaccttcttgtgcccgtcctcgagcctccacgagatactggggaagagattagagccggccctaggtgcgcatgctgctgcctagattcatcgctcggccgctccacgctcgtatcagccgccagcgccctgatcctccctctccctgactccctcctcacgttctccgcacggctagatctgcacctgttcattcctctccagtccctagcgagagattcagtctcgcttggcaaccggcgccgccgaagccgacaagggaggcacgtgcgcccagcgaacaccaagctcaaggtgggtgatcgtactggcgaaccgctgcagcggcggcaggagcttgcgtggcctgggcggaatgagccgattgaggcgtctattggctgtgcttgttggccgattctaggttacctgcagtccgcgaattctgagctcttactccatggcgccctcgtctgcggaggctgactcggcggtgtcctccagcggccgtctcctcgtgctctacgcgtcacaaactgggaacgccatggacgccgcagagcgtgtgggccgcgaggcagaacgtggcggctgcccggccgtcgacgtgctctccatggacagcttcgatcccagtcgcttgccgagcgagcggttcgtggtatttgtcgtgtccaccacggggcagggcgaccccccagattccatgaaggggttttggagatatatgcttcggaaggatttggatagacaatggcttgaggggatccatcatgcagtgtttggactcggggattcaggctaccagaagtacaattttgctgcaaagaagcttgatagaaggcttttacatcttggtgcagaaccagttctagagataggtcttggagatgaccaacacccttcaggatatgaaggggctttagatccttggttgctatctatgtggaagtctctgaatgaaattaatccgtcactcttacctagagtgtctgatatcaatgatcctaatttgagttttttgggggatccaaaagttcatgtcatttattactcttccaatgaagttacacaagatcctatacttttggattccaataaaataataagtagcgcaagatcaatgtcccctgccctacggttccatgctgatggagagccaccttacatgcttcaaatggtaaaaaaacagtgtttgactaaggagggtactgatagagatgttcgccactttgaattggaagatccatcttcggccatggccatcaactataaaattggtgatgctcttgaaattctaccaagtcaaaatccatcagctgttgatgccttcattgaacgctgtaacttggatccagattgttacataacgattcgagtgagaagtggggataaagttttcaagggttcagttgagcagatggaccgcatcaaattaagaacctttgttgctttgacaatggatgtcgtgtcagcttcccctcggcgatatttctttgaggtcatgagcttttttgcaacaagtgaacgtgaaaaggagaggcttcagtattttgcttcaccagaaggaagagatgatctttaccagtacaatcagaaggagagtaggactgttctagaggtgttggaggattttccttcagtgcaaatgccttttgaatggctggtgcaactaacgcctccactgaagaaaagagccttttctatctcatcatccccactggcacacccaaaccaaatccatttgaccgttagcgtcgtagcatgggttactccattcaagagaacccggcgtggactctgctctacatggttggccgggctcaatccaaataaaggcaatcttatcccgtgttggatacaccaagggtccctgcctcctccacgtccattggttcctctcgtgttgattggaccaggaacagggtgtgcaccattccgtgcatttgtggaggaaagggctgcacaggctgcagctgaaccaacagccccggttctgttcttcttcggctgtagaaaccaagaaaacgattttctatacaaggatttctggctaactcatgcgcaggatgagggggtgttgtcctcgaaaaggggcggtggtttcttcgtcgctttttcccgggatcagccgcaaaaggtctacgtgcaacataagataatggaacagagttcaagagtgtggaacttattactgtccgatgcagtgatctacattgcaggctcttcgacgaaaatgcctgccgatgttacagctgcgctagaggaggttatttgtaaagaaggtggtgtcaagcaagcggatgcttcgaaatggctcagggatctagaaagggctggtagacttaacatcgagacatggtcatagttgtgatgggcaagaaagtacatattatccatgtttgctgaatatggaaccagtgagaatttcatttcactgtaaatcaaaggcattggaaatgtggaaacatgtagatgttaaagcatccaatacggagaaatagttggaggatgatctaaagtttcctcatttagccctctgtacgaaacaccatttcatttgattaagtgagaacagtaattacatcagcttttgttgcatctgactgttagtgtgcattcaactcgtctagccctgtttcagttcagttaacg

SEQ ID NO: 183 - DNA, 651 bp, Zea Mays
  misc_feature (650)..(651): n is a, c, g, or t
gcaggcagcaagccgaccgcgcctgcaacgaccgcgactcagctcggcgcccaggcggaccgacgccggccacccggccaggcccgcggagccgcagccacgcgcgcccagcaagtcgagcttatctgaatttgatgatcttgtgggccaccctggattcgacaagcaagggacacgcttcaagcggctcatcaaagaccagaataatcataaggacctcgaggagggaattaaccgtctagttctttgctctggaaaggtgtactacgaactggatgaagaaagaaggaagacggagcgcactgatgttgctatatgtagagttgagcagctctgcccattcccctatgacctcatccagtggacactgaaaggcggacgtgcggattggcttatagagaaatgtattgaacttggagcttctagtgttacccctgtcctgacagaacaatgtcacacaatagcggaaaatcgggtggacaggctgtaatgccttgtgctggatgcagttaagcaatgtatggagtttgggtatcacctccgttcttggcctgttaaacaatgtacggagtttggggttaaatgattttgtaaagtgtttgcaaatttgttcaaaacatgataatgtgtaggttttgtgaatgattttnn

SEQ ID NO: 184 - DNA, 2824 bp, Zea Mays
atgtttatctcttgcgcgctcctcttcttcctccctggcgctcggtcgcttctctctggtctccacgcgcaccgcgtccagctccctcctccagctgtgtctgctgctcgccccagcctggagcttcgctcggcttccaactccggcgcccggccgagctccctggtaccgcgcccctacttctccttcttccctgccgcgtgctgagcgctctgctccctagcgcggccctgctttcccaagccaagtccctctttctctctctggtctatgtgccgcgcgtcctggccaagctcccagctcagcgcccagcttctctgcttcctgacgcgcgcgcccagctgagtctgaccccgtcgtgagctcgcccctggcgctcagcttcccgtccagccgcgtgctcctccctgtgccccagctcggcaacagctataagctccctggaaccagcgtctcgtcgagccccgccgcacgtcctgtttccttctcacccatggaagctacgcccagccttaatccccgtcgcgccgtgctcctccctctgtccctgctgcgcgcgtcgagctctggtgattttcctccgcgccctgttccttgcttgcccctgtgccgtcactcagctcgccatggaggttgtccgccatggtactctgcatcccgagctccctgcgccggatccctttccatgcgtgtcgcgcaagctcctctgttgggctcgccagcctccgttgtcctatccacgccagcacgcgactgtggtcgtgttcatcgagttcgccaacactctgttgccgattcgactatcgtcgctgttgcgtgcctcactgcgtgctcgccggggtgtcgtctattgtattcttacactcgccttgccgcttgtgccaacttcggccatcgcgacgtctgctccatcccggcaccctgctcttgtgcttgcactacaagaaactgataaatgttcgtgggtaaaattaagaacgtgggtacttgagttaagttcataggttaagttaagaacgtgggtacccacgttcttaagttaagttcgtaggccctggataaaaccgtcgaacttaacgagttaggaacgtgggtacccacgtttttaagttaagttcgtcgggcttgtggacaccgtcgaactttagaagttgtttggtcgactgtttttcgcccgtgatccatttgcaccgtgatttggtcccgttgttctgcgtttggttgggccgacccgtttccaatagcgtcatgaccggatacggacccgtagcgtctgattaccgctccctgcactgcgtgaatcgatcccgctccccacgccgcctcgtgtgaccggaggacgagagccctagctgcaagacgaccgccgccctgcaaggaccttcgacgacgtgctcatcgccggtgaggaccacctcttcctctctcctctcccctctctcacaccttctccatctccctgttgttcaataccaccaccgatggggtcgctgggtcgccgggacgccggatctcggagtggagggcgccagcaggacgaatgccagggagggggcctccgtcacgacgagctttgacaggctccacaacccgccgacggccagaatctcgctccgccaccgcggctacagggccttcgtgtccgtcccgggggtagcagccaagggtgatgtacaagttggaacttcacttgtactggccactgcacatggtgtatcacaatacaacagatcccttctatagaatcacctgatataagcgtccaaaccaatcacccttctctagaatcgtcttgcttagtccaagagaatacaacagatccattacagaaattcactgctactactcaagattatttgctccagatctattactcaagattatttgccagatcatcttttgcagctcccaatctcaggtcttaatgtatttttggattactgtgaagttgcaagagtacaatctcaagtcttattgtatcttttgcagctcccactctttatcactttatatggttggagcctggaggtagtcttcggcctcaaaacactagcagcttgactatatagaatgattaaatttctgaaaatgtttgattactaccttcacttcagtgtcgttagatgtaaatatgtaatacatgattatttgttcatcaacttaaactataacttgttgagggattttgggaaacaatgtgagcatatcttcgcttatttcagaatatgcaccagggctatcccaaagaaacacttgtgcgtttccttaaggctagagagtggaatgtagcaaaggctcataaaatgattgtagaatgtttgaattggaggattcaaaatgaaattgatagtgtgctcgagattcttctgtacaacttcgatggtggtacaatttgttcagtggttattttgaaagaatggcttggcatccatcgcgtcgctgctgctgaaatatctaaaggtctcccaatttttggcattggtgttgggcatagcacatatgacaaagcttcggctatagctacagccaaaatcataaaagtgcctggtttgaagctatcagcactaagccaaataaaggattccggctctcatcaagtgactccccctcatgttgactttgcggatgtctcaattctagtggtggagctacgaacaacaatccgatgtcctgatcgagagcgatggagttaatgtttgaacttgtgtgtttgaacttgtgaactaaaaatgtgaactatggatgtgaacttaacttgtgtgtttgaacttgtgaactaaaaatgtgaactatggatgtgaacttgtgtgaatttgtgaactta

SEQ ID NO: 185 - DNA, 1851 bp, Zea Mays
ggaccggagtggcatttgaccagctgaagtcaacaggcatgccgaacggtggcggcaagaggtggctgctgctgctgccgctgtcgcggtacgtggaggtggacgagcagcaaggtgtgcagctcttctactacttcgtgcgctcggagcgcgacccctacgaggacccgctgctgctgtggctgtccggcggcccaggctgctccggcatctccggccttgcctacgagataggacccttaaaatttgatgcccgagggcaaggtgaatttcccactcttctctaccgaccggagacatggaccaaggtgagcaacatcatatttgtggactcgccggtggggactgggttctcgtacgccaagtccgaggaagggctcgagaccggcgacaccaagcaagtgaagcagctagtcattttcctcaggaagtggctccaagaccatccccggttcgtgatgaatcctctttatattgctggagattcatacagtggtctcatcattcctactcttgcattagaaattgacagaagcatagaactcggtgaaaagatattttccggtctcaaggggtacattgctggcaacccgttgactggcggacagtttgatacagacagccaaattccatactttcatgccatgggacttgtatccgatgaactttacaagaatgctagggagaactgtggtggaaagtatagtgctccactgaatgctgtatgtgcagaggctgtccaagctatcaacaattgcacacgggatatcaataagcaatacatcttggatcctgcttgcccggatgatgatctgttgagccccaagactgtagcagagacagatggaacgagcaggttgatgctagagtctgcagattttctacttggttccaaatgtgcagctaagttccaaagatcatatcctttaactaattcaatccccttgtccctacactgtcaagtccttgactgcttatctgacctacactttcctttggccgcaggaagctttatacattctatcctacgcttgggggaatgatgatacagttcaggagagcctcggtatccgcaaggggacaattggagcatggaaacgatacagccatgcattgccttacaattatgatatccagagtgtagtggattaccattcaaggctagccacaaaaggatacagggcgctgatatacagcggcgaccacgatgctgttgtaccccatgttggcacacaagcatggattagatacctcaacttgacaatcgttgatgattggcgaccatgattcacaaggagttatgcgagcggcctaacatttgccaccgtgaagggtgctggacatgttgcgccgttgtataagaccttggaatgccaaaaaatgtttataacatggatttcagggaatcctctttgatgcaagtctgatagaatgacccatcggttatctgagtgggcgtcagccgtcaggaatcctctttgaagggtcagttgcttgggtttctttggtgtcaactggttcaaatccttgatcgatatggttgatcgtaatatttttggaacttatttcaagatttattaacggtattgttctcttaagacctgcctgttgattctgttcatataggtgaacgtgcatatgttgttgctatatgcatacatggggacatggggtgtaggggtgcttgtgcgttcgtacaaaaaataaagtgccaatttggattacttgtttggtccccatgcaggtgtatgtgcagttgcgtgtaaaaattctttgcataaaacaattataacttgcttcctaaatcttcatctaatcttgctgttcggtactgacacgctgttaggtggg

SEQ ID NO: 186 - DNA, 3868 bp, Zea Mays
cgcgtcccttcgcacaactaccagatccatttgtgcgttcacatcttctctcctccctggcaactgcttccatcatctccatcaccgtccccacgttctcctccctccgcctctcgctctgcgcacatccccatgcccacgccgagcgcttgcgcctcaccacccccgtcgcagccgcggccgtggcggcgtcgacgacctcccccgactttcccgccgtgggcgccgtcctggggaagcccacagtgctcgtgggtagtggccgagaagatcggagccgcggggttcatgctgaaggaggtggtgcgatgtccagctcccagaaatgctaggcgatggtgcatgcatgatgaagctgctgtccattatattgacatgattgatcagaccacgcttggtcaccggatgatcaagaaacaattcaacaagactccaagagctggctggcaaatcgattgcttggaacagagcttggcttcgattctttgcattttgcaagaatcgattaccaagataagaaaaggcgtaaagctggcaaaggcttgaggttatatggcgtggctcaagaactttcggttcatcttcacagatatttacaaatgtatttcgtgtcgattatagccctccagatggctttggctttgaagttttagatgaaaatatcttgcctgtccagaatcttggttccggaatatggacaaacttatctatcgcgtgaacaaggatgcacgtaaaatagaatttttagtaggtaggaggagttccttagggctgttcacgaccagcttggaagacccaatggcaattgcccagcatcatgatgcggtctcagaatgaaagcattaatggtatatagttggatatttcattcagagaggctcaagtgatagctgcaagtagttctaccttgtgcccagttttcttgttcttttaggtcaatgaaagttcccatttttgtggcgttgcttagatggttggtcctttcctcaaaaaaaaaagatggttggtcctgttgactaccaaaatgacttgaacttttggtgcatggacaaatggactagaagctttcctgtaacgtggcacatcataagatgttggttgattctcctgaaagcagattttattttactttaaccaaaggagaaccaagttggctgtcgtctcccactgtggcactattttttgggttaaaagtataacaccatcgtgagttgaaactcttgagacatagagataaaaaccaataaaactcacatccgacgtgattagcatgaccattactcatcaaaaatagttgaaataaattcttcactccaatctaatccaaataccagatcttcataagaagagcatgccaatgacattgttttggcaatcagttcatggttacacgacactactatgacagacttattttgaaacatagaacaatgcttattcaacattattatacaatcaagatcctaactttttgggggggttgcaacaatggagagtggagacaacatggagacctgagctgagcttaacccgcaaaagatcatacaccattctgtgatgcttcacaaggttccgcacctcaaattttggtgaaactgccttgttgttgtcttcatatctagcgcactggcatcccatgtagactgcagtttttgtcaaaaatgattttttttgaataagtagacattatatccttcaagatttttatatggaaatcctaaattgtgggcatattgatttttactctatttcttaaatgtaaagttgtaaacttgaatcacctagaaggaaccgtgttaagaagaaataagcaactatgtcttttcttctggaaagataaaatgtgtttatatttgaaagctagaaacatagctttctattatgtcacatcagtctaaaccagaatttaatcattttttataatgcacgtgcaatgagataaaaccaaaacaccttataatttggaatagagacttaacattttgttggctgggacattgggctatattttgcagcctcctcacttggcacagataacttcatttgttttccagagactgtattaatactttgcaggaataaacattgtgtcttgttatccattgcaatatacaacacttaagcccttggctgatagagtgattgtaaagattaactcttccgaggagaagacaactggtggaattttgcttccaacgactgctcagtctagacctcagggtggcaagaaatacgtcaaggaaaaatgtcgaacaactcagaagataaattcaagaactggttgcttcaacaagagtctgtccatgaggatggcatgcaacattacttgcccttcgattgagataggtggctacggtgatgctttgttgaacctgatatacgcatctccatcaagccagttcgaagagctcagtttagaatgtgagctagatgctacaggcaatcattctagagtgaaggatgctcaagttcatggctcacctatacctgagagtaatggaagattatcgacaactgctcagactaaaatgatgtccacagtctcagaagatgcaattcttgttggctcatctttcagataccaaagtagcctaggtaacaacaataagagggttgggctttttgatatgggtgatggaagtagtgagcctgctgctgaggacaacaatcaaatgcatcagatttcacgatgctgatatgtgctaagcatggaaacagaattgttctcacatgtatagttggtctaagtgatggcaaaagattgacacttgtggagttttttctgtgccagacatggagtcccttggaaaaaccgaatggtttgggatagcatatatgcatctttgaatatttcactctttactatcatttttcctgtgccagacttgtgtttgcctgttgcttgtctgtctaatgttgcaggtctatcatgggttttattctgcatacgataatacaactctactatatgagatcctgaagtctattaaatgggcaagaaaaacatatgtaaatcgacctgtaaatgttgttggacactccattggaggggatctagcttcattttgtgcccttgatctatttgacgttgagctcatgacttttggacagcctcggttaggcaatcctgcatttgttgtatgccttggctaacaagtcccaagaacaatccatgtgacccataaaaacgatattgtgccgcaattaccaccgtattattattacttaagtaaatggacataccaccacttcgctagagaggtttgacttcatgagagcatagatggaaatgtagttgccagaaatgagattgtatgtgatgattctggtgaggacccgacctatagcaggtacatatcagtctatctattttgtacatttatttcctatgtgtgtttcatattatttgtgttttctgaagaagtgggtcatgggatgagcgtagcagataatcttgagtactacagtgtcacactacatgttgactcaaggggaacctgtcagttcgtgattggtacagccaaccaagtatacaactacattcgtgaagttgatggatccatcatcttgttaagatatatatgcaagaaccatgagctctagaatcaatgtgactttgtatgccacgaaatgcacccttgtacaatatttttattttcaatttgtgtacagctcatgaaatactgttgtgtacaactcatgaaatactgggctctccagagggtaaggactaaggagagactcacctttttaaatgcacccctttgaccaagtgacattcgatacattgtaagctccataagattgccgcacaattcaatttgtgtatatcaataacactatgtattaccaagttatgcaagtatta

SEQ ID NO: 187 - DNA, 1166 bp, Zea Mays
cgcctttctagctcctgcagtcctgctgttagtgctgttcccctctctcttccccgtcctgcaggctccaggcgctgctgctctcgtcctccgctagcgagcgaatcgctgacgctggcccgacgccgcggcgggaggtatctcgctttcgatcaggattttggttggggcgtcgttctccggtgcttatctcatttctatttatcggtgcctcgggttcacggccaaattcgctgctgcgtggggctttggagattggagccgattccttaaagtggcggtggcagcgtctggtgggaaccatgagcttcgtgttccgaggaagcagggccgacatcgaggccggtggcttcacagggttcgcccccgagcgccgcaccatgcgaattcatgcagggagcaggccggtgaatagcaattccttggtttttcttctaactgtttttgttttgttcatggtactgaactcacaccagatgtctcccaatcttttgattatgacactctgagagcactggatgctgacaatagcctgcatgttccttctatgagtgaagaagaaataaattctcttcctgtcttcaaatataaagtccaggcacagcagggaaatgcccctgcccgaaaaagtgatgaggcatcgcagctatcggtttcttcaactggctccggcaatgagaaaaagcaggatggtttaaaagcagatggaactggcaaaactccacaggatgaactaacatgtagtgtttgcttagagcaagtcatggtgggtgatctgttgagaagcctaccatgcttgcatcagtttcacgtaaactgcatcgacccatggctgcgccaacagggtacatgcccaatctgcaagcaccaggtcagtgatgggtggcatgccacaggcaacggtgaagaggatgcttcatacatggtgtaagtagctgcccaggagtaggccataggtaactagtagctgctaacagaatccgtggaacgctgttttggaggtgacggtttggacttgcaatctagggatgtggtctaatccctgtctaccctaacaaaaaaccgagtgtggaatcagctgtccagtgcactgagttcttgtacaactcatgtttatttctctcattctctgtgatgttgatgcataaaaaggttgctgataatct

SEQ ID NO: 188 - DNA, 1973 bp, Zea Mays
tgcctctcttttttctaccacaccggcacacccacaccttcccacaaggccggaggtgagccccgcatccgcggccaagtacccatgacgacgaggctgacagcgacgttgttgctctccagaaccctcgtccgccgcgtaacctcgcgaaccccgacacccctcggccctttcggtctcgaaccatccgcaggaatccccatctcctggtccagacgcgcctcctcgaccgcctcgggagatcggggccaggaaccgccaccggccatggattcgcctatcaaggtggtttctcacctggggggcggacgaggaggaggagggggagagggagagggagagggagagggaggggccgcagcgatcgacgcggggaagtcggcacggaggccgctcagcctgtggcccgggatgtaccactccccggtgaccaacgcgctctgggaggcgcggtccagcatcttcgagcggatgatggacgctgggaacggcgcttcctctgccgagcagcggccgcagactgagctgctcgtcaagacgcccgcgcagagccggaccagcatcgtgtacaagttcgccaccgacgacatcctcagggagcagtaccgggacccctggaacgaggtgcgcatcggcaagctgctcgaggatcttgacgccctcgccggcaccatcgccgtcaagcactgttcagatgaagacagcacaacaagaccccttttggttgtgactgcttccgttgacaaaatggagctgaaaaagccaattcgtgtggacactgatttgaagatagctggcgctgttacttatgttgggcgttcatcaattgacatacagattgaagtgactcaggttgataaagatggcgataatcagtctgatcccattgcattgaccgctaacttcacctttgtcgcacgcgattctaagactggaaaatctgctccggttaaccgcctttcacctgaaaccgaaagagagaagcagctatttggagaaagtgaagcacgcgataagatgagaaaaaggaagagagaagaacagaagggaggactcgaaaatgggatacataggctccgtgccgaggccgagaggctggacgtgttgctcgcggagggccgtgttttctctgacctgcctgctttggccgatagagatagcatcttgctgaaggatacccgcctggagaattctcttgtctgccagccccaacaacggaacttgcatggtcgaattttcggtggtttcctgatgcaccgagcatttgagcttgccttctcgactgcgtatgcttttgttgggcagagaccttgtttccttgaagtcgatcatgttgacttcttgaaaccagtggacgtaggggacttccttcgattcaaatcatgtgtcttgtacacccagcttgacaatccagagcagcctctggtcaacgtcgaagttgttgctcatgtaacaagacctgagctccggaaaagtgaggtctccaacaccttccatttcaccttcacggtctgtagtgacacgctgaagaacgggttgaagattcgcaatgttgtcccctcgaccgaagaagaggcgcggcggatattggagcgcatggaggcagagggtttatgcaactaatctttccgcagatccacttgtttcggagttcggacgtgctttacttgatatatgtctcacttaccgttccacggtaccagctaaaacggggggatttggcgacgatttgagcagcagccagcagctatcataacacgccggcaatagaacggcatagctgtagctccatgcctccatggtactatttgtgattttttttacagagaccgcatgttgcgtataataacatactcctcgagactcaaaatgttcttttgagaaagcatcaaagcactatcgtttttttttatttgctcttgaaatggacggcggccgttcccatgactccaagaaccatgagtcccttttcc

SEQ ID NO: 189 - DNA, 1007 bp, Zea Mays
aattgtacttgtacggcgtgacgcgcttcccttctgcaccgaagtccgagcaaacagtcatacactgggacgcggagtcgcggacgcctgcgcgatcagcgaacggaagaccgtggaagcaaagaggcgcaagcgagcacggaacaaatacaccttcaggtggcctccctccgactgccgactgaatcttccacctcgcttcgcgcctccggctccgcgccgggcccgcataatctgtgctcgggatcgcctcttcccgcggcaaatgggggccgactccgaggacgccgtcaagcagctcagcctcctcatggagcaagtggaggccccgctgaagagatcgtttcagaatatgcaccagggctatcctaaagaaacactggtgcgtttccttaaggctagagagtggaatgtagcaaaggctcataaaatgattgtagaatgtttgaattggaggattcaaaatgaaattgatagtgtgctagagaggcctatagtcccagtagatttatacaggtcaatacgtgattcacaacttattggcctgtcaggatacacaaaggagggtctcccaatttttggcattggtgttggacatagcacatatgacaaagcttcggtccactactatgtgcaatctcatatccagattaacgagtaccgtgatcgtataattttgcctaggctgacacaacagtttgggcggcctgttaccagctgtataaaagtgctggatatgactggtttgaagctatcagcactaagccaaataaagatgttgacttccatatcgacagttgatgatctaaattaccctgaaaagacagagacctattatgtagtcaacgttccatacatattttctgcttgttggaaggttgtgaagcccttattgcaggagaggacaaaaaagaaggtcaaagttttgactggctgcgggagagatgaacttctgaaggtaaatatattcttccttgcttgctgccttttcacctgtcatttctggg

SEQ ID NO: 190 - DNA, 2076 bp, Zea Mays
atcgtatccaagtgtgtggctgccttctgcgccacggcgcgctgtcgttgcaggatatcgtccgccgcctcgaactctcgcccgggcaggtgaagaactccctcctcattctcattcagcacaactgcgttcaggcctacacaagccccagaggggctggcgataggacagtgacgctctacctggccatcttcgacaatgttctgcaccggctgcgcttctcaaagttcctttccgtcgtccgtgtggatattcctgagtcagaagttcttctcgaaggattacttcagaatggtaggctaacatttgagcaacttgtggagcgaacaatatttaaagtatcagaagacagccccttaccaacaagggaagaagtacgaatgaacttcaacaaacttgtctatgcgcattatgtggaacgttgcccaaaaccagaacctttttttgatcctcttgcggttgaacaacctacatccacaaggaaacgggctcctaaaactgttgaggcggttctttcacttgagcagaaagttgtctgtactgcagctctatctgacgctgaaagattttctgagataccatacttcatggacgggtcatcgagtgcaaaagatggccatcatgctgttgctggtaataagcgaaaacatgaaaccttagaagttgatgaagatgattcgataattgcagaaagtgaagtactttggcggataaattttgagagattcatattttgtttaaagaagaagttttgtgcagaacgaaagaaagcaaagatgaggctcggaacacttgctatatgggaagcattttttgaggccaatgtaacaaacaacgacaacaagactgtgacatcaccaatagatggaattttggaaagagtaggacaaaaggaaggaggcatgtcaatgactttggatcacataacaagtgtgttgaatgatttagagtgcacttctaccgctaataacccagaagaattcacattcgatttgaataaattggttgagacatgtcgaaacgatgagatagagtctcttgtgaaaaagaaacatgggcaagaagcttatacaatctttaggttattgctgaaacaaggctctccagttgagacggatgaaattactgacaggacaattctagacaagcaggttgttcatgaaactctatacaagctttggaaagatgaatacatagattcagagagagtcccttcaacatcagcaacaggaacaggaagcgctcagttctttgtttggagagtaaaaaatatttatagggaacacttcatggacaatctttaccatgctgctttaaacttgcgccagatggtcaattatatggctgaactactacttgagggttcaaaggatgaaatcaagcttcggaacagaaaaaacattttgatcctagctctcactagacatgatgaatcccttatgttgttccatgatttttgagaatactggaacaggatctggttataaatttctggtctttggagaaaccaaagcatggtcaaagcttcgtacctatgatgttgttgagggagttgctcgtcaacttgaattggaccatgcatgaaaattcggcttacatcccacaattgctaatctcagcaacctaaaccacagcctgtcaagtatcgaacagtggagcatctgttggacatgctcatcctttacaatcagattaaccttttttgtttcttttggtcaatatgagcatgatttccgtgtaacaaaatgtgttggacttcctgaactttaacaaagattattacattcagttaaaacatcgtttcccccagtttatatgtaacatcagaatagatgttctttgtggttaaatgtcattgtgcgccaagtcatgcatctggtatgcttgtctgttgctgttaacgcctcgtaggttgtctggacgacttcatttggaacacatgccaacaggcaaacaagaggggcatatttatattgcagtttagagtaacagacatgatatcctactatttctttgtaccatctctagagaccatctctagagggagtaatcgatagattcagattttgaattacc

SEQ ID NO: 191 - DNA, 2332 bp, Zea Mays
acttttgcccttcgaactaaaagcgcctgcatctcaaacccgacggcgctctcttctctatcctctgtgtcccctccaccaaaaccgacgacgacgtcgctctcctccaccggtgctcggcgctctccctccaccagcggtggtccacagacgctcggcgagctccaccggcgggcgctggcggctggtcagatccgctcggcagtcatccatctggcacatcggccgaagctcccagcgtcctcctgcaggccgagctgaaggttcagcgcgccggtggagttagacgacgaaactccgtcacgtcatacctctccgcctcccgtcttccagacgtctctaatcggggtcccagcgtctcggagaagaggagcagcacggcacggcagctgtggcgaggaaggctcctgtcccatcccaacccagttagcagccgcccaaggaggaggagatccaatcggcgtgcgggcgtccgcggtccatccatcgatccaattccaatctgcaggttatactcaaactgcacacagtagcatccttctggtacagtaacaaaggatttggaacccagccctctgttctccaccaccgcttcgaagatgccgcaggtaatggtggtggcacggaacttcatggatatggtggctgctcttcctgcgggcaagcttgatatgctctatgactcagcctttatctgtgaggcagtactcaggtcacttcccccactggcaaagaagtatgcactgcagatgttgtatgtgctggcaccagtgaccgctgcagcaatggaagagtgggtgcttgatgaatatgctgccaagcataaggttgccattgataagcttctacagctcagggtctttgttgaagtgcgcgacagacgacgggacgtgagctacaagatgaatcagaagttccagggaaacatgcagaagtatttggttgatggtggaagtttaccaagggaacctttaccattaagtgtcactggtcgattgcccacaccagcagatctggaagcctatgctcttgatcaatgggagtgcttcttgttgcaattgatcaattcatctcaagtcgaaaaagggtcaagttttagctcctccatgatgaagacgtttcagcgtggtcttctgagttcaagggatggtgaagcttcaaagttgactgaaaatggcttccaatttcttctgatggaaacaaatgcacaactttggtacataatgagagaatacatttcatctgctgaggaacgtggagtggaccctacggagctgatatcatttctcttggaacttagctttcataaattgggagcggcttatagcttgaacactctgactgatgtccagaggattgccatcagggatcttgcagaattaggactagtcaaacagcagcagggtcgaaaggatagctggttcattcctacccaattggctactaatctttcagcaagcttgtcagattcgtcatctaacaaagagggatttgtggttgtggagacaaactttcgaatgtatgcatactctacttccaagttgcactgtgaaattctacgcctttttgcaagggtggagtatcaacttccaaacctcatcgtaggagctgttacaaaagaaagtatctatggtgcttttgaaaatgggataactgctgagcagataatttcatttcttaggcaaaatgctcaccctcgtgttgctgacaagatacccgctgtcccggagaatgtcacagatcagattaggttgtgggaaactgacctcaacagggttgagatgattccatcgcatttgtacgaagattttcctagcaaggaatggtttgaacaatgctgtgattatgcaagggataatgggtacttgctgtgggaggaccccaagagaatgagactaattgtacgaggggagttccaccccgaaatgagggagttccttcgcaggcaaagatgaggaacgaccttgtacttgacggaccatgctatgcttctttgtagtgcatagaaacactgtatcgggtaatagttctcctttaaatatcaggaaagggtctagaaaagggctcagtttttgaattattttggtgacctgtgagctgtggaagcatatgaataatgtggtgttcaatggagcaaggcccaacatccttgatctgcttctaaatgttactagtgactgtaccctatgctggtgtatggctggtggccaggtcctgttggaactcttaggtaggtagtatggtgggatggagttggtatgctcttaatttgttgttatttggattgattctatataggacggagtgattttaaaaatgaaaaaaactcaaa

SEQ ID NO: 192 - DNA, 2672 bp, Zea Mays
atgcttcatgatccactatttcgccgtcgccgcaaaatcctccgacctcgctcgcgccaccgaaaaccaaacgaggaaaaatgccgtccccgtccctcctcctccgcgctcctcctctctgcccctccccgtcccaccccccgcgccgcttcgctcccccctccctcatcacctcgtctccgcctgcccgcctcctccctctgcgcctgccctccgccgcgtcccgccacacgcctcgcgccggtgacacgcgcgtgcccgacgacctcatcccgatcgcgcgctgctacgagggccgccttgctcgactcgagctcgccggcgccgcgcgccgggaacaggccgtcgcggcagcggccgcggccggcggaggggcttcggcggaggaccacctcgccgccggctccgacgccatggtcgtcgaggcattcctccccgggccccatggcggtgggacgaccgcttcctccacgcgagtgattttgcaagccaaggaagttaaagataaggccagtaagatagagaaacagttcggatctgattttttctttgcaaatcaacctgattcagagagtatgttggctatggcctttaagcaagttgtaattcagcggctctcaaactttcggctcgaggtcttccccccaggttcagagagagacttccaagattttggcaaaccccgaaaggggtctttggattgtagtatcagctcatcagatggaaaacttctgtcttctcttgctgaggccattttctcctgtgtcattgaggatgtcagaaaaaatcattttgggagcataggcagtttttttcagaagcgacagctcaactgctcaatggattcctcagtttgtatacacaaaacttctgaggcagaagtagtgaaaaatgctaagaggtgtctggagatcgttagtttaatgaagtcttctcatgaagtacgtgaaacaaagaatggatggtggccacctccacatcatgaaagtttggtgaagattgggggtcctgagttagtgctttgggccaatgagtacattcctacttataagctgcaaattaatgccaacgcattggagaattctaatcttgaagttgaaggtctttatgagttagaaagtaataggcgggaagttctcttaacccactcacaactggtggaactagggaacgttctagacatgtactttgaagatcaattcacattaccaggcaaaacattccatccttattggaatccagatctgtcaaagattaaaaagaacaatggttacttgaacaaccttttcacttttttggctgggacctgtatttttctttttgtcaccatctttgctcagttatgctggcctcaatcctttagagacaaaaggctattcaaggaaagttcaaatgcctcattatctcagaactattgttccgatatcaagtctctttataacagtgaggtacaagcttattgcatgtcacttgttaagaaaatgaaagactcgtatggctgccctggtgatgtaatggttgattctcacattggagcatgggttggagaactacctaactgcttcaaggcaatcagtagtgaggatgctgctgcttctggctcttttcagtatcctgacactcttagccaagaaaatcaatcccagccagtgccagttaatactaagatgtctcatttggaacaaaatgatagaacccaggaatttcctctgcagaatattgctagttttcaggtggtcatgtcagaagaaggtaaagtagtgggatttcagccaactaacctcccagctgtgaaccattgggcaacaaacccactagcaacacttctgtatcaaggacggtcactttctccaggcattatagaacccaggctcaaaatttctcgtccagctaaggctgccccgatcgaattattgatgtcagtaaatcaagattccttttttgctttggcaaggcctgttgaagacccaaggtagcagagcgagcttcctcagattgattctactgcaagattgtgaacagttccaaagatgtgaaacgaaacaaatagtggcagctgagcctgaacaggatttaacaaggtgcctgagttatgagaaagaaatcgactaatgggccccatcattttaagtaagatgccggaggagtggtggtggctgacgtgaagaagaaattccactagtatcccgtcggagtgcaggaggagcgatcggaggggcacaacaaacgtgggaaattggtgggctttggcataggccaaactctgtgaatgaaaagataatgatctatatattggcaacgactactatgcaagccgttcttttgtgcaagcgtgcaagcaaactatctgatccattaaatcgtgatataaccgtaggtcacatttaacacttaaacccttccactccagctcaatactctttataaaaaaaaccctaacaaatcatggttgtatctgtggttggattgtaatctaatggattagatggtttgtttgcacgcttgcacagaatgactgcttcataacagtcgttgccatatatattaggttctgtttgtaagcacccaatttttaaaagctgatttatagaaattgaggtggttccaaacataccggtttatgactcagtttataaaattagattttcagtttattaaaaatcaagaagctg

SEQ ID NO: 193 - DNA, 2099 bp, Zea Mays
ccgcgtgctagagtgcgaagaagaaacttgtggccaggagaggagccgcgcgaccgcgaagtttagtcatcgtctccagctgctgtcttgctcttccccgccagcaccagcacgcagcacgcagcaccagccaccacaccacccgtcacgtcactactgctccttcctttgtcctctcctgcctcacgtctcacgccagcagaagcgccaaacaccagcagcggacgaccacgccaactctaggtctacgaggaaggggggggggagggaggagcagcgcagcggcagccgatggtgtcgacgagctcgacgccgcaccctctggatccgtccgtcccggccgtcgtggggggcggcaaggaggaggaggaggaggcggtggagtcttgtgccgccgccgccgccacgcccttgccgccggttgggatcgacgacgaggaggagggcccccggagagtgcgcaagccctacaccatcaccaagtcgcgcgagagctggaccgaccccgagcacgacaagttcctcgaggcactgcagctgtactctttcgaggaacctactggtgtcgtttctggggactactccaaaagcgtgaggaggacaccataaggattaaagatgcttgcagggtgctggaagccactacgatgcaaatcttcgcaatgcacggttggagctttagaaacaggctaactaatagctagttttccaggtcccaactgcgcttgggtttgtttgccgcttgtggcttctttcgttttttatgtcagtacttgtggttgttggacggctgtcatctttgatgtaggccgggaacccttttcccattatctaaaaaaacctctgctttgtctcactggcgctgacatctcctgctgcctcacctgctcttccttcctctccgttgccggggctttgaccgtgactggaaaaagattgaagcatatgttggctccaagacagtaatacaggtctagttaaatctgctcttcggcactcaaatttgtgccgttgttttcctgtttagttggttggctttgtcacacagtgttttaggctagttatggtttttggtcacgctgttttaggtgaggaggtctacatttttgaagtaccaactaccagcataggattaggagtcacgcacagaagtactttttgaaggttcaaaagaatggaacaggtgagcatttgcccccacctaggccaaagcgaaaggctgcccatccatatccacacaagtcctcaaaaaaggcccttcaagttgtcttaccacaacaagtttcacacataatggagcaaggctgtggtacacctatggatgtagctactgttgctacagactctagtgtaaataatgcttttcctgttcaacatttcagtccgaggcatacacaagccatgccagactttgctcgtgtatacaacttcctgggaagcatatttgatccagagacaaatgggcatttgcagaagttgaaggaaatggatcccattgatgctgaaacggtactgttgctgatgaaaaatctgtcaatcaacctaactagtccaaactttgaggagcataggaggttgctctcttcggatgcctcaagcatggatcaaaagtcgggctcttcccgggttcatctcccgttcatgataacgagcaagtgagagaagcagctggctggcctgaaggcaagaaggtcgtttggagtcgtcacactcaggagcaaggcgatgcgtatgtacatatatcttaataagcagctttaggatagcttggtttgctcgaccgacatgttgcaagtttatgcgcctttttctttattctccgcccctccagttttgcccgttgtagtatggaacttataacatgcgtgttttatgccgcatcttacaaaatatttttgtcccatcacaaggatgaacgggtgggggcatgtgtgtgttttttttgccgtgtgtgtatgtatacagcatgcggctgtatgtgtagatcaggctatatatataacagactgtgtgctgttctattattgccctcgtttcaaatacttattttttttgccgttattaataatattattacatggagtatggtattagtatat

SEQ ID NO: 194 - DNA, 173 bp, Zea Mays
ccggacggacttcagcgcctccgtcatctccaccacctccgcttcgatcgcccggcctccacttctgggaattgctttgatcggtccccaaacttctgatcaggcttgggcgagatccccgcccggcgtgatccgcgagatccccgccctgcgggatccgtggctgcctactg

SEQ ID NO: 195 - DNA, 2251 bp, Zea Mays
cccgctgctttaaatctcggcgttttcgtggcgcgtgcaggcggagaggaagaggacgccaatccaaatccttatccccacgtgtgttatccttccattttgtgggcgggggtgagctcctgcctcctgccgccctgcttcgcaatcctcctccacctcgacaacgacgccgtcgcacctcgctgctcgccgccacagcggtctcacctcatcagcttgtgtcggccacgggacgcgaccgaggcgagggcgggcagtctttgtccggtcggcgatgcagaccctccgtcccgcgcccgcctccttcctcgtgccgcccgctccccagctcctccgcacagcgccgccaccagccccgagagcaaacgctgctgctcttgccgcggcgtcgcacggctggttcccctcgccgcaccgtgcctgccggcgccgtcgacgcgtgacaaggtctgcgtcgtccggtgctagcgccaccgtggcctccgtggatgatgccaagaaggacgtgctcatagcgctctcccaaatcatcgatcctgatttcggcacggacatcgtgtcctgtgggtttatcaaggatttggaggtcagtgaggccttggaagaggtctcatttcgtctggagctgacgactcccgcttgcccaatcaaagacgagttcgaacagaaggcgaacgaggtcgtcgcagcacttccatgggtcaagaaggtagacgtcacaatgtctgcgcaacctgcacagccggtatatggaggggagcttccagaagggctacagaagatctccaacatcatagcagtttcaagctgcaagggaggggtagggaaatcaactgttgctgtaaatcttgcgtacacactagctgggatgggagctcgggttggaatctttgatgctgacgtctttggcccaagcttaccgactatggtttctcctgaaaaccggttgctagtgatgaacccagaaagcaaatatattcttccgaccgagtatttgggcgtcaaaatggtgtccttcgggtttgctggacaaggaagggcgatcatgcggggtccaatggtttcaggagtcatcaatcagctgctgaccactactgactggggtgaacttgactaccttgtcatcgatatgcctcctggaacaggcgacatacacttaacactctgtcaggtggctccattgactgcagcagtgattgttaccacccctcaaaagctggctttcattgatgttgccaagggagtaaggatgttctctaaactgaaggttccttgtgttgcggttgtagagaacatgtgctattttgatgctgatggaaaacgttattacccatttggacaaggttctggaactcaggttgtgcagcagtttggaatacctcacctctttgatttgccaatacggccaactctttcggcttccggagatactggaattcctgaggttgtggctgatccgcaaggggatgtggctaatacatttcagaatcttggggcatgtgttgttcaacagtgtgctaaaatcaggcaacaagtttctacagcggtgtcctacgatagatccattaaagcaatcagagtgaaagtgccagattcagacgaagagttcttgctgcatccagcaacagttagacggaatgaccgatccgctcaaagcgtggatgaatggacaggggagcagaaggttcagtacagtgacataccagatgacatcgagccagaagagattaggccgatgggaaactatgcagtttctataacttggcctgatggatttagtcagatagcaccttatgaccaattggaaatgctggagcggttggtggaggctccgagtccagcagcagcgtctgcagtggcctcgtcatgatacagcagaaagaatgttcagttagcaaggggcaagaaggccgacttttagctcccagaaaatttatagctctgctacaaattttgaaagaattttacagtactgtagaaccatgctcattgaattttaaaaaaaggcagcagctttcgttcctcttaaaccattgtgcagacccccgttctcactaaaccacaggctagccttgacaataccaaaccataaaagaaaacggttactgttataaagatagttttttttcccagttatatagaaaattgatataaaactagtgacaaacagaaggtgcatgggtggatctaatatgtttgttacatatgaatatagtgaatacaagtattattgataaccattgcacatgag

SEQ ID NO: 196 - DNA, 3159 bp, Zea Mays
ggctccaatgcgagtcgtgaacgcaaacagatagcatcccgcgtcgccgcgatggaactctcgcccttgccgatgctcgctgcctcccgcttcctgtccctgtcgccgctgctggcgccaacatgcccccagcggaccgctccttcagtccgcgtggccacgcagacgctggaagcgccggaggcgcccaaaccgccgcggccgtcccccaggcgcagcgccgtcgctgaggtcaagggggcccttgaccccatcgccgccctcaacaggtttgaggaggtactgcagacacaagactgcaacataattctgcgccactgcggggacattaggcgttgggatgacctctctaaggtctttgagtggatgcaggagcgcgagatgaccaacgctgcatcttatagcagctacttcaagtaccttggactgagccgtgaccctgcgagggtgcttcgagtgtacggtgccatcaaagaccgaacattgagggtccatgtctccgtctgtaattcagttcttgggtgcttggtgaagaatgggaggttggacagcagcttcaagctctatgacgagatgatacgggaaggtctatctcctgatccattcacctacagcaccctgttagcagggtgtatgaagttgaagcaaggttataccaaggcaatgggattgatcaatgagatgaaatctcgtggtcttcagatggatattgtaatatatggcactcttctggcaatatgtgcatctcataactactgtgaggaggctgaagtatactttcagaaaatgaaagatgaaggccatagtcctaatctgttccattacagctccctgttgaatgcatattcagaaaattctgattatggaaaagctgagctattgatgaaagatctgaggtcctctggattaacaccaaataaggttatgttgaccactttgttaaaggtgtattctaaaggtggtctctttgagaaggctaagggactgctaactgaactggaagcctcaggttttgcacaggatgagatgccatactgcatattgattgatggccttgtcaaaggtggaaagatacaggaagcaaatattctatttaacgaaatgaaagaaaaaggagtcaaatctgatggttatgcatttagcatcatgatttcagcattgcacagaggtggtcatcaccaagaatcgaaacagcttgccaaagaattcgagtctgagaatgcatcatatgatctggttatgcttaatacatcactgcgcacttactgcagcacaaatgacatggagagcgtaatgaggatgctaaagaaaatggatgaatcaaacatatcacctgataacattacatttaataccttgataaggtacttctgcaatgcaaaggtttgtcacctagcatacaaaacagttgaagatatgcatgcaaagggtcatcaattaaatgaggagctttgttctcatgtaatggtacagctaggaaaggcaggtttcccttctgaagcattttctgtgtataatatgttgagatatagtaaaagaacagttcacaaatctcttcatgagaaggtcttaggcatcttagttccagcagaacttctcaaagctgcttatatagttgttaaggacaatgctgatctgatatctccttcttctttggagaagtttgctaaatcgttcatggtctcaggcaatataaatctaattaatgatgttatgaaagccctaaaccgctccgggtggcgtatcagccaggacatctttgggagagcaattaagagatacatccaaaagcctgataagaaacagttgctgctgtgcctcttggactggatgattggacaaggctattctgtagactcgtcatcaaggaacttacttttgaagaatgcacaactttttggcgaaaaacaagttatagcagaaatcctttctaagcagcagatagcatcaaggactattggcctaagacacaaaaaatgataaaggaaagattttgtatatgtaaattgttcatatacatccaggatatgcctaggctgattgtttgaggatcaatttattgtgctctgaggggtaagttagagacaagatatcagttatcatcctcaagtgcggatatgcctaggctgcaaacaaactttattaggatttcagattatggaattttccaatgaggcatgcttgttccagtagcggtacagctgggagtggagtatgaccatgcttgctatgatatgtgtgttagattgtgttgtctgaaggcttacagtaagtttttgatacatatggacatacccatacagctaaagcaaagacaatttgatttgattttagaggattttgcatgtaattcaacatggttgaggtcactgtacctagaaagcagcatacagatctaattttgttgacaatcgtacaaggtattattacttaattactttggtgaaaagaggttgctttgaagatttgacttcacgttgtacatacaggcagagtatcagacaggtggatttttcctaaaaagtggggaatatgtttctaacctgttttgttctttaggaaactggattgcacactattgtgcctttatgcaaaccaagttatgtatcatttttaggtgatgaattgtatctttttttagaagatgaacagttatgtatcctttttagtggatggattgttattatatccctgttattgtaggattgtgatttgaaactaggaacttatacctctgaaatccttttgttttgcagcccagataaaattgtagccatgctgaggcatccaatgtttatctgttatctctattgaaaggcttgaagttatttgtcttcatcgctaaattggtgccaatgttgaggtgaacttggagaaagaatcgtgctttagtctgacaatttatttgctggtggttacataagatgtcctttttagagatgcgtctatggcacgaactggtaaacagtgacatgaacagatagctactgtactatattttagctttgaggcagagcccgattatttttcttatgctaggcgtcaattttgcctttgagatatttcagtttgagcttagctgaacggtggggactctatgattgaacttaaccaccacaagccgcatgatcttttcaataaatattgtcctgagtctac

SEQ ID NO: 197 - DNA, 1763 bp, Zea Mays
agcgtcctctagcttcttgcccagcccgggtagtacaatacaacccccgtcccatcagctggcagaggccaggccatcagcacccacacccacacccactccctccgttcctcctccatcctcctgcccccaagtacggccgccgccgccgctcaccggatccaagaagaacagccgaggggttcggtctccctcccagcagtgacgagctagctgctccgtgcgttgattgcgtgtttgttattacgtgtacgtcgtgtaccggccgtgtttagctgcagaaaatatagtcgattgggcttaggccccgaagagattgacagaagagagcgagcacctggcgcggcgaccggcatggaacgcatgccgtccccgccgcgtgctcgcttctctttctgtcagcctctccctcgtcctgagccgacgccgatcgagcgtcgtgtgtgtgtagctagctataccttgctctgggcagcatcagtcgctgcctgcctagtggctgctggcgctagtggggcggcagacgctgagacgccaccaccgatactggaaggcaaggagccaaggagggagggggaagggaagggggagagagaggaattggcacgggcgggtgcggtggaaactgtgccacgcagccgcgcgcgcgcagagatgggcaaggacgacacgcatgctgcgaggggacgacggcttttgcaggcaccaagggcatgtcacctcattatcttctagagatacgcacagatttctcgcattttttttgctcgttcctttcggtcaggttgtcggggggttactaccgaggaagaggatgaggctgggaggggggcatggagacttggagaggagcagccaagaagagtagtagtagtactttccttccacttccacgcctctcagtacactgagaaaaccacttcggagcgcgagttcgtggttggttttgcggtacactgaaaaatgattgctagttttattcgccgtttatttatttatctatatttttgctcgcatgctcgcaagatttccttctcttccgctccactcccgggtctctcttgctgcctcagctcacctcgcctcaccttggtgggatgctggcagtacactgcggcactgtaaggatttaacagaacgaagactagtgctgcatcatctctcgctctcgctctcgctctctttctctttcctttctccctccctcgtggtgcaggttcagctcatctttgaacactgtagccattattccagctagctcgcgctgtttctgctcttgcttgctcgggggttctcttctcgctctctcgagttcttgctcggttcctcctgcggccatggcggtccgggtggttgcgcgcgccggcgctagcaagctcctgtttgcacaaaaatggagcgtggggggcaccatgtgatgacccaaatttggcaaagaccgtggactcgccttgccctttgccagatctggtctgcatctgaggtaggattgggtactttcttgtctctctcgctgcacacagtcaaacacatctggtcttttcattcgtgtggtttcggcgccgtgaacatgaattttcagctcctctctctactactcaccttcgtcgacctctcagatgtacgtacgcaggtaggggtggagagaagaggacgacgctgctgctcgttatactgatggaaagtgctgctgcatatggatatgagggagcatcatgaactaatggggaacgtcatttgcagattttacttgaccaagcatc

SEQ ID NO: 198 - DNA, 1365 bp, Zea Mays
cacaccttcccacaaggccggaggtgagccccgcatccgcggccaagtacccatgacgacgaggctgacagcgacgttgttgctctccagaaccctcgtccgccgcgtaacctcgcgaaccccgacacccctcggccctttcggtctcgaaccatccgcaggaatccccatctcctggtccagacgcgcctcctcgaccgcctcgggagatcggggccaggaaccgccaccggccatggattcgcctatcaaggtggtttctcacctggggggcggacgaggaggaggagggggagagggagagggagagggagagggaggggccgcagcgatcgacgcggggaagtcggcacggaggccgctcagcctgtggcccgggatgtaccactccccggtgaccaacgcgctctgggaggcgcggtccagcatcttcgagcggatgatggacgctgggaacggcgcttcctctgccgagcagcggccgcagactgagctgctcgtcaagacgcccgcgcagagccggaccagcatcgtgtacaagttcgccaccgacgacatcctcagggagcagtaccgggacccctggaacgaggtgcgcatcggcaagctgctcgaggatcttgacgccctcgccggcaccatcgccgtcaagcactgttcagatgaagacagcacaacaagaccccttttggttgtgactgcttccgttgacaaaatggagctgaaaaagccaattcgtgtggacactgatttgaagatagctggcgctgttacttatgttgggcgttcatcaattgacatacagattgaagtgactcaggttgataaagcagatggcgataatcagtctgatcccattgcattgaccgctaacttcacctttgtcgcacgcgattctaagactggaaaatctgctccggttaaccgcctttcacctgaaaccgaaagagagaagcagctatttggagaaagtgaagcacgcgataagatgagaaaaaggaagagagaagaacagaagggaggactcgaaaatgggatacataggctccgtgccgaggccgagaggctggacgtgttgctcgcggagggccgtgttttctctgacctgcctgctttggccgatagagatagcatcttgctgaaggatacccgcctggagaattctcttgtctgccagccccaacaacggaacttgcatggtcgaattttcggtggtttcctgatgcaccgagcatttgagcttgccttctcgactgcgtatgcttttgttgggcagagaccttgtttccttgaagtcgatcatgttgacttcttgaaaccagtataaacatgtcgttgtcaggggcggaccgacgttgagctgag

SEQ ID NO: 199 - DNA, 810 bp, Zea Mays
atgtttatctcttgcgcgctcctcttcttcctccctggcgctcggtcgcttctctctggtctccacgcgcaccgcgtccagctccctcctccagctgtgtctgctgctcgccccagcctggagcttcgctcggcttccaactccggcgcccggccgagctccctgaatatgcaccagggctatcccaaagaaacacttgtgcgtttccttaaggctagagagtggaatgtagcaaaggctcataaaatgattgtagaatgtttgaattggaggattcaaaatgaaattgatagtgtgctcgagaggcctatagccccagtagatttatacaaatcaatacgtgattcacaacttattggcctgtcacgatacacaaaggagattcttctgtacaacttcgatggtggtacaatttgttcagtggttattttgaaagaatggcttggcatccatcgcgtcgctgctgctgaaatatctaaaggtctcccaatttttggcattggtgttgggcatagcacatatgacaaagcttcggtaattactctgatgcttgctatttgtttggtaggctatagctacagccaaaatcataaaagtgcctggtttgaagctatcagcactaagccaaataaaggtggctgaattttcagatttggaacagcgtctaagtctgaatttccaaagtagtttcttggacagttaacatcgcggatcctttgcacgatgcatcattttaaataacacggtgctgcgaaatgaagtctgttttcactctcatgttcatgttcatgcacaaatatggaagccaca

SEQ ID NO: 200 - DNA, 720 bp, Zea Mays
ctaacagcaacatgggttattaaggtctgtagtttcaaagtatgatatggcgtcataattacttgaactgtgataactgcagttgactggacattgtttggttattatggtctgtaggatcataggtatgttttcacttggcatctgtgataactacagttgacctgtcaatattttgttagaaagagctgtaggatcttatgtgataatttctcacctttaagctttgggttcgccttgatatttctcacctgtgatcaatctaacactaagggagcatggtgggagaaagaaatgagtcttttggttctcagtgtaatggcagattcttctgtacaacttcgatggtggtacaatttgttcagtggttattttgaaagaatggcttggcatccatcgcgtcgctgctgctgaaatatctaaaggtctcccaatttttggcattggtgttgggcatagcacatatgacaaagcttcggctatagctacagccaaaatcataaaagtgcctggtttgaagctatcagcactaagccaaataaaggtggctgaattttcagatttggaacagcgtctaagtctgaatttccaaagtagtttcttggacagttaacatcgcggatcctttgcacgatgcatcattttaaataacacggtgctgcgaaatgaagtctgttttcactctcatgttcatgttcatgcacaaatatggaagccaca

SEQ ID NO: 201 - DNA, 1902 bp, Zea Mays
ctcccagtttccgtttttttaatgctttgtttactcgcggggatcatggggtaatcgcgtgggccgtgcctggctgggtttatttatgccgacctgccaattggagcaaatcccctttcctgcccctccccctccgcctttcctctctctcgctctcctcctctcctctcctctccttccgcatcacacaccacgactcccaaccgccggttggctttgctgctccgagctcttccacacccgccctctctcttgtgggtcggcggccgagtgtctgcgtcgtccacggagatcagggatcggcggcggggtatggcgagggagcgtcgggagataaagaggatagagagcgcggcggcgcggcaggtcacgttctccaagcgccgccgcggcctcttcaagaaggctgaggagctctccgtgctgtgcgatgccgacgtcgcgctcatcgtcttctcctccacgggaaagctctcccagttcgccagctccagtatgaatgagatcattgacaagtacagcacacattctaaaaacctggggaaagcagaacagccttcacttgacttgaacttagaacatagcaaatatgcaaatttgaatgagcaacttgtggaagcaagccttcgactcaggcagatgagaggtgaagaacttgagggattgagtgttgaagaactccagcaattggagaagaatctggaatctggtctgcatagggtccttcaaacaaaggatcaacaattcttggaacagatcagcgacctcgaacaaaagctccccaaatcatgggtaccaggacgccgagccaggaccaaacctgcacatagacagaagagacgcacctgctcctccggggttgacagcaagggaatctgttttcttgcagagggcacactttagtttaaagcatgtactctctctattccaaattgtaagttgttcagattttttctagatacgtagtttttacttgtatctagacacggtatattcttggtacatagcaagagctatgtatcttgaaaagctaaaatgacttactatatggaatgaagggagcacaaagcttactattgatattatgtggtttaaatgcgacaatcaatatattctgtttctcctactgtttataatactattgcaagacactaatttttcccatgctttactgcagagtacacaactggcagaggagaacaggcaactgaggaatcaagtatcccacatacccccagttggcaagcaatcagttgctgatgctgaaaatgttatcgctgaagatgggcaatcctctgaatcagtcatgactgcgttgcattctgggagttcacaggataatgatgatggttcggatgtctctctaaaattagggctgccttgtgttgcatggaagtgaaaaaacaagatggtctgtgttgatctgggtggagctgcggcttcagcagataggcacttgtgttattgtcttatggacgacccccgactactgcaataatcttgcatcggaagcgagatcagttaacctgatttgtcatccttgtggcttcatgatgcgatgttgcgcttgtaccgtttgctaggatgttaactggactagaatcgtgtctacttttgtactgctcgtgaatcctatctactttgtgctatccaaagttatgacctaccacttgcatcggcatggcgcgccggccgtaagctgtgctcaagcatgcatgcttcgtgttatacgtgtgtacttattgggaagttgagtctgcatacaacctgagcgtagttgttgtcttacagagaccgtttagttttcagaaccgctttccccatgtctcgtttggatccttagaattgaatttcattatgataatagtaatttatacaaaaatcaattaaggtaatatgatt

SEQ ID NO: 202 - DNA, 2935 bp, Zea Mays
ccttaataccctaaccttcttactgctccagcgaaggcacacagccgccgctgtttcttcatcttactcgtgctcggcacgcaggcgacggcgacggcggcggcgttcaggctcgggctctcagcgacggtatcagtggtctcccgcctctcgccagtcgcgtcgcgccctcgcctccgatcctctgcacaccgtccggtgaccttgtgttgtaagtttttccagcactgcttgctcacccatttctcaattagaaaacctcaaattctgtccctgagcaccaaatcaagaccataccaatttagtgagtccggacagatggcaatggccgcagttctggccaatggtgattcacagggtcgtcctcagaggaactatcaagttgttgttgctggcactcgtgacatgggcattgggaaggatggggtcttgccatggaagcttcctggtgatcttaaattctttaaagagcttacactaattacatctgatcctgtcaaaaagaatgcagttataatgggaaggaaaacatgggagagcattccagttaagtcaaggccattgcctggtcgtttgaatgtcatacttactcgatctggtagttttgattttgcaacagtagagaatgttgttatctgtggaagtatggagtctgccttagaactgctagcatcaactccatattgcttatcaattgagaaagtgtttgttataggaggcgggcaggtactgagagaatatcttaaaggacctgcatgtgaggctatccatctaactgacattcagtcgagcattgagtgtgacactttcatccctccggttgacttctcagtgttccagccatggtattcatctttcccggtgatagagagcaacattaggcattcgtttgtgtcttttgttcgtgttagaaagtcagtggcagaaactcatgagtcaaatggcaaggaatcaaccgaggttgataccaagaatgacaaatttgaaacagagaatttctcttttctccccaagatggtatatgaccgccatgaggagtaccaatatctcaatcttgttgaagatattataaggtctggtgctcagaaaaacgacaggacaggaactggaacattgtcaaaatttgggtgtcagatgcggttcaacttaaggaaaaattttcctctgctgacaacaaagagggtattttggcgtggtgttgtcgaagaactcctttggttcatcagtggctcaacaaatgcaaaggttttgcaagagaagggtattcatatctgggatggcaatgcttcaagagagtatctcaacaggtatctatctattggatataagctgcaaacaagctatgtctctgttcttgatatctaagaagggcaggcttgtgcagtagtgagagcaaggcactaggtcgtgggttcgaactagcctctccacatttgtgagggaaaagcttgcctcggtttatcccttccctagacccccccactcatgtgggagcctttggccctggatctacctttttttctgttcttgatatctaatccacctggccatcttttctagtgttggcttggcacacagggaggaaggtgatttaggtccaatttatggatttcagtggcgtcactttggtgctgaatacactgacatgcatgctgactatacgggaaaaggttttgatcagctaatggatgtgattgacaagatcaagaatgatcctgacgaccgtcgaataattttgtcggcgtggaatccttcagatctcaagaagatggctcttcctccttgccacatgtttgcacaattctatgtggaaaatggggagctatcttgccagatgtatcaacgctctgcagacatggggcttggtgttccattcaacatcgcatcatattctctcctgacatacatgattgctcaagtttgtgatctttctcctggagattttgtccatgttataggggatgcccatgtctatagaaaccatgttcgagcactggaggagcaaattcagaagatgcctaaaccatttccaattttgaagataaatccttcaaaaaaggatatagattcttttatggcatcagacttcaagctggttggctatgacccccaccagaagatagagatgaaaatggcagtgtaatggtggcttggctggagccccccatcctatggactcggtggatgtaatcagtaggactggtactacataaaaattaaccggacaccgcactagcttgtttttggtgatggtgctgaatgttcagtgggagacgttttctctgatttatcagttgcgatttgcgtactatggtcgcttaagtcaactctacaaaatcggctcccttttatctggagccagttgattactcgattgcgagtgtgagggatgatctaggcataccctgttgcaagggcctactgggtgtgtgccggcccccatgaggctgtgacgattgcgccagtccagtacctcgtgagaattatgtaaccgaagttgccgtgtacctgggagaactcccgtactgtttggtgtttgattgcctatttcactttgcagtttggtcacaagataacgacttgctggtagggttttgagaacacattctgttgcgtttttcttgtgctttctggggggcagaaagcctagcgccgtgcttgccgaagtcgggctagcgcttgcacttgcagcggcggtgtacgatttggttggagcgtgaagtctcaagtgatcctgcaactgtcctgtcagttaaactcaaagatgttggaaattgtagtacgatgcgacccctgcgagttttgtagagttgaccctctttcatttcattgtttttttaattcaaatcaagtttcgttaggcctggattcctggttcctcttggctggagccatgagcctttgccatcgctcctagcactgtggatattcggag

SEQ ID NO: 203 - DNA, 1473 bp, Zea Mays
atggagggtggtgcttcaggatctgcagctgtgactgactctgctatggcagaagctagtgcagttgaccctgacttagcgttggctcatgactcatatgctttcttgataaattggttggaacggttcccacagtacaagcatcgtgatttctacatcactggagagagctatgggccactatgtccctcaattgtcttggttagtgtaccaaaacaacaaaggaattaagaatccaaccttaaacttcaaaggcttcatggttggaaatgcggtaattgacgattaccatgactacatgggcacatttgagtattggtggacacatgggcttatctccgatgaaacttatgcaaagttgtgggaggattgtaaaaatgatgtgtctgagaacccctccgaggaatgccaaaagatttatgaggttgctgaggctgagcaagggaatattgatttgtatagcatctacacacctacttgtaagaagacttcattgcaaaagcgcagactaataaggggaagaatgccctggctgccgagaggatacgatccttgcaccgagctgtacatcacgaagtactgcaacttgcccgaggtgcaggacgccttccatgccaatgttactggaataccatacgcctgggtgggctgcagtgacccaatatatgagtactggaaggattcgccgaggtccatgcttccgatctaccgtgaactcatctcggcaggcctaaggatatgggtcttcagcggcgacaccgactccgtcgtgcccctcacggcgacgaggtactccatcgacgcgctgtctctgccaacgatcaccaagtggtacccttggtactacgacgaagaggttggtggatggtgccaggtgtacgagggcctgacgctggtgacggtccgaggcgcggggcacgaggtccccctccaccgtccgccgcagggcctcaagctgttcgagcacttcctgcggggcgagcccatgcccaagcctgtcgagagcgtccagtcgttctagatgagcttgctgccgcgcttggctagttggctttgatgaatagtaaggccggacatgtggcaagccatctccactccacatttcttcaccacgttttcaataactggcgctggccgaaataataagagcagaacgaataaaatgccgctcgctagaatgatctggctgtgcgtgtttgctttcgagttatttttatataccacctacacactttcacgttggaaaatcgatagtggtcgctacaaaagttccaaggataactggataagtttggcaaagctatactccatgctaaattcatatgggtactgacatactgtcaccgggaaaggctataccttctgcgaccgtcaagatccattgtcatcgtccgaaaagtgtgtttagttttaatccgtatcggcttctgttgcttctaatgtgtttttgtgtctgtagattacaactgcaat

SEQ ID NO: 204 - DNA, 1451 bp, Zea Mays
aacaccgattcgtttccccttggcacctggcgccctgtcgccttcgaaaaacagccgccgccgtcgcccgtcccggatccgacggcccccgctccttcgtctagtatttatactagtgccttgccggcgctgctcctgttgcctctcgcatttgcccacgcccgcagcgcctcgcctcggctgctctacctctatcccgcgacccgcgagatcggaatcgcggcgccccgccgccctcctccaaaatggcaccgtctctgctcggggggttcaccaagtcgttggccatgacggtgctctccgagatcggggacaagaccttcttcgccgccgcgattctggctatgcgccatcccaggaaactcgtattggcaggctgtttaactgcactaatagtcatgacagctctatcggcttctctaggttgggttgcaccaaatctgatttcacgtaaatggactcatcatttgaccactctattgttctttctatttggcatttggtcattgtgggaaggcttcaaggaagatgggtaccgagattcggaagaattggctgaagttgaagcagagctggatgctgcctttaagagtaataaaggcattttctattacattctttggtgagtggggtgacaagagccagattgctacaattggcttggctgctgatgaaaacccgttcggtgttgtcctgggtggaatcatgtacgagctgcttcttttactgacctggctgctctatttacatggcttattgtgtgttccctggtaaaaacttctttctgtgcttagagcgcaagcactctgcactactgctgccgttcttggtggaaagagcctagcgtcccagatatctgagaagatggttgaactgtcaagcggagtgctcttcctgctcttcggtatcatgtccttactctctggaccagaaggagaattgtaatccctgcttgagcctttttcagctagctgattaacatggctttctcttcttagacctatcttatttcagtacatgaatgatggcaacgaaagccatccatccatggcgaacaggatggtgatttaacagtttagccgacacgctgtaaacatttcagtcgcccttcaaaaattactacatgttacagaagtctgtagcgattgtatatttgtattctgtcgtgcccagcacgtgaaattttgttatcgcaattacatgcgttaacaaagctttgttcgtgaaccaagtattcaggcaattaatatggggcttatagcaggcctttgtcttttttcgttgtgttattcctttaatattaaatgtcggctagttttctatggaacttcaagtcttcaattgtggcgaaggtaacgaaacaaggccaatcttattgaatgttttatcaaaattttctggacattaaataaattgatatgacaatataaatggagagataataaaagttt

SEQ ID NO: 205 - DNA, 2663 bp, Zea Mays
atgcttcatgatccactatttcgccgtcgccgcaaaatcctccgacctcgctcgcgccaccgaaaaccaaacgaggaaaaatgccgtccccgtccctcctcctccgcgctcctcctctctgcccctccccgtcccaccccccgcgccgcttcgctcccccctccctcatcacctcgtctccgcctgcccgcctcctccctctgcgcctgccctccgccgcgtcccgccacacgcctcgcgccggtgacacgcgcgtgcccgacgacctcatcccgatcgcgcgctgctacgagggccgccttgctcgactcgagctcgccggcgccgcgcgccgggaacaggccgtcgcggcagcggccgcggccggcggaggggcttcggcggaggaccacctcgccgccggctccgacgccatggtcgtcgaggcattcctccccgggccccatggcggtgggacgaccgcttcctccacgcgagtgattttgcaagccaaggaagttaaagataaggccagtaagatagagaaacagttcggatctgattttttctttgcaaatcaacctgattcagagagtatgttggctatggcctttaagcaagttgtaattcagcggctctcaaactttcggctcgaggtcttccccccaggttcagagagagacttccaagattttggcaaaccccgaaaggggtctttggattgtagtatcagctcatcagatggaaaacttctgtcttctcttgctgaggccattttctcctgtgtcattgaggatgtcagaaaaaatcattttgggagcataggcagtttttttcagaagcgacagctcaactgctcaatggattcctcagtttgtatacacaaaacttctgaggcagaagtagtgaaaaatgctaagaggtgtctggagatcgttagtttaatgaagtcttctcatgaagtacgtgaaacaaagaatggatggtggccacctccacatcatgaaagtttggtgaagattgggggtcctgagttagtgctttgggccaatgagtacattcctacttataagctgcaaattaatgccaacgcattggagaattctaatcttgaagttgaaggtctttatgagttagaaagtaataggcgggaagttctcttaacccactcacaactggtggaactagggaacgttctagacatgtactttgaagatcaattcacattaccaggcaaaacattccatccttattggaatccagatctgtcaaagattaaaaagaacaatggttacttgaacaaccttttcacttttttggctgggacctgtatttttctttttgtcaccatctttgctcagttatgctggcctcaatcctttagagacaaaaggctattcaaggaaagttcaaatgcctcattatctcagaactattgttccgatatcaagtctctttataacagtgaggtacaagcttattgcatgtcacttgttaagaaaatgaaagactcgtatggctgccctggtgatgtaatggttgattctcacattggagcatgggttggagaactacctaactgcttcaaggcaatcagtagtgaggatgctgctgcttctggctcttttcagtatcctgacactcttagccaagaaaatcaatcccagccagtgccagttaatactaagatgtctcatttggaacaaaatgatagaacccaggaatttcctctgcagaatattgctagttttcaggtggtcatgtcagaagaaggtaaagtagtgggatttcagccaactaacctcccagctgtgaaccattgggcaacaaacccactagcaacacttctgtatcaaggacggtcactttctccaggcattatagaacccaggctcaaaatttctcgtccagctaaggctgccccgatcgaattattgatgtcagtaaatcaagattccttttttgctttggcaaggcctgttgaagacccaagcgagcttcctcagattgattctactgcaagattgtgaacagttccaaagatgtgaaacgaaacaaatagtggcagctgagcctgaacaggatttaacaaggtgcctgagttatgagaaagaaatcgactaatgggccccatcattttaagtaagatgccggaggagtggtggtggctgacgtgaagaagaaattccactagtatcccgtcggagtgcaggaggagcgatcggaggggcacaacaaacgtgggaaattggtgggctttggcataggccaaactctgtgaatgaaaagataatgatctatatattggcaacgactactatgcaagccgttcttttgtgcaagcgtgcaagcaaactatctgatccattaaatcgtgatataaccgtaggtcacatttaacacttaaacccttccactccagctcaatactctttataaaaaaaaccctaacaaatcatggttgtatctgtggttggattgtaatctaatggattagatggtttgtttgcacgcttgcacagaatgactgcttcataacagtcgttgccatatatattaggttctgtttgtaagcacccaatttttaaaagctgatttatagaaattgaggtggttccaaacataccggtttatgactcagtttataaaattagattttcagtttattaaaaatcaagaagctg

SEQ ID NO: 206 - DNA, 1228 bp, Zea Mays
atttccgttttccctccacggccgcgcccctctttccctcctccatttttgagatcaaaccctcggacagcgcccctttttcttctctccccaccccctctcacccccaacccaccccactccactccacccgcgcacaacagatcgcacgcctcggttccctccactcgacgcttctcccgctcctaacccctagtaccttcgctcgctctgccgcccccgccgacgacgcgccagatccgcgcagcagtggtgtcctccgcggcggatcgagctcccgatccgcgcagtgggagtggcggcgagcgcaggagcgctcggccgggggttccgcgaggctggagacggaggaggaagggagcggtagttccgcggtggtagatccgccggtcctgtcgccggagatggactcatccgtcgagaagcaggggagcgtggcgctggatccggacgagcgcgcgccggcgtccggcgaaaccaaggcctgcaccgagtgccacaccaccaagaccccgctctggcgcggggggccctgcggacccatgtcgctgtgcaacgcgtgcgggatccggtaccggaagaagagacgggaggccatgggcctcgagtccagcagcaaggccgccaccgccggcggcagcgagcaccagcagcagcagcggaagaagaaggccaccgcggcggcggccgcggacgaggtcaccgtggagctccgcgcggtggggttcggcaaggaggtggtgctgaagcagcggcggcggatgcggcggaggcgccgcctgggcgaggaggagcgcgcggccatcctgctcatggcgctctcctccggcgtcgtgtacgcctgacttggctagcaaccgcgccggcccccgagacgccgcgcccaaaggcggcgaaaggagaggagggcccgattcgctggacgtgcggcatgatctgagccccagacagatccgtccgtctggatctatgctaagttttcccggctaagtagtagctcgtcggttcgaacaaggcgagttaataatccgtgtccgcgctaggctagcagctctgttcctctctccccctcccgttgcttgctgtgttcttgccaccgcctcctctagttgtaatcctgccgctagtagtgtgctagtagtagctgtcctgctgtaaccttctcttgcaatgtaaggagagattatatggttggtcattcttgcaatcctaacgctagtcctgtgct

SEQ ID NO: 207 - DNA, 1705 bp, Zea Mays
aaacgaggtcttcattgatctcaagggaggaaactgcaaaatttagggtttgtttggccctattcgcacacacccacgccgtcggatcctcctgccctccccacgtccacctctctccgccgaagaatcggcggcggcggcggcggcggcgagcgccttcccttgtcaaaatccacccggcggcagagcagagcctcgttgctgaggaggggagatggcaggcatgaccgatatgccgatgaggccggcgcggccgggcccgccgatgcagcaccggggccctccgccgatggcgcgcctccgccccgaaccaatcgaccgcgagaagacctgccctctgctgctcagggttttcacaagggttgctggtcaccaccaaaatgaagagttttctgtgagagggaaagaaccaaaggatgaagttcagatttacacatggaaggatgccactctccgtgagcttactgatcttgtgaaagaggttgctcttccagcaaggaaaaggaacgcgaggctttcttttgcatttgtatacccagacaagaatggtcgttttgttgtcagacaggtaacgctataagaatttgggcatgtttggacccttagctccatctcgccttgcttcgctgggcaaactagccttgccaggaaaggtggacgctctgtttgtttccctgggcgggctaggttactaggtgctgtatgctttcctagttaaaaacttgcttttgcttgcaagctttgtgatttaactgcttggtactcttgctcatggagaattggagatgcaatcaccaaatttccttatatgtgagattgcctccatccatctaaaggaacacaacctgcttgaaaatttgcagtacacataccataccaagtcatatatacaatacaagacgactagagaaccatcccaggcattaccatggacacaatcttccacatgtcattcacccaaaatacaccgtgccatatatagtctcatttgtccaagctgcgtattatgccttgtattcattatgccctgtataggttcaaatggcctatataccgtttcatcattgtgtaaatttccatgtgtatgcactgcactgttgcccttcgcttatggccatgtgtatttcgtcgtgcttgaacatctgaaggtgggttcgaccttcgcttatggccatggaagaggtgatgatgccaaaactcttgcagagcttgggttccagattggcgattacctgagcgtcgcgatcatgtaagccggtgcccgcaatgagttccggtgactgcaccggatagaactgatgtgatgtaaaaaatgcattggttgcgacgagcaagggaggagtatctgttagcgctaggaagtggaaccaaaactgtctgtaatgccggtactaccaaagttgcctagacactttgaacgatcaaagcgtatggtatggtttcttgttggtatggtgcttgtctgcggtgcctgaaatttccaatccattgagctgcacgtcaatggctccatgttaagatgggctgaacggtattccaaggggtgggcaagatacccattatctgaaccgttatccaaacctgaactacctgaacctgtacccgacctacccaaacctgaattaaccaaacactagtttggatcctaggtctcaaaacccaaaattatattgggtaccgggtaacatgtctcgtgcctgaatta

SEQ ID NO: 208 - DNA, 859 bp, Zea Mays
cgcgaaacgcgccaacaaccagatcaatggagtgaggcagtgactcagctcagggcctcgggcccagcacaccaaccctccagtagtatctctgacgtgcgggctccgccagacaacgagctcacgagtcacgatccaaatcccttttccactccgccggacgtcgagagaggcggtgggtgcgggacgcgaaggcgaagccctagccccctccctgccgcggacgccgatggacccacctcgcgccgtcgcctttcttctcatactcctgcccgtgctcgccccggtggcctccggtgtacctttcgtcgtcctacacgggattggcgacgagtgcgggaacgatgggctgtcatccttcaccaagatgcttggggagtggtcaggctccaagggttactgcatgtgcattaggcgaagggtacttcggatccgacgcgctacagtctccgcttgactcgcttccataggggagagaaggcgagggcccgtggcagacgagaaggggggctcgctgcagcctcagacgtaccccgaaggccttcccttagacggcgaacgcccagtccaagcgaaggcaaggacatgacttcacagaatcaagggtgcgacacacgagcggaggcctcgacaggttacggagaaacccaggactccgccccgcagtcatctgggcccacttgtaaaccccttgcggggtagattttgtagtgcgtccgaattaccatactccgtccactgtaatgaccccgttagaggaatattttgggaatgtaacagtacttgggacccactacccctcccggttacctataaatacccctaccttgtacacagatgggacatgcataacaagacg

SEQ ID NO: 209 - DNA, 2140 bp, Zea Mays
tctctcagagcgcctctggtttagcattcatctaatagacaggttttgaagggtttgtacataacgatgaaaggaaagagagcagatctgatgcagacaactcagaaggagataagaagactaagatcggatctttcaagaaaaaagcaattaacgcggggaacaaattcaggcattccctgagaaggagaagcaaaaagaagaccgaaaggggggattccatcaaggatataagggacattaaagaacttcaagatgttgagacatttcgacaatgcttaattgacgaggatttgctgccgccacagcatgacgattatcacatgatgttaagattcctaaaagcacggaaatttgatgttgagaaagctaagaatatgtggtcagacatgcttaaatggaggaaggaattcggggttgacaaaatagaggaatttgagtacgccgagttagatgaagttaaaaagtattacccacaattttatcatggggtagataaagagggaagacctgtctacatagaattaatagggaaagttgatgcgaacaagctagtacaagtgacaactctagatcggtatgtgaaataccatgtcaaggaatttgagaggtgcttccagatgagatttcctgcttgctccattgctgcaaaaaagcacatagattcgtcgacttctatttttgatgtgcaaggcgtgggtttcaagaacttctcaaaatctgccagggaattaatcacacgattacagaagatcgacaacgataactacccagagacattgtgccagatgtatataattaatgcgggccaaggcttcaagatgttatggagcacaataaaatcattccttgatccaaaaactgcttccaagattcatgttcttgggaataagtatcaacataagttgctcgaaataattgacgagtggttagtattttgtttcttggtcgtacatttatgttgtttacttccattctaatttctgcttaatgcattaatgcagtgaattgccagaatttcttggtggcaaatgcaagtgtattgaaggttgcgaaagatctgacaaaggtccttggaaggatcccaacataataaagagagtcctcaatggcgaggcgaactatggcaggcaaattgtgaccatatccagcactgatggaaggatagtcagttatgcttggccagtgcacccaaatagaaaaggcagtgatgcatctgccgagtctgggtctgaagtggaagacgtaacatctcctactgcatcaaggaacctgattacacatcctattttgacccctgttcacgaggagtcaaaattgtcggcacatggttcttcatctgttgttcatgcttctattggagaaaacattcctgttgtggacaagattgttgatgatggatggggtagtcccagatctagtccacaagctgcttcttcaggttctttgtccctgaggaatttgcatggcacatttgaaggactcagagctcaaactatcacatggctgacattcttgatgatgaccctttttgccatgctttgttctgtcccaagcaagatggctagaaggatctccaaccaatctggacaaggtgcaggtgcttgaaacgaagccgtctgagatgccgtttgaaaaggaagaattgctcaatgcagccgtccgccgtgtggatgcattggaagctgagctgatttccacaaagaaagccctttatgatgctttgatgcgacaggatgagctactcgcgtacattgataggcaggagctgatcaaatttcgtaaaaagaagttctgcttctaagatttgaccgtggagcagctgttcatgtccggagccgtttatgtgtatattggattgcggctaatatgtagtagaatgtaatgtgtccatctttagaagtgtgtaaagtatagtaggaaagaaaataggtgcgttgtggtgtgcgcctctcctccccgaggtgaatgtgtggtctagcacttgtgtgctaccctaaattgtaatcttggaagttggtgtatagctgattgcgtgctaatacgtagttgtaaatgaaatcgcatgtgctcgtgtttacatgaaaaactaaatatagcagcaccaaaaataaaaccggttatttggttagaatcatat

SEQ ID NO: 210 - DNA, 3111 bp, Zea Mays
gcatcgacgaggtggagtccttcctcgcccgcaccttccggatgatccagctgacttcccgacgccaccctcgcacaagatcccgatgtggcaatggcgaccagcgacgggcgctcaacgccaccgcgccgcctgcgaacccatggtgagaagtgtggtatcgatctagagccgaaggacttccccaacaccccttcctccatcggcgtgacatcggccagctcatctgcgacgacgaggcatcttcgaccgacttctcgacaccccatcctccatcaatgcggctccagtaccccttcctccatcggcgcagcagcatccaattcatctacgatgacaaggcatcttcgaccaaccacgccctactacaagtggtgtcagtccatctcagataagtggagtaatttgtttgtatctgtatcttctattttatttcttccctaatcctgattaatagcctaatcacgcgacaactaatacatgttgatttctttccttagtcggtgtcgtgcgcatgtgagatctagggagaggaagaggaggaagggttgtggggaccgggggtgcaagatggcggattcacctgcaactacaagaaaagaaagagcgagagatttacagaaaccttcagagccgcggaggaggagaaggagattaggaggatctctacggcgctgacggattagttaaggaacgaaatatcacatcgtgtccggtaaccagattcagatgtgggcaccatgcgtgggtgcagggccaggccgaggtgaaagagattcgacgattgagaatacatcaaagaataaaaatgtggaactcggattttcagatgaagagcgtgaccaagaatttcccgattttccatcatttattccattcttacctcctctgagtgcagctaacctaaaggtctactatgccacacgtttcaccatcatagttgggataatggtgttcggtggttttcttgcaccaatcgggcacatcttatgaagactccatctgcagcgttcatctgtcgacgtagttgagatgaattctctatgcctacttctagagtgatgttcaaagaggttgacgctccttcaccatccccagctttgtggaatgggccacaggtagccatttaggatgacaaagccacaagggtgtccttcatcaaggctatgctagaagcctcagacttgtgtctgaggaaaattcataaaaatggtacacagaagctgggaagaaagtggaagaggaatttagcacttgccctctgtcagtcctaatgatgagcgttaagaacaacaccaagtcgggcagcggcagcagaggggatggggccaatgacggaggcggagaggagaacccatcgatttggtggcgtaagtgggagctcatcgaggccggtgcgtttgggcaggtctaccgcatgatttatttgcccttatagggatcagcagatcccacacctattacatgatctgtccttctagaatagaatccgctctctatcttctgaaccggtactgccttcttcaatatcagccaccggccggtccacctcttcaataatcgtccttcatcgcccttcagttgacctgagatctagaaggacacaacaggcaaggtggatgtattcgtagttgattatatgttaaaagcaaattttggatgacattggtggagattgcttatctctaagacacatctactcattctttgaatggaaatcacatccacgttctagaaagtctatttttacttcaaaagtactccttctgttccaaataaattagtgttagcatctctgcactctattgcccacttcccccctcatcggtgttttttattgttgcatatcaattttgtggctcaaatgcccctttgaaacatatagcaccaaaattatcctaattaattaattggtttctaactggctactctatttgcaacaatggggatatataaccttaccatgtctgtttatcacagtgcatcttagattgcatcgtattgtaattgttttagttccttgacatactgtttgtgcaacaggaactgcttgatgtacttacggttgggtatctgtgtagctgtagctgccaagttgcctaaagaaaagttcccgacctttcacatgctgccacattgccacaataccttaagagcttttctatacttctatgatttgtgttttcgagatctgagttatttaaatgttgtctgctattttgaatttttatatgaagatcaaagttctcaattgataaagtaattaatataacaagcgaacaacacatagacaaactaattaatgtagcatatagacgaataaggaatcctgaaacattgaccgtgaagaaaattattgtgcacatatgcactctttctccaaaatttggcatttaatcttattgcaacatacttgtacagaggggcgagggttgttcagtgctttgacatgtgtgcaactattcaagcacaatggttagatgatatccccattcattttagattattacattgtggtgttcggcttcttcagtcaagcagcaatcatgcaacatgccttactgtagttttttatcactgcacatgttgctggacaaatttatggactggaggattatagaggactaacaagtgctactgggagattctcgagcaccattgaactaagagattccaaatagttctttggagtctattgttgatgttggcggggataatctagcagagatttgtcagattttttgtgcaacacggaggctacatgaggcagcaacgatcccattcttctcgcatgccactttacacaagctaaggatagcttctggtctcactcatggttgtggcagggaaagccgagtcagtagggtttgtcatgtagctggagttatctcagaccacatattagatgcagtgatgatgttaatggaggatgtttacatttaccgtgcaagcaagatgacttatattatgccttaggacaataagtattgttttcactctaatgaaatacttggtaaaaagttgtctctgtagttgtatatttgactgtgaatatttgaacccactgttacaattgttgctaattgaggtcagatttcagaggccaaataa

SEQ ID NO: 211 - DNA, 1254 bp, Zea Mays
ggggcatgtatgacatcggtttttttttctaccgacgtccggagaatttcattagcaatcggtggccacagagagttaactaaaaataattcagcgacagatatcttcgactcctcgttcgtggttccccatcgtcatcgccatggatttctcttaggctcacccgtccgctcggctcgcttccttccccactctctctgatcccgtcgcacttccctcctcgctgcagcccctctactattgcgattaccgtttcctcgctgccctttcctttttcggtcggcagcaatcaccggggcaagcgaaccctcgatttgcgtccccgctctctgctagcgcccctaaaagaggagcgaagcgatgtctatgtcgaagacgggtcaggccgcggagaaggatgagcagcagcagtcccgagggatagcactgatgcagggcatctgcgccgtggtgtaccgcaaggccgataacacgccctgccccatcaagcagcattcaataaggacgctctcaagagtttgaacatcacccatatcttgatcgttgcaaagtcactggatccagtatttccagctgaatttaattacaagaagatcgaagatgaagctataagctctggaggcaatgttttggtccattgctttgctgggcggtcaaggagaagcatcaaatgagcctcgaaagtgccttgtcactagttagaagtaaacgacctcaagtggctcctaatggggggtttatttcccagctggagaagtttcagaaatccttgcaagtggagcaggaatggagaatgcaacctgtgcagcactgataattatactagtgttataataggtgcagaaggcctcatatgtagtgaaggcgtatgcgttgtaagagcgtcttgaccgcgtattatgacatctggataacaagcgaggccttggcaaactttatgatgtaaacagcaagcaacgttgttcatccattgggatgcagtttacatgttgaataatattcactgcaatttctcttcaaatgaaccaaagaggggtaatagttggtgctctctctcctgcatagatgcggcacatcaatcaaccttagaagaagaatactccatcgtgcatagatgcagcacaccgttgacttttctaaaaaactttgactagtcgtgttattcaaaaaaataatgagttattatttattttattgtgatttgttttatcacttaaggtaataagacgagtgtccaaagttttcaaaaaaaag

SEQ ID NO: 212 - DNA, 3304 bp, Zea Mays
caccatccttgccccaagccagagattcgcggccatccgcgataatcaatcagcacaaatcgacggccctggttttctgttccttcaatcaccttcctaagtcgacgccaacctaccatcgacggcgaggatggaggtccttaaatatgtccaaagcgaggctgccacaccaatccccatcctccactaacgaaccaatatcttacaggtactctgcatgtgtgtgaagccgtctccgcctccaccaccctcggtatggacaatcgattcctcttcatctccctctcgttgcgtcgtctcctgttgcgatgtggatcgtcgatgcgaatggaatgcggtgtgtggtgtaattctggtggtttttgtgacctacgagtcatctccttaattccaatctggtatttattagtatgggtgaattgtcatggatttgtgatactccactgttctggggaatgcatatgtttttcagattgttaatataactctgcttcctgtgagaatacaggatatgtttttcatgtcatggcccatgggctctgaaaacttatgttagactttgccccggtttctaattgcaggcagtgagtggtatgagtggttgctttcaaattgcctgatgcacaatccctgcatgaggggcctccttttgtcagtgcaaacagttttctgttttatcaatattttccatttttaactgccacgtactgttgtttacatatagagtcaatatgtttagttgtatgtgtcctgtattgagccaattagcatttcttgatttatttattgtggcagcatgtggatgagccaactgctttctactgtttaagacatgtctgtacctatcactctgcatgtgtttccatgcatttcagttgggatttggtccagccaatgtgctatcttcgaacattctacatacccattcttgtggtagccacattaataaattgataatttgtgcgttttgaggtatctgatcttttatcacaacagagcaatgcttcacacacaactttggtgctgatcaaaatgcatattcaccacaatctacagactctgatattgttcttgatgattaagtagtttgggaatctgcaacattttccaaaccatcattgttggagctgatatttttccttttcatttctcgtagcctggcttagaaaacggaaaattgtaattattgactgcttgttggcaggatactgctagatcagatgcaatttgggcaataccggatcatttttagaaagtgttcggagatcaaccatggctaatggcttcattcgtggttccaagattctctttatattttttacatttttctatcattgatgaaaatagaggttttgatacaaataattcactctacctactttaatttgagatctaaatgtttttattctcttgtttattccttgttcattaaaaatagagagtagagttatctctttgaagtactgaacatatcacttgcctttttgctttttctggaatccgatgctatttgggcaataccagaccattttgattttaatccatttctgcaccaataatatttttccctaacagtgatgcatttttaccttgtaatctgaagtctcattttgaagagaaactaagggacacgggtaacatttacatgtttttttgtagaatatctgtgtttgtaggcaacctgtctaatcaatacttgtctcacagcatgtggactgcatatcacttaccttttcgcttcttctggaattcgatgcaatttgagcaatatcatatcattttgattttaatccatttctacaccaataatatttttctaacagcgatgccttttttacgttgttgattgaagtctcattttggttcaatggaggaacctgaacatcttgagatgagggtggatcgcttttaaaaaatttctcatgttgcaggtgcggcgtcccctccatctcaactccaccgactaccgctcttcttgctctccgccggaggcctccttccagttgcaggtgtaggtgcggcggcttgtcactggagtttaggtccaaagtgatatagcattacatcccagctggaggaggtcagcgaccaaagtacatttgcaacgtaaattgttttacataaaacggtgaagctgtgacgatggtacagagaggcgcgctccggcagcgctctgcttttttagatgaagattcaacttcgatagagaacaggctgattgcttggatgatttggattttgcaattatgcatgagatgagcaaattgtcataccgggttatggaggaagatgttatccgttaatcagctgaagtcctcaatccaactccaccttgatggttcaactgctgttgtcgaggacattggccgccagctgctgacctatggacgaagaattcctaccccagagctttttgcaagaatagatgttgttgatgcaagcattgtgaagcgtgttgcaaaccgcttcatctttgatcaggcggccaccacaggttcggtccagctggaggcaatggtggtgatagagatggtggtcacggagccaacaactcatggccggggggagcacgtcaaggcaccgccctagcccaaacccgagacggattacttcaccgagaaaagaaatctgtggagccagagcttgaaaatatcgatgtcgtggggaggatgtttggagactggagtgtccatgcgctggggtcatcaaagtcgttggacaatacgtctaaggagtgttgtcttcccgttaatcttgcagcacatatatgcaagcagtcctacaatcattcaaaattaggagcagcgatatcatgggacgatgctctgcgatcgagcatgagacactttcagcacaagtactacaacctgttcacctgcaactggcacttgtttgtggcgagctgtctgaaccggcttgcctacaatggctccctggagtggaatgtcttgaacgtggctgcccttgtctggtttcatggctgatgggtggacagaatgagtactattctagcaaccgagcagatcatcagaaatccagaattatcaataattatctaacgtctgcatcccgaactagaatcaccacaccggtctgtcatgaccatgagaacctacaacaaagcagatctatgttttatacaaattttttactcccgtcgcaacgcacgggcactcacctagtaatcttatatgagtagaatagaccgcgacccattttatattaaattttggcatttgatgattaagataactatttaaagtaacattttttgttactgcctatgattataattcaaaggatg

SEQ ID NO: 213 - DNA, 1624 bp, Zea Mays
gtccgctcaggcttcttatgtttcagattctcctgcaaccgtttggtgttgttttggctgagttagaagctccgtccaggataaacgatgctccataaattatgaagcagatgcccccgccacctaaggatttggagattgctatagttcggagctcgagctgcccttcgatcgaaccaagaacaaccctgctgccctcacaacatcaaagtttggtatcagcaagatggagcttctcaaggcatgcttttgtagggagtgactgctgatgtagaggaactcatggatgaagatcattgatccctttcatgtcatggtctattcaaaaggaaaatccacttctgagattaacagttgagaactgtgagttgtccagtattggtgtgattatacttctggactgcctcacaaatgcgaagcaactccttgatgtgctatctattgcagacaatcatctagggagtcctgtggcagctgcattggccagattcttgggttcacatgtacgagctttaaatgctacagatatcggcttgggaacagtaggcttccaaatacttgaggaaacattgccaacagaagtagctctttcccacatcaacatcaggaggattggcctgctggtggacaaggaggcccccgccctggtcctggtgctgctgctacagctccagcaccagcaccggttgctgctcgcccataggctttagcttttcgaccgtgttgaaagtcttctgcccacgcagtttcggagttgtcgcctatgggtgaaaaacaagaagatggaaaatacaagcactctgtggatctcccgaaaacaacatttgagctgagagcgaattctgtacagcgggagctagagctccaaaaattatgggacgataatcaggttctgaaaagggtttctgaggaacactgggtgatcttcacatgggccatgcgctcaataaaatcctcaaggattttataaatcgctacaagctgcttcagaatcataaagtgtcctttgttcctggttgggattgccacggccttctaatagaactaaaaggtggcttgtgcgaacgaggcgtggcaatcgatgagcagtggcaaacccaaaaatcttcaaaagcctaggcaaaagtagtaactaaagatacatcaccttgtccagtttttctgcttttacttcgactatatgtcattgtgccacaaaaaacttgtttcatcgacttatgatgagtcttctcaattgtttcttgaatatgcttttttagaaccaaattgaattttacaaggtgcaatattgattagaaaaaggtgtgatgctgactgggaaagcgctactcccttgtatgaattagctggtcgatgattttgtttcccatcctttttaatttcttgacatccgtttgttcattggggagcacatatgtagaatgatgattaatgtttttaaatattaatagattttatcataatatattgccgccgtaacaacgtacgggcatacaactagtcattgaagaagtcaaaaagatgagagaagcacggtaagagacagagagacaccatgagaagttctttgagttcgaaaagtgtaagcttgagatggaacagactaaacttgaattggagcgag

SEQ ID NO: 214 - DNA, 3220 bp, Zea Mays
agattccttgtcgaaactgtacttgcattccatgaggcccgcctcagcggcagcgcccttcccagtctcagatccgcgtcgtcgcggcccctccccctctcccgtgcgctgcgtcccccaattcccgctccccacgcacccagacacgccgagcgggagaggaagcgacagccagcagccgaggcggccagcgccagcgctggcatgaccactcccactcccagtggcgacggctcgcccccgggctcctccgacctcgtgcccccttcctaccccgagatgatcgtcgccgcgatcaccgccctcgccgaggagaacggctccagccaggccgccatcgcgcgccgcatcgaggcgcaggcccgcggcgacctgccggcctcgcacccggcgctcgtcgccgcccacctctcgcgcatgtccgccgcaggggagctcgtcgccgtcgcgggggggaagtacgcgctgcccccgccgccggcgcagccggcgccggagtcaccggctgacgacggcgaagacgatgactgcgctgacgaggtggacgaggaagaggaggcgccggagcctctgcccgtgcctgtgccgcagccgcccgccaagcgcgggcgtgggaggcccccgaagccgcggaccgcggacttacgatgcatagcaaatactcctctggatgaagaaagtgcattatctcaaatggttacctgcatagaagatctccaagaaattgtcaactgcaggaagcatgagtctctcacagtgcagacatttggaacacgaatagaaaaactacacagggagaagtatctgcagctctgtgactcggttgatatggacaaggttgattcaacaagcaccataatggatgaggaagacgacgttgttcgtagcttgcgcgcaagtcctgtccatccaatcaaggatcgcacttcaattgatgactttgaaatcatcaaacctattagccgtggagcatttggacgtgttttcttggccaagaaaagaactacgggagacctttttgctataaaggttcttaggaaggcagatatgattcggaaaaatgctgtcgagagtatattggctgaacgtgatatattgattacagtcaggaacccttttgtggtacggtttttctattcgtttacctcacgggataatttgtatctggtcatggagtacctgaatggaggggacctttactcattactgaggaatttagggtgcctggatgaagacgttgttcgtgtgtatcttgcagaagttgtactagctttggaatatttgcactctatgcacatagtccatagggatctaaagcctgacaacttgttgatagcccatgatggacatattaagttgacaggttttgggttgtccaaggttggtttgattaacaacacatatgatctgtctcgccctgttgttagtggggcttcactgtatggagatgatgagcctcagatgaatgaattcgagcaaatggatcaccgagcacggagacaaaatcgttctgctgttggaactcctgattatttagcaccagaaatcattttggggacaggacatggttgcagtgcagattggtggtccgttggtgtcattctatttgagctcattgttggcatacctccgttcaatgcagaacacccccagacaatttttgacaatattctgaattacaaaataccttggccgcatgtcccggaagagatgagttttgatgcacaagatttaattgacaaattattgaccgaagatcctcatcaacgactaggagcaaatggcgcctcagaggttaaacaacatccatttttcaaagacattagctgggatacccttgctaggcagaaggctgcctttgttccctcctcagataatgcatttgatactagctacttcaccagtcgctattcctggaatccatcagatggaaacatatatgaagcatacgagtttgaggattccagtgataatggaagccttagtggaagcagtagttgtctgagcaaccgccaagatgacatgacggaggacagcgatggcctcaatgagtttgaatctagtgcaaatgtcaattattctttcagcaacttctcgttcaagcgtgcagcggttggatcaccgtctaaaagttcagaatgcttgcttgcacgcttgcacctaagacctgcttgcacaatattcgttccctatttgtaaatatcaacatttgcaattgcaatgttatcgcaatagcaattgtagtactgctgtacctgtgagccagatcttgaatgctacaaaggcagtatcctttctttttagtatgatgatatatgcagctcctgcgtgtttgagacaaaaaaaaaatgttgccatccattgataacttccctagaaaattgtaccacaacattcctctgacatcatcttcggtgcagaatcatgcttccatcaattatgatatgttcaccaaaggattgaaggatgatccaccgccaagaactgaaacgtagcaatcaatccaaatttggactctcatccgagtaatcaaacagtctacaaggtgctcgcgcgatatcaaagtgtgaggcatggtctgttccaattgaggctgttcctacatctcccggagccgagtacagttttgctgttaccttgttttcatgaccaattgacatgccatcatcagtgaatcacccttgaccgaattgggcagagcgctgtctttttgttcccctttgcttttttttttaaaaaaatcagtccattatgagccttgggtttgcggagattggcccaggttactgtattcagaatacaacccctgaagatgtaggtgggttttaggaaattgccattctggcatttatagttgacgatggtttgttaagctggtagcccgctggatttcctgcggccagaaatgttcacagcattttttatggccatgggatacatcattttgctaaatgtgtccagtgtcccacagaatctgggacattataagaataggaaccgattgaggctggtgctgtttgtttcaacagagagtacgggaacggtaaatgcaactagcaaacggtgataattgttgcaaaggaataaaaacgctctctgtttggttcagctttgggagcgcagcgtccaaatagttgccgctgagactgaaagtttggctactgtatttcaaaatactctttttagtccatttagagtagggatttagaatagaatgagc

SEQ ID NO: 215 - DNA, 2061 bp, Zea Mays
ctcgtctctaggccctggccgctaattgagcacacgttcgtcttcctccttccgtcccccggcgtccttatccccacacaagcgccgcttaccgccgggacaggactgttggaagtccccagacggcagcgatggcggaactatcgacatcttcggatggattggtggacgaagaagcgaggcagcaggaaccaggttcaatttggcaagggatgctcctgtagtcctgttctctttggcttttatatgctaattgcttgtgctgctaaccgttagggtttcatcgccttgcctgttcgaagggttaggggttcctactgtccaaattcacctgatccaacctcgtccgttcataccgtttcctgatacgtactacaccacatcccggagatgtgttcactttcaattttgaaggcctgtactgtactgtaccctagttactaaaccttgggtttccctcgtctctcgcttcatttaggatacgtacgacgcttaagtcattcagatcggctaacctatccggtggaatgagtactgtctgcgaatctacatcatgcctttgtgaattttccttcaactttagtagtattattaaattatacccgttttgagcccatacgcttaaaagaggggaaacagtaatattatagctttaacgaacacacgattggagtgtcaagcatggatcatatttcctctgttcctgtttatatagtaccatccgtgatgccgttatagtatttatggaagtcaaactttttttgctggactgcatacaggacaaggaagcgctgaaggtagccatggtctgcaagacacaaaggagcaggacataaaaaagggaaaggcggctcttgtttccactgaactgctgagggaggatctggttcagagtgctgttagttttctgaaacacccgaaagtagtagcctcttcagatggacagaggcgatctttccttgtaaataaaggactcaccatggatgaaatagatgaagcatttcgacgtctacaaagcccgtcatcgaattctgcgagctcaaatatgtgcacatctcaaggattactgaggtcagcacaaactacaaataatagtattggccaggcatgactggtatctatgctgcaaattttaagctactgccattttcttcaatgcagcaggaaattaaagtcgatagaaagtgtatgaatggtttagtcattttggctttttaggtatgtagattttgctgtgcacctaactctaagcctagacacatagtaaaaacaatatatctagaaaagccaaaatgacttacaatttgaaaaaggagggagtactttcatttatagagagggtggaacctgaagctggacctgtggcccctgtggtacctcgtcatccaaaatcatatatggagatcatggaaatgatacaaaggggtgagcggccagacgatatacaggatattaacgatgaccctccaaatcctgatcaaccaatctcagaacctcgtatggcaccgaaaccaaagccatgggaaaagcaaggtcaagggagtttggcctgtgatttgaaatcgctgccaagggaatccgacgtgctgaggtcagaagttcagcacgacgacggcaccaaccaggttacggagtccgccgatggcgccaaccaagcggactcattgctgcaggcaggcgtagctgctggatctgaatctcctggggttccagatgacgccgcttcttcgcttgagtaaccaccgcgaaaataaatgaatgacgccgtaatcagacgcgaaaacaaacgacctcattaccacaacactgttctgatatttttgggtcctgagagagccacttgagttcacaataaatgtagtacccatcactggatgatcttttttagttgctggaaccatatgatatgagcattgttggcacttgctctcagcagcaaggaagccaacaagggtgaacggtggtgacaacagggttacgcgcacgggggcaatagctctgttgatctagcctctcacgggcactgtgcgggggtatttataggtatctgagtgcccagcg

SEQ ID NO: 216 - DNA, 2609 bp, Zea Mays
gtgctccctcaaccctggcttcttttggttcttcgtttcatcgcgtcgcctccgccgttggtacccttctcatagctcctgtacctcgttcccacgcaggagagggtggttgtgctagctccagtgttgtagacctggacgtcagggactccagcctcaccttcttgtgcccgtcctcgagcctccacgagatactggggaagagattagagccggccctaggtgcgcatgctgctgcctagattcatcgctcggccgctccacgctcgtatcagccgccagcgccctgatcctccctctccctgactccctcctcacgttctccgcacggctagatctgcacctgttcattcctctccagtccctagcgagagattcagtctcgcttggcaaccggcgccgccgaagccgacaagggaggcacgtgcgcccagcgaacaccaagctcaaggtgggtgatcgtactggcgaaccgctgcagcggcggcaggagcttgcgtggcctgggcggaatgagccgattgaggcgtctattggctgtgcttgttggccgattctaggttacctgcagtccgcgaattctgagctcttactccatggcgccctcgtctgcggaggctgactcggcggtgtcctccagcggccgtctcctcgtgctctacgcgtcacaaactgggaacgccatggacgccgcagagcgtgtgggccgcgaggcagaacgtggcggctgcccggccgtcgacgtgctctccatggacagcttcgatcccagtcgcttgccgagcgagcggttcgtggtatttgtcgtgtccaccacggggcagggcgaccccccagattccatgaaggggttttggagatatatgcttcggaaggatttggatagacaatggcttgaggggatccatcatgcagtgtttggactcggggattcaggctaccagaagtacaattttgctgcaaagaagcttgatagaaggcttttacatcttggtgcagaaccagttctagagataggtcttggagatgaccaacacccttcaggattccaataaaataataagtagcgcaagatcaatgtcccctgccctacggttccatgctgatggagagccaccttacatgcttcaaatggtaaaaaaacagtgtttgactaaggagggtactgatagagatgttcgccactttgaattggaagatccatcttcggccatggccatcaactataaaattggtgatgctcttgaaattctaccaagtcaaaatccatcagctgttgatgccttcattgaacgctgtaacttggatccagattgttacataacgattcgagtgagaagtggggataaagttttcaagggttcagttgagcagatggaccgcatcaaattaagaacctttgttgctttgacaatggatgtcgtgtcagcttcccctcggcgatatttctttgaggtcatgagcttttttgcaacaagtgaacgtgaaaaggagaggcttcagtattttgcttcaccagaaggaagagatgatctttaccagtacaatcagaaggagagtaggactgttctagaggtgttggaggattttccttcagtgcaaatgccttttgaatggctggtgcaactaacgcctccactgaagaaaagagccttttctatctcatcatccccactggcacacccaaaccaaatccatttgaccgttagcgtcgtagcatgggttactccattcaagagaacccggcgtggactctgctctacatggttggccgggctcaatccaaataaaggcaatcttatcccgtgttggatacaccaagggtccctgcctcctccacgtccattggttcctctcgtgttgattggaccaggaacagggtgtgcaccattccgtgcatttgtggaggaaagggctgcacaggctgcagctgaaccaacagccccggttctgttcttcttcggctgtagaaaccaagaaaacgattttctatacaaggatttctggctaactcatgcgcaggatgagggggtgttgtcctcgaaaaggggcggtggtttcttcgtcgctttttcccgggatcagccgcaaaaggtctacgtgcaacataagataatggaacagagttcaagagtgtggaacttattactgtccgatgcagtgatctacattgcaggctcttcgacgaaaatgcctgccgatgttacagctgcgctagaggaggttatttgtaaagaaggtggtgtcaagcaagcggatgcttcgaaatggctcagggatctagaaagggctggtagacttaacatcgagacatggtcatagttgtgatgggcaagaaagtacatattatccatgtttgctgaatatggaaccagtgagaatttcatttcactgtaaatcaaaggcattggaaatgtggaaacatgtagatgttaaagcatccaatacggagaaatagttggaggatgatctaaagtttcctcatttagccctctgtacgaaacaccatttcatttgattaagtgagaacagtaattacatcagcttttgttgcatctgactgttagtgtgcattcaactcgtctagccctgtttcagttcagttaacg

SEQ ID NO: 217 - DNA, 2639 bp, Zea Mays
  misc_feature (583)..(589): n is a, c, g, or t
cacggcacgactcccagtggccaagtacactcacccgctcgcgcgcgtgagcgatgaaagctctcgcctcgcccgccgcctccttcctcccgggtatcccgagccctagccatctcgcgcgcgcgcttccccgatccgcggcggccgcgctctcgcggcccccttccgggcgctccatcgccgccgcggccgcggccgccacaggggaccactggggcgccgaccaccagcactaccacggaggacgcgcgggcgcgtcggaggccgggcctaccgcgtcggcgcgcggcgtcaagtgcgacgtggacgtggtgtcgtggcgggagcggcgggtgctcgcgtccgtgcctgtggccgccgacgtcgacacgctgtggcaggtcatcaccgactacgagcgcctcgctgacttcatccccaacctcgtccagagtgtgacgattccgtgtccgcatgaagggcggatatggctggagcagagaggcctgcagcgcgcgttgtactggcacattgaggcgcgcgtcgtgttggatctccaggaaatccctgactccgtatgtgctgtcgcagattgaacttccannnnnnncgtcgtgacttcaagaagagtgaaggacaaatggtccataagatctgctcctaggtcctctagtgcagttttgctgtatgaagttaatgtgataccaagatttaacttcccggctatatttcttgaaaggattataaggtcagatcttcctgtaaatcttcgtgccttggcttgtagagctgaaaagatttatctggaaaatcaaggatgtggttcaagaaaattttttgttgaggacttgaagccatcatatacttctcagcttaataacttccatagtacgacagttgagacttctaagtttaaacaagcacctcccaggtctggtgttagcagtgtgcttccttcaccttcttctgaattgattagcaaatggggtgtatatggaaacatatgcagaattgataagccttgtgtggtagatgagatccatcttcgaagatttgatggcatgttggaacatgagggggctcataggtgtgtttttgctagtatcactgtgaaagcaccggttcgagaggtatggaatgttctcacagcatatgagaatttgcctgaattcgtaccaaacctggctatcagtaggattgttcttcgtgataataacaaggttcggataatgcaggagggttgcaaaggcctgctttatatggtccttcacgcccgtgttgttatggatcttcgcgaaaaacatgagcaagagatcagctttgaacaagtcgagggtgatttttacacatttaaagggaaatggcgcttagaacaacttggggatcagcacaccctgttgaagtacatggttgaaactaagatgcatagggacacctttctctctgaatctatccttgaagaggtcatatatgaagatcttccatcaaacttgtgtgcaatccgtgattatattgaaaaggctggagccaagagtagcaattccacagatccagatccagatgttgatcatgatgaaagcaggcaatctgagcaaacgtgtgtgtcttgctcatccagtaccatgaagcagagaccaaaagtcccaggattgcaaaaggacatcgaggtcctaaaatcagagcttgataatttcattgcagagtatggtcagtatggtttcatgcctaagagaaagcatctccggtctcatggaagagtggatattgagaaggctataacaagaatgggtgggttccggaagattgccagcataatgaacctttctctttcttacaaaaatcgaaaaccaagaggctattgggataatctggagaacttgcaagaagagatcagccggttccagaaaatttgggggttggatccttcttatatgcccagtagaaaatcttttgagagggcaggtcgttatgacattgctcgggcattggaaaaatggggtggggtgcaggaggtttcacgccttctttctcttgaactaagatatcctagaagacaagcagacccggacgatgagagacagtctgaatccccgtctgggatgatgaagaagcacggagtgaaacctgatgaaggcaatgtttccccaaatgcgcagaaatggctcctgaagctgaaggacttggatgtcaattgggtggaatactaggtttagctttggaaaaagatatggtctctcatcatgaactcagctctttcctttcttcggaggtgttctggatgcattccgacaaagacgccgcagattgtgtacagaacagcgcggtgcacgggccaaccccattctgaaggcgagctaccagcaggcaacatgttttcttgccagtaatcacgactcttggctactactgcgtatctagaactgctgacaatactactcagcttcttttgcggtcaaaccgatccatggttttgacaaagtcaggccataaaatgcagaaaagggtgtcgatttcgtgcgcctgttcaaagctgttttgagtcagccacgcctttgaaaaatctgaggtgttcacaggttggtcgcctactttgttattactggtgatataagttgacctggtccttttgaaagagaaggtttacccgtctaaaaaaaaca

SEQ ID NO: 218 - DNA, 1189 bp, Zea Mays
ttctgggatagatttggcaggatcaaggtcgttgtcgtctccaggtccatcaaatgcgacaaggtcgagcgcacgcaattcagctccgaagtcatctcctttcaacagatccatttagtacctttttctgagttaaactacttcaaacattgctgaagactacaaccagttgttgtaattgaagcgggtcaagacatagcatttgcaaagatttagttcattctcatcactctgcaatattcgggttctctactatgtgtaatctcatatcaagattaatgagtatcgtgatcgtataattttgaatcctatcaacccatatggcaaggcaaagaaaaatgacagtggacatcattctagattttacaaaatcaaaggagcaaccagacatggctgtcatgatctaagatacttcaacgtgattggatcgaacccaaacatatgactaggagaagctccaaggccactttgtcaagggtctctgcaatgcacctactggtgcatgatttactggaggttgtgcgcatgaatgtgccacacattggtatgggggttggagttgaagcaggtgattttcaccaacattggtttgcgaactggagttgaagcaggagacatgattgttattcctatcatgtgcacactgcctcctcgctgtcatttgtcgtcactctcgtagtcctgataccggagcatggttgccaggggagagcagtccaaggcaaatttgccatgttggagcagtcacaggagccaaggggctgcagtcacaggtcctgctagccaggatggagcaatcataggacctcctagcagtccaaggaaaatttgcgaggtggagtagttgcaacttttgaaacccacgtgataacatgctcaagcgttcgtatgataaaaaagatggcacataatcaaaagaagatctcatgttctgcgtttgtgaacctgtttgtattttttgaacttgttttgtgaacctctatttgtaaacctgtaaaatctgaggttgtgaatagatttgggtaacttcatacaagtggtggaggcctggtggtaatcctggatgcatataaagcgaggcatgcaatatccatagcactcgtttgacagaaggcaacaccatcaaccttgtcctccacctttaaactagcatgagcaccatccttcttcacatttatattcatgtccc

SEQ ID NO: 219 - DNA, 2103 bp, Zea Mays
ttccgccggtcgaccgatcccccccacccccaccggataccaccgcctccaccaaccgattccgttccatcccccctcccccctcgctcgagcgcgaggcttctctcccctcccctcccttctcctccccccccggcgcggattcctacagccagctccctcgccgatcgcggtcccgtcccgagggagaggtgatgataaaggatatttgctgaccaaacttgcagtagttcttctttaaggaaatagaacttggcgtcatgacacatagaaatatgctctggacacatcagtctgttaatcctgaatgggagcaaagacatgcccaagttcaaccaggaagttcctattatgcaggcactgcaagtgattcatccaacctgggtgtgcaagttgctgtgggagttccaggaaatactgctaatgttggtatatgtgatttgcggaatcatgagtgcccgcatgttcataattcatacccacatgccggtgttacatcaagatttgtcttcccaactactatgtacaaccctagcatgtcagcagcagctgtcaacatatatattcctcagactcaaagctttggactaggcagtgtgctaccaccatctttacataatcaagttcccacaggaactattgatgagagtagcagcagtgtcaattttggtgatagtgctattggattcatgaaaaggaaaaatgcagtagttgctggaagccatcattttcttcatggatttgctgggtcaagttcatctgttcatgtgcctcagaatcctgtgcatgggccatggaatccttcatctcaatcaaattgtttacccagttctgcagcttcaaacctaccagaataccacaatagtaatgggtggccatacttagaagaatcttctgcagatgcttcaaacagtttcagttctgtggctgcttgccaggagctggcacctcatggtaactatttatatccagcttgtcacataagccagtccaatacatgggttccacagcctgcaggttatggagtaccacagtggggatatagtaatgcagtggtcaatcctccagacatgtcaaatgggccactgcctcatttctgccagaatagtatgcaggcacctcaaatacaagtgtcccatcaacagttcatcggtaacaatgcggtgcatggtttaaatccttctgccacaggccttcctttacatccaagaatgctggctctcccattcaatgctgagcacacttttgggcatccaatgcacccacctctgataaaccaagttaacaatggggctttaagaattctgccataccagaatgctacagtgatggaccattcaaggatttatgaagcaggacatgttatcgatgaacatagcgatatgcgtttagatgtggataacatgacttatgaggaacttgtagcattgcaagagcagataggcgatgtcaatactggtttgacagaaagctatatccaggaaaacttgaggtccagttttcatgttccaggagcagctagcatgtctgatcagttttctgagctttctttggagaatgatgcttgcataatatgccaggaggagtataaagctaaagaacttataggaacccttgaatgcggtcacaagtaccatgtgaattgcataaagcaatggttgatgatgaaaaacctgtgccccatatgcaagacgacagctttgtcatcagatagaaggaacggatgaccgtcgccaataatgttgttggttgtttaccgcgtggcaaattagcgtggattttgtatatagacatggttgcctttatttgcccgtcccctttgctgtggacataaactgagcttcgaaacactgtacagatattttgtaggatgttttagacgttaaatggcacaatggtgtgtaaagctcccatgactgccttggtagatgccctcttcctttacattgtacattgtatttatctttactcttcaaaaaaagaagcttgaaaaccgtaagttctgtacattctggaattgaaagaaccggaaattttcttcacctgtagagctttttgctagagctttatgagattcagtggtgaatcttgaagtcgtgaaat

SEQ ID NO: 220 - DNA, 3042 bp, Zea Mays
aaaaattgcctacacgtgagatgtgtccctttggatgtggttaaaattgttctgtgggcatggtaacatgacagattgcttctgtgtgatcgtccttgttgaagtggtgatgtggcttgggtgcccttactgtgacaaagcttgttgtcttcatatgttcttgtgcagttgtacatcacatttcgatcaaacattttgtgtgtgtgctccacatgattccaaagcttgtattgcaattgtggtctgttgatggggtggaacgagtcttggttctggaaggatggttaattcggtggtccactggctcaagcgcttgaagggacccacaatcttgcaatggaagcacttcagccaaacatccaggctgggatccatactcgtaacctcccagtaaaacagcttggagggatgatctttggttgcaagcctgatacaattgaagaatgcttcaaaaaacagctctttggtctgcctgcagtccattattcatatgtgaagaatgtaaaacctggtatgcctttgtttctattcaattatattgacagaagactccatggtatttttgaggctgcaagtcttggtcagatgtctattgatccatatgcttggagtaatgaggacttattaaagacaccttttcctgctcaggttcgtatttgcataaggactcggtatccaccaatgttagagagcagatacaaaacagtgcttggtgctaactattatgatcgtcatctattctactttgagctggaccatacacagacagaagctttaatttctttgttcaagttgctgccccttgttaataatcaagttccagctgctccaagagaaaggagtattgctgtgtctttaccaccaactaaaaggaaggcaccagttcttcctgacccaaagaaagtcaaagaaaattcaaaggatatcaatccatttagtgttttatcaaatgcaagtgatggtgctcaagaaaactgggttgattttgattctgacgtggaaaatgctagcatcaatgaaaattcacacagtgacactgatgagaaggaatttgaggagccagtttctgattgggaagatttggatgacaatgctcttcaataccaattcagtccttattcaaattcagatgaggtcagtcaaaactcctcatacaaaacagtttgccaagaagtggagcttgctgaatgcattcctccagttgtcaatcctgcgagtgaagaaaaactcaccatgcttgtacataatgagcataaagctgctgtgtgtattggcaaaatagagagtgaagttaacagtatcatggatggtgttgggctacagcctgaaagacacactatcctgaaaaagctgaaagagttattttccatgcgacagcaaggggtttcttcgcaggattgtgttgagtcaagcccagatcaatgtgtacctgaagaaaccctttcctgtgacccattagatgtcactgtggaagacaaaacctcttttcaggaacaccttggagaatttgatgagcttcgacaaatcattgctgatttatccaagagggctgaagcattggagaagaagcagaaaggatcagatcaagatctactttttttgagggaagttgttaaagattcaggaagaaaagtacagcaactggaatatcttgtagatgagttacaattccgatttgactcttcattgtctcttcctggaagcatgcacaatactttagccaagccatcgatatttctgatcggtggctacaatggtgtgacctggttatcatctcttgattctttttctcctgagaaagacacaatggtgggtctcacaccaatgagttttgcccgctcatatgcatctgctgctgcattggatggtcacatatttgcttttggtggtggaggtggcaagtcatcatggtataacacagtggaatgctatagttcgaggaataacgagtggatagaatgcccctcgttgaaccgcaagaaaggaagtctcgctggtatcagtcttaatagcaaaatatatgctattggtgggggagatggaaatgaaactttttcagaagttgagatgtttgatccataccttgggaaatggttatgtggtccatctatgctgattcctcgatttgctcttgccgtggctgaattgaatggaacaatctacgccactggtgggtatgatggaagcatgtacttacaatcagcagaacggtatgaccaaagggagggtgtctgggtccgtcttcgaagcatgaacacaaagaggggatgtcatgcccttactgtccttggagaaagcctatatgcaatgggcggatacaatggagacaagatggtttctagcgttgagatcttcgaccctcggctcaacgcctggaggatgggagatcccatgagcgccccaagagggtacgccgctgcagttactctggatggaagcgcgtacttaatcggtggcctggagtccaatgtgcagatcctagctaccgttgaagtttacaacgcgagctccggctggtcagttctcggtttgagttcactcgggaagaggtcctttgcatctgccgtagtcatgtagttactgatcacgatgttaactactgtcgataacatcaggtttaacatagtcgctgcgttatgcaaggagtagttagggtaaggtgggtggggctagatcacccttccgatgtgtaatgtgttgagatcttcatcaggggaaattcgcatggtatgggagactacggcccgtatacctttgaaccctcgtaggaagtcttgagaacccttgcatgcattcgctgttgtatgcgtgccatgctgttgaatttagctgtactacaccagatagtgatacccgaactcacggagtttaatggaaccggatagaaagctgcccatgtagtttggtgtttgttgcttacgttgtggattttactgtagtgacttgtctaatgctccgtttctccgtttggttatcgaccatattggagggcatggaattaaaataagttcaataccaaatcaaatatagtattgaaatagt

SEQ ID NO: 221 - DNA, 1533 bp, Zea Mays
aaggtaagaatgacgttttccgcagaaaacaatttggtccactcgtaggctttctttccttgaatgactcatgtgtgtcaaagacaaggccacgcaaactagcaaccggtgccacgcaaactgccaactgccatcttcttccccagccgctgtgcccgtccccctgccaccaaggtccaaggtctccggagcgcgacctggctgcaacgcaggcaatggagtcgccgttccgcgcggacctgctgagggggaaggcggcgctggtcacgggcgggggctccggcatcggcttcgagatcgccgcgcagctcgcgcgccacggcgcgcacgtcgcactcatgggccgccgccgcgaggtcctcgacaaggccgtcgccgcgctccggtccgagggcctcagggctgttggttttgacggggatgtccgaaagcaagaggatgctgccagagtgatcgcagcaacggttgagcattttggcaaactggacattcttgtcaatggtgctgccggcaacttccttgcctccccggaggatttgaagcccaagggattccggactgttcttgacattgacactgtgggtacatacacaatgtgttatgaagccctcaagtatctcaaaaagggtggaccagggagaggtccttcctctggtggcctcatcattaacataagcgcaacgctgcaatacactgccgcttggtaccaaattcatgtctctgctgccaaggctggcgttgacggtatcacaagatcattggctctggaatggggaacagattacgacattagagtaaatggaattgcacctggaccaattcaagacactccaggaatgaggaaacttgcacctgaagaaatgggcaataaggggaaacgagaaacgatgccattatttaagcttggggagaaatgggacatagcaatggccgcactctatctagcttctgatgcaggaaaatatgtaaatggggctataattattgttgacggaggtctttggttgagtcgccctcgccatattcccaaggaggaagtgaaggcactctctaaagttgtcgagaagaaggttagggcatctggtgttggggtgccatccagcaaattgtgatgacatctttgactacgtagctcttcgatgtgttctgtacaacatatgtctatattgttgtcccactaatgttgtcagtttggctatgccaccagtccatgcagatgacttgttaggcggctgagcagtccatttagttgaagaaattcaaatatttattactgttgtcgtccaatttgtattagaaatagttgagatcggtatgggatcccaaccaagaggtgcgtattgccaaatatttacatgctgtctattcaggttgtcgattaaaagggtcatattaaagatttaacagtttgcgtctccccactgttgcaactctatgcaaatggttcacctcaacatgtgtgcaaatcatgacaaattggatgccggcagttgcaactagcctgaagttcagagaaataagagaaactgcatg

SEQ ID NO: 222 - DNA, 1717 bp, Zea Mays
agcgtcctctagcttcttgcccagcccgggtagtacaatacaacccccgtcccatcagctggcagaggccaggccatcagcacccacacccacacccactccctccgttcctcctccatcctcctgcccccaagtacggccgccgccgccgctcaccggatccaagaagaacagccgaggggttcggtctccctcccagcagtgacgagctagctgctccgtgcgttgattgcgtgtttgttattacgtgtacgtcgtgtaccggccgtgtttagctgcagaaaatatagtcgattgggcttaggccccgaagagattgacagaagagagcgagcacctggcgcggcgaccggcatggaacgcatgccgtccccgccgcgtgctcgcttctctttctgtcagcctctccctcgtcctgagccgacgccgatcgagcgtcgtgtgtgtgtagctagctataccttgctctgggcagcatcagtcgctgcctgcctagtggctgctggcgctagtggggcggcagacgctgagacgccaccaccgatactggaaggcaaggagccaaggagggagggggaagggaagggggagagagaggaattggcacgggcgggtgcggtggaaactgtgccacgcagccgcgcgcgcgcagagatgggcaaggacgacacgcatgctgcgaggggacgacggcttttgcaggcaccaagggcatgtcacctcattatcttctagagatacgcacagatttctcgcattttttttgctcgttcctttcggtcaggttgtcggggggttactaccgaggaagaggatgaggctgggaggggggcatggagacttggagaggagcagccaagaagagtagtagtagtactttccttccacttccacgcctctcagtacactgagaaaaccacttcggagcgcgagttcgtggttggttttgcggtacactgaaaaatgattgctagttttattcgccgtttatttatttatctatatttttgctcgcatgctcgcaagatttccttctcttccgctccactcccgggtctctcttgctgcctcagctcacctcgcctcaccttggtgggatgctggcagtacactgcggcactgtaaggatttaacagaacgaagactagtgctgcatcatctctcgctctcgctctcgctctctttctctttcctttctccctccctcgtggtgcaggttcagctcatctttgaacactgtagccattattccagctagctcgcgctgtttctgctcttgcttgctcgggggttctcttctcgctctctcgagttcttgctcggttcctcctgcggccatggcggtccgggtggttgcgcgcgccggcgctagcaagctcctgtttgcacaaaaatggagcgtggggggcaccatgtgatgacccaaatttggcaaagaccgtggactcgccttgccctttgccagatctggtctgcatctgagatgtacgtacgcaggtaggggtggagagaagaggacgacgctgctgctcgttatactgatggaaagtgctgctgcatatggatatgagggagcatcatgaactaatggggaacgtcatttgcagattttacttgaccaagcatctgtcgttgactgcacataatggattgcctactttcaagtactgacatctgatctggggctacctgtttccttaaagtgaggtgtgtgaga

SEQ ID NO: 223 - DNA, 1138 bp, Zea Mays
agaactatgaattacagaattaagggcagtttggttcgtggctaactatgccacactttgtctaaggttagtcgttcgaattgaataactaatcttagacagaaaagtcaggcaaagtgtggcaagtgaggctgcgatccaagcccttagtctatagaaactgacgcgcttcgtgcgattccgctcttgttcgcggaaatcggcatcctcccggctaccccgggccgggaatcgaaaaggctgccgtgttctccacttctccgccttaccctgctctcctggacctccgacgcaccccaaacaccgcagagatgcagaaccctagcggccaccaccccgcgacggccgccccgacgtcggcgccgtccaagggcaagtcgtcggcgccgaaccctagcggcaaccacgctgcgacgccggcgccatcggggacgccttccaagggcaagtcggcggcagcgcaggccgcggctttgggccacggttcctcctcccaccaccactctgccggcggtggcggtggtggcgctgacgcgtccgccaccaccctcaagcgcaagcgcggcgtcttccagaaagacctgcaacacatgatgtatggctttggggatgatccaaatccacttccagaaaccgttgcacttgtggaagacattgttgtggaatatgtcactgacctggtgcacaaggcgcagaacgttgcctcaaagagggggaagctcctgacagaggattttctttatcttatacgcaaggatttacggaaactgcaccgtgctactgaactactgtccatgaatgaagagctcaagcaagcaaggaaagcttttgacgtggatgaagagacgctggctacgactaacatatgatgtcttcctagtcggagaatctgcgtgttactgtaaccagttgtacaatgcactgcatgtgtctgacaattgttggcgtcgacttgtaactgttccgctacagactttagctattttcttgacagttactgcgttaatggctgtatgccctgctgagtgaagaagtcagctggttccacacattcgcaatgtaaaaatgcacagttttttttttgcttgctttggcggaggagatatttggaagtaaaattgccagacaatttacagat

SEQ ID NO: 224 - DNA, 1462 bp, Zea Mays
gggataaccagataaaccgttgaagagagtctgagcgggtctcgccaaactgcgccccctctttcaattccttatccgcacagtcacacggtttaatcgaatggcttcgccgtcgtgtttcctcttccgcccccgtccgccgctgtgcagccgccgccgccgcagcagcagcaggtccctctacctcctctccaagcagagcctgcaccgacttccctcaccaagaacatgccgccgtccagtggcagagcagctcgtcctgcggtcgctgccgcccggtaacggcaggcggatgggggcgacgggcttcgcctgctactgttcctacgacaccgagaacggactgcccacgccttcaccggacaagggaaaaagctcggatgagtggccaatccttcgccggtgggatgttccatgggagtggccaacgatttctctcaccatggtggcatgtgcagtaagctttcttttgacagggatagctgagcaatctattttggagcaactaggttttcgagctggggagacaactctagatgagaaagcagagatactcttcttgggacaacttagcacgacggtagttgtacttggagttatatttggcatgaccaatacctttcgaccattctcagatgatatatttcgctatgaattcaatgaaccacttaagctgcaaaacggatggcttctgtggtctgcaatcggcctgtttgttgcaatagttgctattgctttagcaggtgctgcaatgacatttctgaatggtgaaacaccacagagagagacagactcgctggtccttttgttgccgctgattggctcgtcaaacatcagcactgcctgtttgctgggcatcactgggattttggcacccattctggaggaaactgtgtttcgaggatttcttatggtatccctgactatgtggtttcctactccatatgctgtgcttatgactgctgcagtgtttgcctttgctcactttacaccaggagaatttcctcagcttttcgtgcttggtgtggtcttaggattttcatatgctcaaactcgcaaccttctaactcctattgcaatacacgctgtctggaactctggagtaatattgttgctaacttttcttcagatgcaagggtatgatatcagggagattttgcaggcatcttgaagatttaacgcagttagattaatttcatcctgtgttttcttgtgtcagagtatgttattatcaaacacagtaaatacgcaatgatagaaatacattctttagaaaaccctttgccaaggtgtatttagaattgatgcataacatctaagtaaaaaacttagattttccttgaagtgctttaatatattactgtgctgtgtgaagttgaaatttagagctttagaagaaatcgtgctatgtataatcatttacttcaagacaatcaaataacagaagccagttctgtgataa

SEQ ID NO: 225 - DNA, 2444 bp, Zea Mays
gtcagttacagatctgacgctaccttccgttcgattcccttcgcgtctttcttcctctgctggactcaagtactgcaaattagagcagaaaatcctgtgtctagatcaagatgagcccatgtctacttcgatcagtttagcctagtcagtgtagaactgtttggcttccgagttcagatatttagctagcatagccaagtgaattttgttcctccagtgggtcatcaaggtgtgcatgtgtcctgggagagagagaagaaaatccagtctgcaggatggatgcaatggcacctgaagaatatgcctcgcaatccaagctactgcaagaattcaccaacgtcccaagcatcgacagtgcttccatcctcaaaaccaacgatgaggacagatccagagcgatgttctccattagccagccagacttactggcgaacaccaacaggaaatacgttttgtattctcatattacgacgagagccggcaccggcaccacctctccggatttccagtggtctcctttccccactgaaacaaccggagtgtccgccaccgttccgtccccttccgggtcgaagctcctcgtagtgcgaaacggggagagaggatgccccaccaagctcgaaatcgtttgtcagtcacatgtggagaaggagatacacgtagcaggttctgtgcacggtcctctctacacggatgaatggtttcatggtgtttcttggaatcaagaagagaccttggtagcatacgtcgctgaagctccagccacaccaagaccagctttcaatcgttccggatacacgagggaagaaggttgttccgagggagactgcagtgcctggaaagggcagggcgtgtgggaggaggactggggtgaaacgtactccaagaaaggaagaccctcactgtttgttcttgacattcccagaggagaagtggtagcggctaaaggtgtcccaacatcgttgagcgttgggcaggttgtttgggctccggaatcaccaggtggcaggcacaagtatctggttttcgttggatggtcagagcgcaacgggttcttccagaacactgctagaaaactcggcatcaagtactgctccaacaggccatgtgctctctatgcagccccttgccctatccaaggaccagagccgcctggcaatccaccggctacgaccagtgatggtaaatcaggctccggcggtgcggtggcgcgcaacctaaccccaggcttcagcagtgcattgtttccacggttcagccgggatggaaggcttctggtcttcctgtcttcaaaacaagccgtggacagcggtgcacacaacgcaacggattccctgcatgtgatcaactggccttcggactggaaaatggatgaacaactcgatgttactcaagtggtacctgttgtaatgtgccctgaagacgacgacggcggctgttttccaggcctctactgttcatccgtgctacccgatccttggctctccgacggacgtacagtgatattgacatcttcctggagaagtgccgaagtgatactatcggttgatgtgttaagtggcaaagtggcaagaataactccggaagactcgtgctactcgtggcgtgctcttgcgttagatggcaccaatgttcttgctgtgtcaagtagtcccatcgaccctccttccatcagctatggacgacgtctcgccgtgacaccagctgagggtgaagcacgtagatggacctgggatgaagttactagtccattcatggcatccaacagcaaggttaagtccttgttgctgcatcacagcgtcagcatacttaaaatccctgtccctagcccatctgctgacctctctgacggtggcaagcttccactcgaggccatattcgtgtcctgcagctgcaagggtagctcgcgcagtccaactgttgtggtccttcacggcggcccacactcggtgtccgtatcaagctactcaaaatcctcggcgttccttgcttcgcttggattcaacctgcttgttgtaaactaccgaggcacgccaggttatggagaggaagccttgcagtcgctccctggaaaagttggatcccaggatgttgaggactgccttgcagcgctagacttcgccgtcgaggaagagctggctccggacaggttcgccgtggcagctgctcggaaccctgtctgcaacctgtcgctgatggccggcaccaccgacatcccggactggtgttacgtagtggcctgcggaacccaagcgaagcgatacgcctctgaagcgccttcgcccggccatcttcgtctcttctaccagagatcgccgatcgcccatgtctctaaagtcaaagcgccccttcttatgcttcttggcggagctgaccttcgagtgcctgcttctaatggcctacaggagatgatgtccaaaccttatcctaagcgaagcctaaca

SEQ ID NO: 226 - DNA, 887 bp, Zea Mays
  misc_feature (886)..(887): n is a, c, g, or t
gcaggcagcaagccgaccgcgcctgcaacgaccgcgactcagctcggcgcccaggcggaccgacgccggccacccggccaggcccgcggagccgcagccacgcgcgcccagcaagtcgagcttatctgaatttgatgatcttgtgggccaccctggattcgacaagcaagggacacgcttcaagcggctcatcaaagaccagaataatcataaggacctcgaggagggaattaaccgtctagttctttgctctggaaaggtgtactacgaactggatgaagaaagaaggaagacggagcgcactgatgttgctatatgtagagttgagcagctctgcccattcccctatgacctcatccagtgtgagttgaagagatatccaagtatgtgtttagaaaaaagtggttgctcgtttttactctgctgcatgatctctaatctgtcaagtgtatagtagaaaatgttttgctagctggaaggttagttgacatacaatctaatggatgagtcctagtaatcaacaaacaagctgatactatgtaaaccaggagaattttttattccatcctgtaatcactttattatttctaatcctcagggacactgaaaggcggacgtgcggattggcttatagagaaatgtattgaacttggagcttctagtgttacccctgtcctgacagaacaatgtcacacaatagcggaaaatcgggtggacaggctgtaatgccttgtgctggatgcagttaagcaatgtatggagtttgggtatcacctccgttcttggcctgttaaacaatgtacggagtttggggttaaatgattttgtaaagtgtttgcaaatttgttcaaaacatgataatgtgtaggttttgtgaatgattttnn

SEQ ID NO: 227 - DNA, 1171 bp, Zea Mays
aaccctctgttcttttcaaaacaaaaaaccaaaacccttctgtggaaaaacgtaaaaccaggcgcgccccgcaggaattgcggtcaggagaacctcatccctctcgccttcaggttctactcgccctctccccacccgcagcgcctcctcccattcccccaacggacattgcctaggaggctaggacagaaccacccagagcgcacaaccttacccgaatcgccgttgcatggaggccgtgcgcgcgtcggcggcgtgggtcgccagtcgctcctcccatgtcacggtcgaccttcaagaaattgagaaggtagtggaccaaatccaaggagatgttccaaaagttgagtgggattacgaaggaattcactactttgacaatgggccactcacagtccagtacctgttcgtcttggatgcactaaacttctgcttctggccagataaggacttgagctatgaccatttggcttctggactgaagtcagccttggagaaagacaaaaatgcccttgattcagatcgtctccagaattacactgggccccagctccgccaacttctgaactggccacgaccactgccaattgaggaggaaagagtacgccttctccacgaggaacttaaaagaagctttggaggtcaggctgctaatctagtgaagtctgctggaaactctgctgcgactcttattgaactgattactcgacattttcctggtttccgggaccattcactctacaaggggcaccaggttttcctgtacaagagagcccagatctttgttgctgatttgtggggcgccttcaagggacaaaactatggcgagttccacgatatcaattccatcaccatatttgctgactacattgttccagcggtcctgagggagcttggagtacttaaatatggctcgaatctatcttgctccatcgactcgaacagtgagatagtgcctggaagcgaggaggaagtggagatacgcgcgtgctccatctatgcagtggagaagatgagggacctgatcagtaagaagtttggaaagcagaagctcaacgccacgtgtcatagcatcgagctaatacgtcacggcgtatagccttacaagttcatcgaattggtaaagtgtgaggtgccagtatagccacaaggaaggccaatcgaagcaaag

SEQ ID NO: 228 - DNA, 1114 bp, Zea Mays
ccggtctactataaacaacaacgcctcgtgtcgtgccgatcgaactgagattgtgtattacacgagtatgaacagacgggggctcttgggtgggtctgggcagggcatctccggactcccacacagctcctcttggtggcgccctctgacatctcctttttcctcgccttcgatcggtggccgccgccctcctcgacttccgtcccgccgccatgaagggacccggcctcttctccgacatcggcaagaaggaaggatctactcacctacgactagaagctgtccatctccaccgccagcgcctctggagtggcgcccagacccggcaatccgttagaatccgttcgtcgcagaggccatgagctcggcgcaggatccgttctacatcgtccgggaggagatccaggagtcgattgataaattgcaaagtaccttccaccgctgggagcaaactgcttcaaacacaggagaatatgttcatctgacaaaggagcttctgatcagctgtgaaagtatcgagtggcagcaccctcactcttttctattatactttaccactttacaaatagacccttcaacttgttcataatacaccaacactccccctcaagatgggccaaatatatttaacattctcatcttgttacatgccaactcattatccttaggacctaaaccttttgtgagactatccgctacttgattacgagattttacatacttcaacttcaaagccccactatcaatcttctctttgatgaagaacttatcaatctccacatgcttcatgcgatcaaactgaactggattacttgctatgttgattgctgccacattgtcacaatggagcaacattgtctcattcttcaacacttgaagctccttcaagagactcttcaaccatatcatttcacaaactgctagagccattgctctatgttcagcctctgcagtggatcgagataccacagcttgcttcttgcttctccatgaaaccagattacctcccacaaatacacaatatccagaagtggatctccgatcatccctactgctcgcccagtccgcatcacaatacccatccaaattcatatgttgatttggtctaaaacac

SEQ ID NO: 229 - DNA, 2110 bp, Zea Mays
atgacggggacgaacggtggcatggccaaggagggcggggacaacgacagcgctaggctctgcggctggactggaggtgtcattgttgccatcctgaaccgtgttgccatcctttcggtatgcggcagcacaaaaatctaaagagaccacgccttgaccatgtcctcaattccgtccatcttctcctctgtcttccccttttccttctaacgacaccaggagagaaatttcctcctgtgcgcgtgaaacaattttcctcctcgccacgagatcatctccaactcaatggaagacctaaaagttacggcttcatagtcccatcccaccacgaggggcacggtggtcggtgggttgagggttctcagctggctggagactggagcatatgttttctttcaagtccaggtagcagagtcagggtttcatgggggaatcagacgtgaaggaacagcagccgaacaggctgcaggaggagctgaggaaggagaaagagaaggcacgcgccctagacgagatacaagacctgcaaggcgaactggaggcagcaagagattcagagaagaagatgctgctgtcattgcaggctcaaacaaagcagcttgagcagaccaaagtatccctggaagaggccaagattgagatagcttcgctacgagacagtaggcagccgttcaagaatttcaggagaaggggtttgatgtcattctcctttgccgaccctggcgaggcggagacatggtcgctacagcgtgagctcaggttagctgtggaatccgaggagaagtgcaacaaggccatggatgacttggccattgccttgactgaacaaaccacagaggccagagaagcaaatgtgaagctttcattggcgcaagccgagttgaataatgcaaggacccaagtggagaccttgaaggcctcgctagaaagcacagagggcaagctccagttggcactggaagaggcagaccggctaaaagtcgagtcagatgaattggcagctgcctcaaaagaaaaagagagagggctcgttgattgcatcaagatgtttgaggaggacctaagtaaaggaaaggaagagaacgataagctgattgaatcacagagggtgaccagagatgagaattctcggctgagagagatgctgaagcatgcggtgggcgaagctaatgtagcaagagaatcgctggagattgccagagtggagaattctcgccttaacgaagagatgtttaagaaagagagtaccttgcagagtatcaaccaagaatatgaatccctcaagatcagcgaggcagccgcacagagtagcattaaagaattgaaggatatgattgatgctatgttcagttctgagtcgaccaaaacgtcagcagaagcatcacctcgtgaggccaagggaagcaagatgaaggaaacttctgtggcagcagattatgtgtattctgatgtcgaaagatctactcgtctggacgacataaaaaaccctggaaagcagaaaaagaagacaattctcagaaaatttggtgaaataatgaagaaaagaaactcctaaattgtaatctagtattacgaaagcagtatatcttccattttgtttgttcagatcccttgagcacacaggacagctagaatgccaagatttacaatgatgaaaagatgtgtggggtaacattttttttctttttttacttcatgccatggatttagactacaaagaatggagcatactgtacatacatgtcaaaatacagagaatgaaataagaaagtgtcatagcctttttttatggttttataagtttctgcattttagaatctctataaatccttggcctgctatatgcaactaagtagcccatgttcccagagtacagtatgcccaaattaccccatcgttctgggaaatatgttgataatgaggatatttaacttgtgtcaaggttctgcaaagagcatatttacaagttaattatgtgtgatttatggagcactggaatccgccaccaactggataggcctaagtaaaactgcataaaagtatttcattacgaggtttaaggaaaactaaaatgtctgtggaggacacactgtctgaagtaccatatcac

SEQ ID NO: 230 - DNA, 3166 bp, Zea Mays
ccgagaccccgacccaccccgcctcccccgccgccgcgctcgcgctcccccgcgacagccgccatacgccctatctccgccgtgcctgcgcctcctcccccgcccgcccgagacccgccaagtttcccttccttgcacggcgagatccaccatcggcgcccccttccctggcgagccacagccgtccatgttcctggccaccggcgacctcccttctctagcccttggcggcgagccaacacctcctcccatggctgccccccagaccccagtcccgtccgcgcatccgctcttccgtcagcgacgcacctattctcccctctctccccgacgtcgcccatggcgtggacggcgacctccctcaccctgcaactctgcacgtgtaagggccgtgttgcccgcctcctttccccacaccggcgcagccccctgtcgccgcggccccttccccaaacagcacggcaccacatgctccccctgccgcgcccgcactctccttccccaaataacacggccccacatcgctggttgcctcgcctcgccggggacccagcacgatggtcagggagctggtgggtgggggagacagggaggagcggaggaggaggtcaagctcaacatggacattgtgttcgtgacgctgccttccccaccgacaccaacgactcactccagaacccggatctggggcccttcctcctcaagccatggtattgggcgagggtggcgccgcctcgcgtgcttgagttcgccgagcgcgccgccagggtgctcgagcgaagaggtgagggcaccgagctcgagctcgccatgaatctccacatcgctgctggcatccactgcggactcagccaccaagccctgacattgtagccagtttcttgcaatcagaacgaatgccagttggtaaccatttaacatttcttttgctgtgtcaacttattggagttggagagaggctatcactatactgacctttatatcatcagaattgacataaatgtgatttacacgtagatacaagtttgtggcagagatttctctgacacgccaatcagtcttcgatgcgaatgcttgttgctcatatggacttgtggttgtgataatgagttcatctccgtgcacatttgtcgtccttgtggttacagcagttaactgagtagtctctcttgactgcaaaacaagcaatctgttgcctctgctgtgatggtggagcaatttcagcgccaagaatgatatctcgcattttagattgtgtcagtgcagaagtattaacattgtttttctttgcataatcagaaaggatgaggtcccttagtgcacactcaaccttcaaccactgttcatcattcagagatggccatatatgatgtgtttcagtaataattgttttgtcaggtttgagcaacatctttgccttctcattattcacatgaagtgcacgtagaataagcacaatgtgggagaatgttgtgtatgatgatatacttttcaaccaatcatcatatatattataaagaaccatctgtggttcagttgccttcagtataagatcaccaaacttctcaatcttcaagcaagcctggaaaggaagctgcagctcactgcccttaataacaatgttagggaagtcaggtagatggacctccaagggatccaacatgcccttccttgtcacaacaatttgctttggctgctcttctacaggaagagatcgaaccaatgcagcaacctcctcagcggttttccacttggccagctgcccaagacgcttttgccccgcccatacacttgtgtggataacctgcacattattatccatactcagtttaaacctacctatgttcagggttttacagaaaaacaaaatcacatgaaaactagagcagaaattcgaaaagaacaaaccttaagaaaaagttgacccgttcttggattgaaaaatgaaaatagcaccattaattggtttggtggtcaagttaccctaaaatgttttgtgaatagtgactcgatacacatttgtatcatccacgaaccatatgatttgattgctgaatatctctccatagttctgtgaagacaggtatggttcatatattcaaatatccaaacctcatttggagttgtgataccagcaacctttgacatcgattcaagatgctactggagtgttattcatgtgagtgtaatttagtacatgatccaactggtaacaaactttatgatactagcatatcacataatagatgagattactagaaacagctcatgttattgaatatagaaatttcagttctattgtttttacacaaatttgtttgtgatgcttcaaaccgctaatgattttttttaaaaaagttgtgcaatgagcatatcacataatatatgagaatcttaggaataaaccaagttgctaatgagtaaaattttggctttgctttttaaaaaatatgggttcaagttgttcctgacagatgccactgcacaaatggacgttgacacgttgtagtgatcacactgtcacgagagctgagcaaactacagcctgcaagagctacacgtggtagcctatactcctgccttgctataattttcttaattttcttttgttaatgagtgcagtttctctggctaatggtaaaaataatttgttctacaggcatgcttgaccacatcatggtggagaatgcaagtgttaaagttgcattgaatcgcattgccgttgtttctgtcctggatgcacataccctgtcagtgatgtcttatgaagcttggaggctcatacatctgtttctgttggctctctctagctatatgcagtggagctgctaatatgcatgaagtttgggctaggtgagcttcctctttcacttttcaaaccagtataggtattggccgatgtcaagaagacaaggccggcgacgagaggacgacagcgtgcaagaagagaaggcccatgttaggcgcaactataggtgcaactgtgcaaggataggcaacaagtgttcaacaatatgtctgtggatcaattgacctgcatttcagcttttagttgaggatcaaaatctcgtgtcgttcaggttcgtggccaccaccatcctcttgtccaccgaacccctcgcacgcggcacgacctaatcctagacacccgaccccaatgctcatg

SEQ ID NO: 231 - DNA, 2949 bp, Zea Mays
cttccacaaaccccataaccctagcaccgccgccaccatgtcctcatctccatcttcagtgaaccgccgtcccccgggcccgctagcgttggggctggagtccttggggaagaagatcagcatcggctggtctccgtcccgggcggcatcctctccatctcgtgtcgcacctacgcgaccccactgggccatggcttctttccccgggataattgcttctaatctcccgaggctgcataacctaattcagaggcagagcaagggggcgtgagggagatgagggagatcatcagcatccatatcgcgtaggcaggcatccagtgacacctctgtcgggatcgcgagggatgcgttcaacacgttcttcagtgaaacgggcgcagggaagcacgttccaagggccctgtttgtcgacttggagcccactgtgattgacgaggtgaagaccggggcgtaccgccggcttttccatcctgagcagctcatctcacacaaggaagatgctgcgaacaacttcgcccgtggacattacacaggctcaaaatgttcttggaaacaaggggactgaaattgcaaaggtagcacatcggcgaactgatgcggaggcgggcgtggaggcgctcgatgccgtccagcaatcagtagttgtcgctgcatcggcgacttctttcccccaccagcatggccgcgtgaatggttcagttctttccaaagcctacagcttctaggaaatcggatacgatcacccgaaaaaggcaagggggaaatcttcttatagatctgttccgtcattgtgacaatcatttgggagagaaacaagtaaacaacccttttttccataaaactccatctggaagtgcacgacagccactacagttgactaccgatgtaaccaagatgatgcaaaagcatcagctggaaacgccatagttgctgctactgagtaccatccttatatccttatttcctaattgttgtggtgcatgtacaagtttttttaaaacgaattccgaattggttattgctgttagaactcatctgagtgctaccttctcatatgctccttttttctctctggctgttatgttaaaggaccagatacaagtcaatcttcccttcaaattacaatttaattattttatatctggattctgcaagacacttcaaaaaaaaatataacaacatgtggtccctatgttatctactagcatgagccattgttccatgcagtttggtacatagtggcgcatattttgttacatttactttctatattcttagtatatttatagcctatatccccaaactatatcatatacttagcacacacccattgttataatccacgtgcgcatggcgcgcgcactttactagtatacaacattgttggcaacaggagctgatctctttattacacgatgtattggcttggtttctaatgtccactttcccatccctgttttcccctccttcaggacttctttagtgatcttttggtacatcgctgctgatacaaacagcctacccagactgcttttgtgaaggtatgtgcgtacctatattgcttcttgaggctgactcatgtgattggcggtgtttggaagatacattaaagtttaattcgacaaatgtcttttgcttagggctcctagcttggtgtttctttttctgtgatacttgtgcatgcgaagtaggtgaactgctacttaaatggtacatatttagcttaattacttactggtggcattgcagattatatgtttctgtcttaaagatacattagtaggctgtagtactcacactgcttctgttctcatctgttcacacactgcatctattcacagcatgattcagaggcatgcatgaggttgtagtaggcgagaccacccaaaagcactcccaacgcctgaccacaagagctagcagatagcagccctactgttggcaatccaataatcacatacgaagttttccttgaaattttttgagtcttgaattgacttcttccttaatttatagtttcaactcaaaacgaatacactattttttgttgaaccacattttcctctgctcagtttggcatcattattgtatcataatattatcataattaatccattctggtaaactgactctagaaaattttcttgaatggattcctatcttttacagtctaagctacattatgtgcatggaattttgcaatataccttctgtttcttgctcacatgattgatgtgattttgaattcatttagcacactgctttctgagaagccatttgcagtgcaaggatgaaacttggtcagagtgtttaccatatggattggcagtgaaaccaaaaaagaaggcgcgctactgttcttccgttttcatgtcaatgcaacaacagataagtggaggtggcactaccaattccttgatgtaccaggaatgtttggattgttgtattctgacattgtttggctcaacatattcaagttggagtgtcaggtctccaacaattaaacaagatacggaatctgtgtaagcaagagcattcataccttgttagcttccttctctctctctcaagatcgatctagagaccaacaagatcatggacttcttcaagtttgacgtcgataacgtggtcatggtgaccggcgggaggaacaccgggcgtgtaggagtgatcaagaactaggagaagcacaaaggcagcttcgaggtcatcgacgtgctgcttggagctttttgcatgctatgtctagttttctcctatttgttgtacaggaaaacatagaatggaattcaaatttggtggtcgcaaaagtgtggagacttgaattcatataaagttaggcttaacattagtgcaaacagttgtattttagtttagatttagagtacacttatgtatgccttgtttgacaatgcttatttatgatatattgaatggtacttattt

SEQ ID NO: 232 - DNA, 1804 bp, Zea Mays
cagaaaagggacgggaaggtgccaataaattgcgaggatgccgctttatctcttctcctctcccgccgccgccaagctcgccaccggcccacacgcgtccctgcaccggcggcgccagttcctcttccgagttccccaccgccccagccgccgcgccccactgctaacttcggcggctgagcgtccagcagggcgcaccatggctactgcggataccggagcgtccacggtgaccgattcgaggctccgagctacaggagtgaagcaagcactgatatcattgtcagataaaacagacctggctaatcttggaaatggtcttcagcgtttggggttttctattatttccactggtggcacggcatcaagtttggaagcatctggtgttaatgttacaaaagttgaagaaattacacagtttcctgaaatgcttgatggaagagtaaaaacattgcaccccagtatacatggtggtattcttgcgcgaagagaccaggagcaccatctgaaagcactgaaagagcatggcattgggctttgcaattttacgtacgtcgtcttacaggaaatgtcctacaacaactatctggacgcggacgctgcgtggaactgcgtctcggagtttgagagcccgacttgcgtcgtggttaagcacacaaatccgtgtggcgtagcgtctcggcacgacatcctggaagcgtacaggttggctgtgagggcagaccccgtgagcgcgttcggaggcatagtcgccttcaacacgacggtcgacgaggatctcgcgagggagatccgggagttcaggaggccgacggacggcgagacgaggatgttctacgagatcgtggtggcgcctgggtacacggcggagggcctggaggtgctgaaagggaagtcgaagacgctgaggatactggaggcgaagcggaggaggagcgggaagggcacgctgctgtcgctgcggcaggtcggcggcggctggctggcccaggagcccgacgacgtgaccccggaggacgtggccttcacgaacgtgtccgagagggctcccgacgcccgtgagctctcggacgccaagttcgcgtgcctctgcgtcaagcacgtgaagagcaacgccattgtgatcgccaagaacagttgcatgctgggcatgggcagtggccagccgaaccggctggagagcctgaggatcgctttcaggaaggcaggggaggaggccaagggagctgctttggccagcgacgccttcttcccgttcgcttggaacgacgcggtggaggaggcgtgccagcgcggcgtggcggtgatcgcagagcccggcggcagcatccgggaccaggacgccgtggagtgctgcaacaagtacggggtggccctcgtcttcaccggcgtccggcacttcaggcactgatcgacggcgacggtggcagcggagaccgtgacgacggacgatgggagggacctctatatagctgcgtcgatctggccggtggctggaaggaaggatctggcgtttcatcccagcgctgatgccggctggcgtttcttggctactagggagactctgatggtgctgatacaaccaaatgtcgcctctcgagaggatgggtcggtgggtcccggtttgtatatatgacgtcgtcagcctggcaagaggttgattgagcttaatactaactcttgcggtggatggaaatcggaaacggtcgctgaccggtgggatcgcacagtctgctgctagaagcatgcaaaggctacatgccgtgttattattgttattaatatttattgctgtcacgttaca

SEQ ID NO: 233 - DNA, 5864 bp, Zea Mays
tggagtactccgacgcaaaactctctccgctgctccgcaaaccaagcaagaccggaagagcgcccaggcccaccacagcggccactcctcccccattcccgagtcccgaccaaccaccggcaccgacgcggccgctccccagcatggcctccaccgccgccgcgccgcgcaccacgaaggagctcatggacgccctcaccgcgcacctctctctctaccacgccgccgcgaaccctagccccgccaccgctgctgcctctacctcctcctcgtcaccgcgcgctgcgatcctccggtggctcgcctccctctcccccgccgcgcgcgctgcggctgccacctccctcctctcccccgccgcggctgccgcgctgctctccatggtccgccggctccgcctccgcggccactcctccttcttcgtgctccactcctcgtccccgtccacctccgcgcgcggagccgaggagccaaccgtcctctcgcgcctctcccggggcctcctcgcccgcgccgccgccagctcccgggcgcaggcgctcctcttcgccaacaccctcctcttcccctcgtcgcccgcatcgtcgcggcgccccgacgtgatcaccgtcgccgaagccttcgtcgctgacctcgacggctttgtcgcagccatggatgagatctctggcgggaggttcctctgctgcggggagggggaagtggacctggccgcgctggcgtgtcaagatttcccggagctgccctggcttaatgccaaggggtactacgtgatcgaggagtttctggccaataggttggatatcgcactgcgaatgtcgtgggcagcggcagggggtgggtcagctggagggagaaaggcggtgagaattgggaagagtgcgaaggagaaggctgggcttgctgcaaacgcgttctggagggagaagggcattctgtcttgcagcaagaagtctgtattttataaagagttgaaaagactgaaactagttgaggagatagtctgtttgaagagcaacattacttgctgcagcggtgatgcaatctttttcacttcattagtgtcggctgctactgctgctggtgatgtacttatgaaattacaagggcttctcatggtggtgtcgacagaaagtataaatcttgaacttattggggatgaagcccccaaaaagaaagatgttgaaaagaccagtggaggttctcggaaaggaaagaagaagtctaacaccttgaaaaagctaacgacatctgctaagccatctaaggataatggatgcagtagttcagataatcgcaattgtagtcctttaccaaaccattgtgctccatctgttgaaggcactgctgctggacctccatctgaaaaaactccttacaaggaaattgtaccaacaacgaaggttgaacaaactgtctcgttggatggttgcaaaaatcaatgtaacaaaaagaagaacaagcggaaagggaaaacaaaactatcaaatccgatgaggcctgagagcccaagatctaccaaattaaaaacagttgttccccatagtgctgcagaggccttgcatgaagctgctaaagaggctgatgtctcacctcatcacccatcgtatgtccatccttccaagaacgagatctctgaagctgttagctgttctgacccttccattttatctaatggaacaaaggtaatatccaccagtaagggcacaaaacttgaagacacattgtattctcctagagttcactcatcacttgctacagaacgttttcagagtgcccatgatgatgccttcaaagtggctgtgcaggcctcatcgtaccttagccaaagtgaatccttggttcagtcatcctcttgtctaccttccagaagcaatgaggtctcttctactaatctgtatggaagttcagttgactccttggtaagatctgcacaggaaaaaactgaatgtgatgggaaacatgtggatcataaatctgaagtgacaaaggacagaattttaccttctgctattcctactgacatgcttcaaagtgctataagtaaaaatggtggagttatgaaaaatggtggtggtgaatgttatgtatacaataggaacctactgggaggaacgtcgtatgaatggcctagtgtaacaccatctcattttgtatctcctcaaatgcaacaacgtccagctgcagcagacaggttgcatcttgatgttggttacagatggccaactcaatttaaccaaccctttcttcctgccaaccatcaggtgaggaatccgccaattgatgctggacacaatcaaatgttaccttctctagcagttccactaagttttgactggcctccagtttttagaggttatggtaaaaatgcttctgtaagctatgatccattgtataccccacagatgcaatcttctgcttggtcagggttccctgctcaactagtgcaaagagggggtatttgcagtgacagtgatgttgcggatgatactgaaagctattggttttctgaagaagaatcagatagtcgtgcacattctggaagagatattaatcaatactttggtggaggtgtgatgtactggagtcctgcagaacatgcaggaactggtttttccaggccaccatctcttagttcagatgatagtgcctgggcttggcatgaggctgatgttatacgagttgttgatgatgtagctaatggtattccatctacatacacaaatggtgtatcatcaccaccctccactccatcttgttctcaaaatgaatctttggatccagctgctcacttgataacagggaatgagatcaataatgaagctctgacttctccatcttcggtgcaagatagtcctgaagataaaataatgcaagttgcaaaggctgtgtcttgtggcagtgaagtagttaaggcagatacattgccatatgccatgctgcggccgatagttgttcctagtatatcacgaaggtcatcacgatctgagattaagggtgctcatgatcacaggaggagcccatgtgtaccatcaacaaggagggacatacctattctaagaagacctccatcaccagtagtacttagtgttcctcgcgtacctaggccaccacctccttcacctgctggagagtcaagaaaacgagggttccctatcgttagatccggcagctcaagtcctcgacattgggggatgagaggtttattttctgaagacaaaatttttcatagggctcagttttgcttggatggtcctgaagttgtatggccttcatggggtaacaagggtacttctggtacattggtgcaaacaattgaggatactgttttgcaggaccaccttgttaagatttcacagctatcttgtgatcaacatccagatgtggcattgcctgtacagccactagatatgctaaatggttcgtctcacaaggcatccctctctttgatgcacaatgctctacatgaagaaatagatcaattctgtaagcaggttgctgctggtaatctggtgaggaggccctatataaactgggctgtcaaaagagtcacccgttgcctgcaggttctgtggcctcgctcccgtacaaatctatttggctcaaatgccactggtctggctcttccaactagtgatgttgatcttgtggttagtcttcctcctgtccgaaacctggaacctattaaagaagctggaattttggaaggccgtaatggcatcaaggaaacatgtctacagcatgcagcaaggtgtcttactaaccaggactgggttagaagtgattcccttaaaacagttgaaaacacagctatacctgtgatcatgcttgtagcggatgtaccctgtgacacgaatatgtccaatgagtattcttcagtactagatggctcacaagactattcagttaacatgcttggagaacaagggagtcctcctcggtctgacacctctagttcagaaggcagcaacatgctgatgtgctcaaaattgaataaggatgattgtgatattgtgcagtcaattcgtcttgatataagtttcaaatcgccatcccatacaggactgcagactactgagttggtacgtgagttgagccagcaatttcctgcagttatacctcttgccttgattctcaagaagtttttggctgaccggagtttggaccacccctattcaggtggtctgagctcttactgtttggtgctgttaattgttcgttttctccagcatgagcatcatcttggtcgacctattaataaaaatctgggcagccttttgatggatttcttgtacttctttgggaacatatttgatccacgccatatgcgcatttctatccaaggaagtggaatttatttgaatcgagaaagagggcaaagcattgacccgattcacatagatgatccacattgccctgctaacaatgtgggcaggaattgtttccgcattcaccaatgtattaaggcatttgctgatgcgtttgctgttcttgagaatgagctactgcagttcagttcagaatgtagcatgcctgtatcttcattcaatatactaaagaaaataatcccaagtattgattctgatgagctgtagctataaaaaagaggtacgattccacagaatacaattgatgacagggtggaatgacctgtgctgccttctagacacactgatgtctatgcagctgctcagaagcctcagtgtggcaagtttgatacctctggaatagaccaaaaaatagaccggcaagatggcaatattcaaacgtgagctcttgtgtgttcatgcaatggcacatgatgccttgctccctgatcgagcttcttgatgttcagatctctgactgaggtaaattggcttactcaagaacaaggtggtgaattggctttctcatgaacaaggcgttgctgcacacagactactgacgtggctgttcttgcacctttctgaataagcccattcatgtaatgtttggtaaatgcaaaccgcatgattatccgcttgatactgtgattgatagatgcttcacctcgtgccaatattctgtgttccaatgccaagtcacatattctgagcagcaactggagatttgctcatgtaccgattcttcaaggtcctaggatcatttggggtgatgaagattgtgaaatacatgtggaggggtacttatatggagatgcatggtcttagtaattaagcggtcaagaacttatggtcacctgatgaaaacaaggatggttgtgaagagaacggagtagtggcatcagctatcagggaaagggaagtgctattgacatcatggctgacccctttcagattatcgcgctgagatcttcctggcgaggattgggagctacgagccagatatccttgacggaaatgtttgcttggacagcgtaaaccggaaagtaccggcgatgatattgatgatgataatcgcactgctctctattgtcatactgttgtctgcactcttcagcgacatgtcttgtgccttttcaacgtgcgaaatgtgagcaattgctcttgtaaagctgcactatttcactaaaacattattgtttgggttatttagatccatggtattactatttatctatttggaaacttacattacaattttccctggatgtacccgatccatgccatttcctacgcttctccactcggcagattgttgaatcgtatcccaaaatctctcccattgtcgtctccatgaattgctcatctcacctctctaccatggagggtttagggtttatatctttctatcaggttaaactggttggtgtatataacttaatatggtattagatgtctcgaatttaaatcctagttagtataattaaataaaaataaata

SEQ ID NO: 234 - DNA, 1594 bp, Zea Mays
agaaatgcagtctgtggctgagatggcttctaatgcctatcgcaaacccagtgtcagtccatcagctacgatgctgaaagctctgcctatgcggttcctcgcctcgccggagcccggtgggtggagccggcgactaccacgacgatcgctgcggtcggtttcggcagcgctcatgaccaaccccgcttacttcgaggtgggaagattcttgggtggctatggcttcatgaacatcacaagttactcatcatctcaatttggagagccttcaaatgttgccggtattcaagaccttggtcttggatattcaccagaagagatcgaacggttgagggtccaagatattggagaaggagaagtgacaattagactttatgagggaagagttgttcaaggtccattcaggggcacacgggctgtatttaaggtataccctggagcccgtgctgatgcttctgaagctgatttgatggcactgaatgagttaaggactcatgcgtttcttcagagtgatgctagtgacatatgcgagaacatccagtttcttttaggggccttcgagacagcaactggagaacagtggctcgccttccgtgatgacgggagatatagtgctgcagactatgcaaatgtaactagtgcaaggcaattgaaggaaaaatctggagggacgccattctggaaccctttcgatcgagcatacaaattggagttaaggagatactttgttcttaagttgctgaacggtgctatgagtggccttgttcacatgcacaatcatgatagactgcatcaaagccttggaccttcttctgtaattctcaatacggcattggataaagagggacgctacttggttccaaggctgagagatttggcattttctgtagatattgggtattcatctattggggctggagtgctgtcggacggactatggcgtcgagcctctgctgctggggcttccactcctttggagaagcgagcctttggaatagctgatgacatttatggagctgggctgcttcttgcatacatgtcattcattccattctgcaaagcgggcgttatggatggtatctccttgcagagacttttagagagcacctttcggcttgacatttacgctgcaagagagtattgtctggcagatgaccagctgtcggaagcagtaagttttctagatttaggggatggtgctggctgggagttattgcaggcaatgcttaatccggattaccgcaagcgaccaattgcagaggctgtactgaaccacaggtttataactggagcagttttacgaaactactaatcagcattttttttacttgtataaagttgctacgtggaaattgtaaaagtacaataattttagtgggtgaagaggtgatacgtttcttggatgaacagtgcgtgttctctgtctgtcgcttcccattgcatggctatggctatggcgagcaaatagccgatgagcatacccactttcagctgcgctgcaggcaatcacctgagggaccgtagtgctgggagtagagatggcaatgggtacccgaaacccgatgggtttttaccccattagggtacgggtttg

SEQ ID NO: 235 - DNA, 2108 bp, Zea Mays
cagaaaagggacgggaaggtgccaataaattgcgaggatgccgctttatctcttctcctctcccgccgccgccaagctcgccaccggcccacacgcgtccctgcaccggcggcgccagttcctcttccgagttccccaccgccccagccgccgcgccccactgctaacttcggcggctgagcgtccagcagggcgcaccatggctactgcggataccggagcgtccacggtgaccgattcgaggctccgagctacaggagtgaagcaagcactgatatcattgtcagataaaacagacctggctaatcttggaaatggtcttcagcgtttggggttttctattatttccactggtggcacggcatcaagtttggaagcatctggtgttaatgttacaaaagttgaagaaattacacagtttcctgaaatgcttgatggaagagtaaaaacattgcaccccagtatacatggtggtattcttgcgcgaagagaccaggagcaccatctgaaagcactgaaagagcatggcattgaatcataaggacgttcttgtcgttgttgatcataaagactatcctgctctactggaatatctagaagggaaacaagatgaccctgatttccgcaggacacttgcatggaaagcattccaacatgttgcttcctatgattctgctatctcggagtggttgtggaagcaatctaataaagcagattcatttcctcccagctttactgtgcccctcacaatgaagtctacacttcgctatggtgagaatcctcatcaaaaggctgccttttatggtgacaggagtctttctctagtaaatgctggcggtattgcaacagcaattcagcaccatggaaaggaaatgtcctacaacaactatctggacgcggacgctgcgtggaactgcgtctcggagtttgagagcccgacttgcgtcgtggttaagcacacaaatccgtgtggcgtagcgtctcggcacgacatcctggaagcgtacaggttggctgtgagggcagaccccgtgagcgcgttcggaggcatagtcgccttcaacacgacggtcgacgaggatctcgcgagggagatccgggagttcaggaggccgacggacggcgagacgaggatgttctacgagatcgtggtggcgcctgggtacacggcggagggcctggaggtgctgaaagggaagtcgaagacgctgaggatactggaggcgaagcggaggaggagcgggaagggcacgctgctgtcgctgcggcaggtcggcggcggctggctggcccaggagcccgacgacgtgaccccggaggacgtggccttcacgaacgtgtccgagagggctcccgacgcccgtgagctctcggacgccaagttcgcgtgcctctgcgtcaagcacgtgaagagcaacgccattgtgatcgccaagaacagttgcatgctgggcatgggcagtggccagccgaaccggctggagagcctgaggatcgctttcaggaaggcaggggaggaggccaagggagctgctttggccagcgacgccttcttcccgttcgcttggaacgacgcggtggaggaggcgtgccagcgcggcgtggcggtgatcgcagagcccggcggcagcatccgggaccaggacgccgtggagtgctgcaacaagtacggggtggccctcgtcttcaccggcgtccggcacttcaggcactgatcgacggcgacggtggcagcggagaccgtgacgacggacgatgggagggacctctatatagctgcgtcgatctggccggtggctggaaggaaggatctggcgtttcatcccagcgctgatgccggctggcgtttcttggctactagggagactctgatggtgctgatacaaccaaatgtcgcctctcgagaggatgggtcggtgggtcccggtttgtatatatgacgtcgtcagcctggcaagaggttgattgagcttaatactaactcttgcggtggatggaaatcggaaacggtcgctgaccggtgggatcgcacagtctgctgctagaagcatgcaaaggctacatgccgtgttattattgttattaatatttattgctgtcacgttaca

SEQ ID NO: 236 - DNA, 1998 bp, Zea Mays
cttttttttcccaaccgggcacacttccgtttacatctatcccctcagccagcggccagcgcacagcgcaaccgcctcaaaacacccgcgtgtgcgtgacagtgcagctagatccacccacaacctcgccaccactctccacgccttccgatccaatcacccgcccctttcactgacgccaggatcaatcaggcacggtcccacgggacagcgagaatatctaggtcgaccctgagagccagccgccaggcgctgatttctcttttgtagcctccggattttttttcgcctataattactcttccccgtgcgccctcgcgaggtcgaacccccaaggcgaggcgacgaaaccctcgccagtccccaactcgaacctcagtcaggcagcgtgaggagggagagttcaaggaccgaggcggcgtcgggcgagatgaagcttaacgtcaagaccctcaagggcaccaacttcgagatcgaggcgagccccgatgcatcggttgctgatgtgaagaggatcattgagaccactcaaggtcagagtacctaccgggcggaccagcaaatgctcatataccaagggaaaattctcaaggatgaaaccactttggaaagcaacggagttgctgagaacagcttccttgttataatgttgtccaaggctaaggcatcatcgagtggagcttctaccgctactactgcaaaagctcctgcaactctggcccaacctgctgcccctgtggcccctgctgcatcagttgcaagaacaccaacacaggctcctgttgccacagctgaaacggcacctccaagtgtccaacctcaggctgctccagctgctacggttgctgctactgatgatgctgatgtgtacagtcaggcagcttcaaaccttgtatctggcaacaatctagaacagactatccaacaaattcttgacatgggtggtggtacatgggaacgtgatactgttgttcgtgctctacgtgctgcatacaataaccccgagagagctatagactacctgtattctggaattcctgagaatgtggaggctcagcctgttgcccgagcacctgctgctggccaacaaacaaatcagcaggccgcatcacccgctcagccagcagttgcattgccagtgcagccatcacctgcctctgcagggcctaatgcaaatcctttgaacctttttcctcagggtgttccaagtggtgggtccaacccaggtgttgttccaggtgcaggatctggtgctcttgatgccttgcgacagcttccacagtttcaagcactccttcagttagtccaggctaatcctcaaatcttgcagccaatgcttcaagagctaggtaaacaaaacccacaaattctgcggttgattcaggaaaatcaagctgagtttctccgcttggtgaatgaatctcctgagggtggtcctggagggaacatactaggtcaactggcagctgctgtgccacaaacgctgacagttaccccagaggaacgggaggctatccagcggctcgagggaatggggttcaaccgtgagcttgtgctagaagttttctttgcatgcaacaaggacgaagagcttacagccaactacctcctggatcatggccatgagtttgacgagcagcagcaatagacgtggggtggatggaggaaaccgaggcagttgcagaacagcgagtgtcgttcttatgctatgctgctgactatcttttatttccatatatatttgttcggaatgctttctaagtacatattaattcaatatcaagcgttacaccgtgtatgaaagcctgtcaaatcgtggcctttggtttggagggaaggattcgattgctcacttgttttctttgctctttttcctggcgtattgttgcattgtatcaatattatgagttttagggcgttttggattttctataatatataatatacataaagtatagtgcattgtaaaactaagaatctataaaagctaaaatgatc

SEQ ID NO: 237 - DNA, 2262 bp, Zea Mays
caaagacgtcgggccgccggcacctgcccgagtggagtactcgaagcgggcggagtcggcgagtgcacacgtcaacacccacccgaatactagtagtggaatactagtagtggcagcgtttattagccgtcacactcccacactcggcctgccgaggagaaactgaagatggttaggggctagaacgagcgagaggcggccgggaggagggaccgatttgtcgatggcgatcggggcgttcgtggagggcgctccggcggacggcggagaaggttacagcggccgcgtgacgcccttcgtggtgctgtcctgcgtcgtcgccggcagcggcggcgtcctcttcggatacgacctcggcatctccgcaggagtggtcgaaactcgagaagggtccacagatcatccttgatcgtcatccacataatccctatctcgtaatcaactgttctacttcgaagtatctatcaacttcactactacagactacagtccacaatctatcaacttcactactacagtccacaagagaggaagaaaattatccaacggacaattccctatatgccactacaattttgctcggtggtcttacctcaatggactgcttcctgaagagattcttcccaaaggtgtaccgtcagaagcaggacagcaaagtgagccactactgcgagttcaacagcgagctcctcaccgtcttcacgtcctccctctatatcgccggtcttgttgcaactctggctgcagcaaccatcacaaggaggtatggccgtcgcacatcaatgctgatcggcggcagtgtcttcatcgcgggctcagtgttcggtggtgcagccaccaatattcccatgctcctaatgaacaggattctactggggattggtctggggttcactaatcagtcaatcccattgtacctgtccgaaatggcgccaccccgataccgcggggcaatcaacaacggcttcgagctctgcatcagccttggcatcctgttcgcgaacgttctcaactatttcgtcataaaaatcacagcaggatggggatggaggatatccctgtccatggccgcactgcccgccgcattcctaaccatcggcgcgatcttcctccccgagacgccaagcttcataatccaacgtgacggcaacaacacggacaaggcaagggtgctgctccagaagctgcgcggaacggcctcggtccagaaagagctcgacgacctggtccgtgctagcgacctctcacgagcaacccggtacccattcaggagcatactcgagaggaagtacaggccgcagcttgtggtggcgctgctggtccctttcttcaaccaggttagcgggatcaacgtggtgaacttctacgcgccggtcatgttcaggacgatcggtctcaaggagagcgcgtccctcctgtcctcggtggtgacacgcctgtgcgcgacgtctgccaacgtcgtggcgatggtggtggtcgacagggttgggcgcaggaagctcttccttgccggcggcgtgcagatgatactttcgcagttcaccgtcggcgcgatcctggctgcgaagttcagggactacgaggagatgggtgatgggtacgcgtacctggtgctgaccacactgtgtgtgttcgttgcaggctttgcgtggtcgtggggccctctcaccttcttggtccctgccgaggtttgcccgctggagatcaggtccgcggggcagagcatcgtggtcgctgtggttttcttgatgacgtttgtgattagccagacgtttcttgaggtcctctgccgcgtcaagtcggcgacgttcttcgtcttcggtggatggatctgcctgatgacgttgttcgtttatctgttcctgcctgagaccaagaagctgcccatggagcagatggagcaggtctggaagacacactggttctggaagaaggttgtgggagaggaagcggataggaaagaagcaggagcagggaatatagctttgtcgggcttgtcttagtcattttctgagtcgggtgtgtgtatgtgtatttgatcaaaactgcaaagaaaaacatagtatacgatcgcgacaagctgatgtaaatgtacatttgtatgtaaatcgagtaaacttatcagtctggcgttgttgccagttcctacaactaaccgttccaaatggtacaagagtacagaagcactaatataacaagaatgttgaaacgcactgctgtttcttctttcatgatcggccgtagaaggaaaatttacctaac

SEQ ID NO: 238 - DNA, 1739 bp, Zea Mays
tcactctttgtaatccctcctgaaccactaccatcaatttctgtcttcttcgcagcctcctctgtactcattttcacagaagcatagagtcacacactcgactcctttctcgcagcctctcgagctctctactccactcgtagacctcgtcctcctctcctcctttcctcctgtttcagcctccgtgtagacaggacgcaaacgcaagtcagcagcagctcgtttgtcggagtggcgatgcgtggaggtggcagggcgctgcggttggcgactcggtgcggtctgctgctggtgaccgcgcggctgcgcctagccggcccacgcggagacgcggcgtcgggctggtggcgcggctgcgctcgacgggagcaggcggcgtggctgcgggcgtcggggcacgggctgcgggagcggcggcgggctgcggcggagaaacctagctccgtataccatgttgattttctgatgagctagaaaagacaatctcagttgcatcaagggatccggcatactatggacttgatgaagttgagctttccagacgaagaaactggactggttcttctcataagcaggtcggtacagtcaagagagctattgaaaagggcaagagcaatgcagcaacttcaaaataccaggatacaagcaggaccaaccactattctgcccaagataatgatgactttctttcttcagaatcagatagacagcttctactcatgaggcagcaggatgaagaacttgatgagctcagtgaaagtgtccaaaggattggtggcgtgggactaaccatacacgaagagctgtctggacaggaaaggatcctaaacgacctaagcttggagatggagactacttccaacagacttgatttcgtgcagaaaagagtggccatggtgataaagaaggccggcatcaagggtcagatcatgctgatcgtgttcctgattgttctgttcatcattcttttcgttttggtgttcttgacatagccaagtgcaccagggtcctcggttttctctctcatttgttgtgcctccctagtacgaacactagtaaattggtcgcgctccgcgtgagttgttgcttgatgtgcttacataagatgtagaatcttgttgctataggcatgtatcaacaggtgctagcagcttgcagttctcctaacagaaacaggtcgaagcagattttttgttctccaagtgatcagtttgtccaaggttgttaggctttccgtaatcgcttcgagtttgcttttcaagatcatcattcacatgttgcttgttagactttggctcaacataaggaggcagcatggattctttatgtttgcaacatttagcttagtgtaaggagccttgtttctagtggtaccaccacccggtatactaagaagactcaatgaacgcccttgattctctgggtgctgagctcttacccctgaatctgcatgtctcccattgtgttcatgaccaccaggccattgagatcaagttctactacctccatcagcttcttttccaaagggcgaacaactcttctgtttagcttctgaacatccttttttgggtcctgttagtgtccacaggagacactggtttatgcaaatgttcattttcaacagacacatcaggttgttgcttcctcgaattcttatcaattgtatggtgtgcgttagcaacagaacgaatatctttttggatcaacagtatctccactttatcagtatggtgtgcagg

SEQ ID NO: 239 - DNA, 2462 bp, Zea Mays
cttccacaaaccccataaccctagcaccgccgccaccatgtcctcatctccatcttcagtgaaccgccgtcccccgggcccgctagcgttggggctggagtccttggggaagaagatcagcatcggctggtctccgtcccgggcggcatcctctccatctcgtgtcgcacctacgcgaccccactgggccatggcttctttccccgtgacacctctgtcgggatcgcgagggatgcgttcaacacgttcttcagtgaaacgggcgcagggaagcacgttccaagggccctgtttgtcgacttggagcccactgtgattgacgaggtgaagaccggggcgtaccgccggcttttccatcctgagcagctcatctcacacaaggaagatgctgcgaacaacttcgcccgtggacattacacaggctcaaaatgttcttggaaacaaggggactgaaattgcaaaggtagcacatcggcgaactgatgcggaggcgggcgtggaggcgctcgatgccgtccagcaatcagtagttgtcgctgcatcggcgacttctttcccccaccagcatggccgcgtgaatggttcagtttattcggattcaaccatgcatgtgatcgatctatcagagagctgaccaccttctttgcttgtcgcttggaaccatcgcaaagttctttccaaagcctacagcttctaggaaatcggatacgatcacccgaaaaaggcaagggggaaatcttcttatagatctgttccgtcattgtgacaatcatttgggagagaaacaagtaaacaacccttttttccataaaactccatctggaagtgcacgacagccactacagttgactaccgatgtaaccaagatgatgcaaaagcatcagctggaaacgccatagttgctgctactgagtaccatccttatatccttatttcctaattgttgtggtgcatgtacaagtttttttaaaacgaattccgaattggttattgctgttagaactcatctgagtgctaccttctcatatgctccttttttctctctggctgttatgttaaaggaccagatacaagtcaatcttcccttcaaattacaatttaattattttatatctggattctgcaagacacttcaaaaaaaaatataacaacatgtggtccctatgttatctactagcatgagccattgttccatgcagtttggtacatagtggcgcatattttgttacatttactttctatattcttagtatatttatagcctatatccccaaactatatcatatacttagcacacacccattgttataatccacgtgcgcatggcgcgcgcactttactagtatacaacattgttggcaacaggagctgatctctttattacacgatgtattggcttggtttctaatgtccactttcccatccctgttttcccctccttcaggacttctttagtgatcttttggtacatcgctgctgatacaaacagcctacccagactgcttttgtgaagcacactgctttctgagaagccatttgcagtgcaaggatgaaacttggtcagagtgtttaccatatggattggcagtgaaaccaaaaaagaaggcgcgctactgttcttccgttttcatgtcaatgcaacaacagtggaggtggcactaccaattccttgatgtaccaggaatgtttggattgttgtattctgacattgtttggctcaacatattcaaggtatgttccaaggctatcttagaaaaaattcctgcaaatattgcattttgattcatcttgttgccctttttgttttcggtttggaccatactgtgatttctttgaacaattagtcactctcttagtcttctaaccacatctctctcggtcttgcttcttgcctgttcctaattttggccattatatatttatagtgtgatgatgatttgttctcttcttttccatgtataggactcatgtgttctttgttctctctatgcagttggagtgtcaggtctccaacaattaaacaagatacggaatctgtgtaagcaagagcattcataccttgttagcttccttctctctctctcaagatcgatctagagaccaacaagatcatggacttcttcaagtttgacgtcgataacgtggtcatggtgaccggcgggaggaacaccgggcgtgtaggagtgatcaagaactaggagaagcacaaaggcagcttcgaggtcatcgacgtgctgcttggagctttttgcatgctatgtctagttttctcctatttgttgtacaggaaaacatagaatggaattcaaatttggtggtcgcaaaagtgtggagacttgaattcatataaagttaggcttaacattagtgcaaacagttgtattttagtttagatttagagtacacttatgtatgccttgtttgacaatgcttatttatgatatattgaatggtacttattt

SEQ ID NO: 240 - DNA, 3617 bp, Zea Mays
caaccagcagtagttctgatgagtatcctgactaaaacaacattgaacagagtttccaaatcaaataggtacaaaaggttcaacttcatattgctccatagccataactgtcaagatttacagcaaaatcataaattgtgaaaggttgcggtccttgtgatggtgtggcataactattcctcctaaataacatgcacttaacatacacgagacctaagccaacatgctacagcttactcgacctttcccttccccttggaatcatcactcactcgagaggatgttggctggttgatactcgctttggctttctccaggaaggtgggatctggctgtggctcttggtgtggagtctccttcatcgccatgaatatgtaaaagccgatcactagattaactgatatgacagccaggaacccactggcaagtgtctgcgccgaggatgacatctgactcacctggaaacacctggtagtaaaacccatacatgatcgcaacaggggccatccacatcaccatggatgtaaccgcgaactttgtgatcactcctgacattgcttctcctgacgacaaaagatgaagtcagttcaatttccgattggatctccgctcgacgctgggcctgcagaggtgagggcagcaacggctcgaatcccggaagaactccttccgggcggctagtagagtgtggtcactggccggatgagattcgacgccgagagatagaagaagcgacgagaggagaggagcggtggctgcggagtcgtcgacgtcgattggatcggaacccaccacgacggggaaagagacgcagactggatcactggaccacaacagtaggccgtctcgaatgggccaaaatttctgtttgggctacctcgctcattctgtcattcatgggatgggaggatcctttgcaatctggaccgttgaatcgcgcttgccgttgccgaatgtccacctccacctgatggcagcggcgaccaaaccaccgagtgagacagggagaagagatgctgctccgcgttggcctcgcgcgcagcgcccgccttcgcggcggcggtggcggcgtctccctctccttagccatagcgcggcatctctccttcgagtcgccgccaccagtgcccccgtcccggcccgaccccgagtggacggacacggtggactacctggacgagtcgggcgcgctgctctcctcggcgcgcggggcgcggccggccgtgccgggcgccgaccccaccatcctatccggcgcctccgcgcacccgctcccgcgccccgcagcggcggcccgcctcgcggcgctcgcgctccggcaccgatcgggcgcgactctctccgccgcgctctccgcactgccctccccgccagaccccgcgctgctcctcctcgcggccgcctcgctcccggcttccgaccccgtcccgctcatctcccttgtcgcatgggcgcgcctccagccgtggttcgtcccctccgacgacctctcctcgctcctcgccgcgcgtctcccgccggcaactcactcctccgaactcctcgcgctcttcgacgacaccctcgggctctccgacctcgccaccttccccaagaccttcaacgccgtcgtctccgcgctcgccacccacggccttctcgagccggccttctactgcttcaagcgcctccgcgacgtcagcttcaggggcctcgagacgcccgcctacaacgccctcctctctctgttgctcaccagggggcttgcattcaaggccttcgaagtgctcgacgaaatggcgacctcgggctgcgccctcgacgagggcacataccagctcgcggtgcctgcgctggcgcgcgccgggaggatcgacgccgcccgcaagatgttcgatgaaatgaagcaaagggagggaattgggcgggcgccggtgggcgtgtattcggtgatggtggacgtgctggccaaggcagggaggcttgatgcggccatgggaatgtacagagagatggtggtggtcgggcatcgggtaagcacagcagtgagcaccgccatggtggaggcactggtgagatctgggaagctggatgctgggatggagctttgggaggagatgaggaggggagggctccgaccaagctttggcttgtacacgatggtggtcgaggccaatgcacggtctggaaggttggacatggccgccaagttgttcggtgacatggagaagtctggctttttccctacgccggccacatatgcctgtctggtggaaatgcatgcctccgcagggcaggtggatgcagcaatgcggttgtatcactccatggcgaattcagggacaaggccagggcttagcacgtttacagcgttgctcacaatgctggcgaataagagtctgctggatttggctgcaaaggtgctgttggagatgaaggcgtcaggtttcccgatagaggtgaccgcaagtgacctgctgatgatctacatcaaggatgggtcaactgaccttgcactccggtggctacggttcatgggttcggctggcataaggaccaacaacttcatcattaggcagctgtttgagtcttgcatgaagacggggctgtatgactcagcgcggtcgttgcttgaggcttatgtcgctggggcagccaaggtggacttgattctctacacatccatcctcgcgcacttggtccggtgccaggacgagagcagcgagcgtacaatcatggacatcctgggcaccagcaagcacaaagcacatgacttcatgtgcgggctgttcactggtccggagcagcggaagcagcccgtgctctctttcgtgcgcgagttcttccagggcatcgactacgacaacgaggagagtgcagccaggtactttgtgaacgtcctgctcaactacctggtgctcatggggcagatgaaccgtgcccgctgtgtttggaaggtcgcctacgagaataagctgttcgccaaggcaatcgtttttgaccagcacatcgcctggtccctggatgtcaggagcttatccgtgggcgcagctctcgtggctaccgtgcacacactgcatcggttcaggaagcggatgctctactacggggttgtgccacggcgcatcaagctggtgactgggccgacactgaagatggtggtggcacaggtgctggcgtcgctggagtcgccgtttgaggtgagcaaagtcgtcttgcgggcacccggcgactcggtactggagtggtttaagaagccgattgtccagcagttcctcctgaacgagataccatccaaggccgacgtcttgatgcacaggctcaacgtgatgtttccaagttcggctccggaggtccggtccttgtccattccaagatcccttggcatgcctaggtgataacacgacagaccttgttgcttgaacactgcaagctgaagcatagctcactactcagcggaagtaaacaaaacgtgagacgaaaccagtggaggacagggtgtccgctcatcctcgcgtgaggtaggactaggatgtgtgcgatttgtttttttaattatgcaatccatgttgggataaaaaatgtagcagggattagttttataaagaaaaaaaattaaattactccccttgcatatg

SEQ ID NO: 241 - DNA, 1836 bp, Zea Mays
cttgcagtgggtgtgggtcccttcaatgagtagatgcatactacccgcgccggatttttcaccattcatcccatccccagagatttgggatttatcgatgccatggaggatttacttcaccatgcctctcgattcatcggaacgttggtttgcagtttgctatgtgctggttaagttgccttttcgattctcagaaaaagactggctctgcactcggataattttaaaatggatagtgcacagcagcccactggggaattgaacaattcgttcgatactcttatggtttctggaggtgaccagagtcgacagcctcaggatgctggcaatgaaacgagcttcacgaattggaaagacctccccatggagctgctcctgcgtatcatttcactagttggagatgacaggatagtcattgtggcctccggtgtatgcacaggatggcgtgacaccttggggtggggggttgcaaatctttcactatcatggtgccaggaccgcatgaatgacttggtgatatcactggctcacaaattcacgaagctgcaagttctatctctacgccagatcaggcctcagctagaagacagcggcgtggaggccgtggcaaaccactgccacgacctgcgcgagctggatctcagcagaagcttcaggctgagcgaccggtccttgtacgccctggcgcacgggtgccctcagcttaccaggctcaacatcagcgggtgctccagtttcagcgacgtggcgctcgtgttcctctccagccagtgcgggaacctgagatgcctgaacctgtgcgggccatcgcctgttactgtggccagctgcagtcgttgaacctgggctggtgtgatggcatcactgacaagggggtgaccagcctggcttcgggatgccctgaactcagggccgtcgacctgtgcggctgtgttcttataacagatgagagcgtggttgcgctggcgaacggctgccttcacctgcgctccctgggtctctactactgccagaacatcacggaccgcgccatgtactccctggccgccaacagccgcgtgaggagtcggggccggggctgggacgcgacagcgaagagcggcggcggtggcaaggaccgggagcgggacggactggcgagcctgaacatcagccagtgcacggcgctgaccccgcccgcggtgcaggcggtgtgcgactcgttcccggcgctgcacacgtgcccggagcggcactcgctcaacatcagcgggtgcctcagcctaacctccgtgcactgcgcctgtgcgctgcaccctcaccgggccgggcgagtcatcctctccaaccacgcctactgaacgcaatgcgtgaataggcggcgatgctcagatgtgtggataggccgttcaaccgtgagcgacggtgtccgctgtttatgtgaggtgcttgttttgtgtttaggcgtcaaggcgtgtacttggggtctctactctctagggaaccgtgtagaagcaaccgagttgagttcatcgtctgtaaaaacatggactgtatctgactatctgttgtcatgtcttttgagatctttagcctggactctggagcagcgcggcgacggcgatagccactcctttggtgggggctctcagactatctccaaaccctatcatactcttatttctatcctgttcgtttagtttaatccatatcggtttctactatagaggaacaaacagtcaaacgaacgagaacaaacagtctgtaaaagcagtctaaacagtcagctttagaaacgaacagtgttacagtttatttatagtgtaaaacagcctgcatgcatttgctggagttggc

SEQ ID NO: 242 - DNA, 1699 bp, Zea Mays
cttcttcgcagcctcctctgtactcattttcacagaagcatagagtcacacactcgactcctttctcgcagcctctcgagctctctactccactcgtagacctcgtcctcctctcctcctttcctcctgtttcagcctccgtgtagacaggacgcaaacgcaagtcagcagcagctcgtttgtcggagtggcgatgcgtggaggtggcagggcgctgcggttggcgactcggtgcggtctgctgctggtgaccgcgcggctgcgcctagccggcccacgcggagacgcggcgtcgggctggtggcgcggctgcgctcgacgggagcaggcggcgtggctgcgggcgtcggggcacgggctgcgggagcggcggcgggctgcggcggagaaacctagctccgtataccatgttgattttctggtagatgagctagaaaagacaatctcagttgcatcaagggatccggcatactatggacttgatgaagttgagctttccagacgaagaaactggactggttcttctcataagcaggtcggtacagtcaagagagctattgaaaagggcaagagcaatgcagcaacttcaaaataccaggatacaagcaggaccaaccactattctgcccaagataatgatgactttctttcttcagaatcagatagacagcttctactcatgaggcagcaggatgaagaacttgatgagctcagtgaaagtgtccaaaggattggtggcgtgggactaaccatacacgaagagctgtctggacaggaaaggatcctaaacgacctaagcttggagatggagactacttccaacagacttgatttcgtgcagaaaagagtggccatggtgataaagaaggccggcatcaagggtcagatcatgctgatcgtgttcctgattgttctgttcatcattcttttcgttttggtgttcttgacatagccaagtgcaccagggtcctcggttttctctctcatttgttgtgcctccctagtacgaacactagtaaattggtcgcgctccgcgtgagttgttgcttgatgtgcttacataagatgtagaatcttgttgctataggcatgtatcaacaggtgctagcagcttgcagttctcctaacagaaacaggtcgaagcagattttttgttctccaagtgatcagtttgtccaaggttgttaggctttccgtaatcgcttcgagtttgcttttcaagatcatcattcacatgttgcttgttagactttggctcaacataaggaggcagcatggattctttatgtttgcaacatttagcttagtgtaaggagccttgtttctagtggtaccaccacccggtatactaagaagactcaatgaacgcccttgattctctgggtgctgagctcttacccctgaatctgcatgtctcccattgtgttcatgaccaccaggccattgagatcaagttctactacctccatcagcttcttttccaaagggcgaacaactcttctgtttagcttctgaacatccttttttgggtcctgttagtgtccacaggagacactggtttatgcaaatgttcattttcaacagacacatcaggttgttgcttcctcgaattcttatcaattgtatggtgtgcgttagcaacagaacgaatatctttttggatcaacagtatctccactttatcagtatggtgtgcagg

SEQ ID NO: 243 - DNA, 1061 bp, Zea Mays
aaggtctaataccgaattatcggaaataatgttgattacttaaaaacgattaacgaattttgattgcgtgattgcgtccgcctccttcaaccctatccacatctggcacagaggaaaattggctacggtacaaaacaccgaggcatcgatggactcttccaccagctgacagctatgatttcccctgctcacctcgccttcgccgccgccttcctcctcgtcgtccggtcgtcggcgcctggcgctgctgccgcccgcccgatcttcgatggcaagccatccccctccgaggccaccgccactgcgaggtggctcgccgcccagaacacgtggggtgtcctcagcacaatatcaagtgacttaagtggagctccatttggcaatgtagtttcatatagtgatggagtaccaggcgagggccgtggaataccctacttttatctgacaactctggatcccagtgcaagagatgcactggaagatgaaaggacctcttttacccttagtgagttccctctgggaacttgtggggaaatagatcctgaaaaccccacttgtgcaaaacttactcttaaatggaaagttgaagatggttgaccttcagtcatctgaagcagatttggccaagtcagcactttttaccaaacatcctgaaatgaaggattggccaaagaatcatcatttcaaaatcttcaaaatggaaatcgaaaacatattcttgattgattggtttgggggtcctaaacccatatccccctcccagtaccttgaatttggaagaaatcagggctcattgatgtactcataagcgaagaatgcttcatcgatcaatatcccgtctgtgtatgctcttctcaaaaatgaaatccatattgcacatattgtaaagacatctctgtgcacggaataaacctgtagtgttattaaaatgaaatccatatggcacatattgtaaagacatctctttgcatagaataaagttttagtgttattattattgattatgttgtttaattatcacatcttcgtgaacaattactttacaaaaaagaagtctacag

SEQ ID NO: 244 - DNA, 1328 bp, Zea Mays
atgtttatctcttgcgcgctcctcttcttcctccctggcgctcggtcgcttctctctggtctccacgcgcaccgcgtccagctccctcctccagctgtgtctgctgctcgccccagcctggagcttcgctcggcttccaactccggcgcccggccgagctccctgctcccactctttatcactttatatggttggagcctggaggtagtcttcggcctcaaaacactagcagcttgactatatagaatgattaaatttctgaaaatgtttgattactaccttcacttcagtgtcgttagatgtaaatatgtaatacatgattatttgttcatcaacttaaactataacttgttgagggattttgggaaacaatgtgagcatatcttcgcttatttcagaatatgcaccagggctatcccaaagaaacacttgtgcgtttccttaaggctagagagtggaatgtagcaaaggctcataaaatggtaacgtttcatacaagtttctcaacagtgggtgaaggaccacgaatttaattaataatatgtttgtttctatagattgtagaatgtttgaattggaggattcaaaatgaaattgatagtgtgctcgaggtgagtcatcctgtctagaatttaatccttccagatattactgtatatgttaatcagaaagctaacgaaggttcccttaaagttctacgattctggtcttctcctaatcatttctcattttgattgtttattttattattgcagcaataccactctcaataatctgcctatttgtgtttgtttgtatagcaaaattcattttctttttctgatcaatgtttgctctgtccatctgtagaggcctatagccccagtagatttatacaaatcaatacgtgattcacaacttattggcctgtcacgatacacaaaggagattcttctgtacaacttcgatggtggtacaatttgttcagtggttattttgaaagaatggcttggcatccatcgcgtcgctgctgctgaaatatctaaagtctgtggtctcccaatttttggcattggtgttgggcatagcacatatgacaaagcttcggctatagctacagccaaaatcataaaagtgcctggtttgaagctatcagcactaagccaaataaaggtggctgaattttcagatttggaacagcgtctaagtctgaatttccaaagtagtttcttggacagttaacatcgcggatcctttgcacgatgcatcattttaaataacacggtgctgcgaaatgaagtctgttttcactctcatgttcatgttcatgcacaaatatggaagccaca

SEQ ID NO: 245 - DNA, 862 bp, Zea Mays
aaggcaagcggatttcattctagttctagcgctttgtcttgctggcggtcgtgctcgtgcacctagctaatggaccctgtgccattagccggttgggtctttgtggtagaggacttccgctttggcaggaggcccagcccgactagggttctgtccaccttccaggccctagctccggcgtctctagcgatccccaaaacccactccgccgcatttctgccgacttggccggattggtcgcttattgagatggctacgccacttatagcgggacttgcaattgcagcaactgcccttgctggccgatatggcgtccaagcttggcaagcttataaggcaaggcctatagttccaaggatgcggaaattctatgaaggtggctttcaacctacaatgaaccgaagggaagctgcattaatccttggtgtcagggaaactgccaacgcagagaaggtaaaagaggcgcacaagagggttatggtcgccaaccatccagatgctggtggaagtcattaccttgcgtcaaagattaatgaggcgaaggatgtgttgtcagggaaaacaaaaggaggtgggtcggccttctgattgtagaattaagaatgcactctctgctagaaggataattttgtgcctctaaatttagcattagaagatactgtagaccgcagtttagtcttggtattgcgaaaatttctgggcaaagcatattgggccttctgtgaagtagttatccagtgcttattatttattaatactctcagctgtgcctgcttctataaagatatacatgatgaaggttacatcacaacatgtttcttcacaactaagtctcatgtcgtgggatcttcattgctcttcg

SEQ ID NO: 246 - DNA, 1575 bp, Zea Mays
aacaattaggcccgactagcacaacaagcggcacgcacggcgttaacctgcccagcgtgaaataattgctacctatttctctcgccggcgacgagcctccgcggaaaccagtgccaagccagagagtgcttctttctccgccagactgctgctccgcgcgagaagagccaccacggagtctgcgtgactcgggacagtggagaaaatcagcggcacagcgtgggtctcgcgacctccagcgaacgagatccctaagtttcgatccactgtcccagtggatttgggactgcgatggaggagcagttcatcctccgcgtgccgccatccgtcgcagagcggatcgagcgcctcatgaatgaatccgccgcctcctcctccaaccccgacgaggcctccctggacctctccttctcagaggatggaagaaatggcacatttatgatcggtaatgagagctttcctgcatctctcttggatctacctgctgtggtggagtcatacaaaacatatgatgattctgtactaattaaaactgctgatgttggtcagatgattatggtaagagaagaaaatgatcctgctccagaaggagtcgagtacaagcatgggcttactcctccaatgagggatgcacgcaggcgacgtttccgcagagaaccagacttgaacgcagagctggttaaccaagttgagaagcatcttatcagtatcatgcatggagtatctgtcagtatccttttgttttcttcgcctgccacttgctaaatggtagcatgtgttgtattctagcagctgggaaaaaatggtatatagtactcttttttactatttatttaggtaatagttttctcagtatttttctggctactaacgttggttgacaaacggtttgcctacatggagctccctccctttttgacaagcacaatgacgtgtttctttgaatcttgtctgtatagtggtttcagatagatgtttaatgttttgaaagctacacttgaacaccagttatacttctgaattggttgcttataacatcgataagtctgacatgcatttggtctgttggttgaaggattctctgcctacagctttgtttcaccgttttttgcgaactctgtagatggcatttttccttgactactagtagaccagaacgccagtgcgacaggaggcgaagaaggtggtgatcgtaagaaacctccagtagctcgtgcagcaaagcagcctggggttcaggagcccgccgcgaatggagaggaagctgatcctgagaggagcgacagtgatgattcagataactgaaatggaggacctggactgggtgcagcctcagtggtccaggcgagccatgccaaacttcgcaatttgaataaatcagaatgtatatatttgtaacaaacaatgtgtttgttgttcgctgaagcatgtactgtcacggtaaacatgatgtgacgctataatgccaaacaagatgatgttactgcatgtactagcaaaatagttataaataacaactgctaagtagcattttattggatttaatttgatttgaactcgttttaaaatcaagaa

SEQ ID NO: 247 - DNA, 2544 bp, Zea Mays
acacacagcacacaggaaagcacaccatcttctgtctccataaacaagctacctgcagcgatgtgctccactgcagtgctgctagttcgcacatgcgttgtgcttgtgtgtttggccgccatggcgcgagcgccggccaaggtccatgctgccgccggcaccggggatgggctccttgttatccctaccaccgcctccctgtcgcactgcccctctcgctgcggggatgtacaaatctcgtacccgttcgggatagggccgggctgcttccgtcaaggcttcgagctcacctgcgatcaaacagctccttctcccaggctcttcttcatgtcggggaacagctcgattcaggtgacttctctagatgtcggcaacaatatgggttgggcttcagctgttgggttcaacgtcaccatgagcgcaggcgtggacacctacaccaagtcttgggaggcccctactgccactggtgccagtttttatgcagataataataataatctgtacactgttggatgtggtgtctacgtctacgtgttgggtgataatatgacagatatcattggttattgcacgagtatttgcacagataacagagagatcatggagagcgcaaacactggttatggtgtctgtgaagggttaggctgctgcagcattccaatacgtggccgccaaggcttcactctcaaactaggtcgcctcaatagtaccattccacagttcggtgaagcgctatccagtgtcaagattatcgtttcgcaaaactataaattcgttactgatgatgtttacgcaagttgggtgaatacaagcaacgttaatgaaatgatattttacattacaatcatggaccaaccgaactgcgcgagtgcccagtcccaagagaacaaggatacctacgcatgcactagtgaaagcatctgctacgacgttctaccaccggcagtatctcaaggaggctacatttgcaagtgttcccatggcttacaaggaaacccataccttcaaaataactgtacagatattgatgagtgcactattccaaataaatgcaatggaatatgccacaattttaatggaggcttcaattgtacaagttgccctcatgggaaagagtatgatccaaaaaaacaaaaatgtgtcatgtcagctaagcagtgtattctaatttttgggattgtaattgggcttgtttgtggccttggatccataagttttgcacttggtgcaattgtactcaccggtaagtggaaaaaaggcatccaaaggagaattcgaagagagtacttcaagaaaaatcaaggtctactcttggagcaactaatatcgaatgaaaatgctacaaccaaaacaaagatattcactttggatgaactagaggaagcaaccaacaagtttgatgctactcgtgttctaggtcatggtgggcacggcactgtttacaaagggattttgtctgatcagcgtgtcgtggctataaaaaaatctaaaatagtggagcaaatagagatagatcagttcatcaatgaggttgctattttatctcaaatcattcaccgcaatgtggtgaagctttttggttgttgcctagaagatgaggattgcaacggaagcatcaggagcacttgcttatctacactcagctgctgcaataccaattttccatagagatgtgaagtcttctaatatactcttggacgacaacttcactgtaaaggtttcagattttggtgcttcaagatctctatcccttgatgaaacacatgtggtgacaattgtccaagggacattcggttatttagatccagagtattattatactggttctctaactgagaagagcgatgtgtatagttttggagtgatacttgtggaacttttgacaagaaagaaaccaatttttatcaatgaatcgggtgccaaacaaaacttatctcattacttcattgaaggactacaggaagggactctcatggaaataatagattctcaagttgtggaagaggcagaccaagaagagattaatgatatctcctcacttatagaagtgtgcttaagatccaaaggaggacatagaccaagcatgaaagaagtagatatgagattgcaatgtctaagaacaaagaggctacggaataaaacacatcttttgattgaaaagggtggagaaatggaacctttgttatgcgcagaagctcagcacccacatgaacgtatcaatccaatttataatgaggaacatttaataattccagtgatgtctgggtgctacagtttggagcaagaacttgcggcagcatctagtatggttcgctaacttggtatttgcttggatgttggacacatctatagtaaccatctattttcagagaggaactatggtatattttgttcccttcgcataagactatggtatatatggtgcgtatatgtatataatatatatgacattgctatgtttacatataatgtaatttccgtatttcaaactgtaatgcgttttagttttgttttgattacaaatttggtactctaattgta

SEQ ID NO: 248 - DNA, 1483 bp, Zea Mays
cacttgtttaagccgcgacctgcgtcccagcatcagtcagtgcatcagcattcatcgccccctgcctccccttccattcgccctcctcccactccaccagctcctgcctgcctataaacccagggccgccctttgactctccttccctgtccagtggcggggccgcttcccttgcgttcgcggagagtctgtctgtctgtctagctagctagctagctgccgagagcgtgaggaggaagggggatccatggcggcggagaacgaggagaaggagacggcctgcgcggggtacaagcacgggccgccatgggtgttcaaaggcagcgcattgtaccagctgcatttggtgaaggcgtcgacggcgcgggccttcgtgccgcgggacctccgcctggttgaggccttcggctacacgctcggcggcatgttcctggcgcgctaccacgacagccctgccggcgaattcgacgagctcgtggtgatcgccggcattgtgtggaacccgccgacctcctgcgcgtgagttcgccttcgctccgcttcatgcctgcattgcattcgcatcttctgtggcctagtttaatcccttgtaggcttcttcgccgctttctcctgcctgattggcctcgatcagggaccccccaacagaaaagaacaggggcaacttgcagtatgcgaaggggaaagaaaaaaaacgaaaaccctcgtgcttgcgccagccggccataaacaagcgccttatcccccatatgattgtacttggcagcacggactgtgccttgcttctttcaattattcgtaggctggggaggggtgtccgggtgcgctgcacttgctccgcgtggccaacttgctgccctgcgcagctcagctacagcctacagccgcccgtggtttcctactttcctccgtcttcgaaatgcagcagttggatggaactctgaatagtggtgggctgccagggtgctggtgaacagcgtcgaagcctgccggcacggccgcaaggaggtaggactgccaagccatgtcgccacattctcgtcaaagaacgaggctgcttcgcttggggatagaccgttggctagaccaaacagcttcctcaacatgctggggatcgggtcgacagccttcgagcaagggaatggccgcgagattgaggtttcagagtccaagggcggctcgtctactcggcatctgtgcaacatcagcctgccatttaccggatcacataaggaccaccagtgggcgggcccagcaatcagaatgtcactcccgagtttcaggcacgtctcgcttgctttgcgaatttcagcggacgtacagtggaccatcctgatcttctcaagtactcctgtcaagtagaatgcaggtgatgacaaaaaacaaaactctgtgaacgtcctgggctagtgagctatccattgatggcgtacgatctacccgtattcgacgcactgttgacatgtttccttccacagggtgc

SEQ ID NO: 249 - DNA, 1185 bp, Zea Mays
gcaccttgtgctgagcactgggaacggagtcaatggcttcactctcgatccttcccttggagagttcattttgactcatccaaatatcaagataccaaggaaagggaagatctattcagtcaacgaagggaacgccaaaaactgggatgggcctacagccaagtacgacgagctagggggctcgtttctgtccaaaaactactactgtgatttcgtaacaagccaggctgaattttatgccgtttcagattcgtggagaaatgcaagtatcctgaggatggttcaccgcctagatccttgagatatatcggaaggtgatccattgctcgttctcgactgtgtataccggtgtctcacagtttgctttcttctgcggtcatgaattgaatgtgtctgaagttttattaagaataatagtgcttgctcaagctattggtatctactcgtttttttcttctttttttttgtttaactaaaacggttgaatctatgttgttgtggacttgtggtccttgtgaatggtttgcagtatggttgctgatgtccatcgcaccttactatacgggggcatatttttgtacccagcagaccagaagagtccaaacgggaaactacgcgttctgtatgaagtcttcccgatgtcattcctgatggaacaagctggaggccaggctttcacaggcaaacaacgggcgcttgaacttgctcccgctaaacttcacgacagatccccagtgttcctcgggagctacgatgacgttgaggagatcaaagcactgtacgcttcaatgtcaaacagcggttgacctttctgcctgaggaaacgagcgagatcaaaagcaccgtacgcttcagagtcaactgcttgatctttatagattgtaataaaataataaaagagtttgtaaaaaaaaacaacaacactgcttgatctttctgcatgaggataaaaagcgcatagtttccccggttggatatatccatcagatatttattatgttgttgccttctacacaaatttaacgtgctttcgtgattccttaatgcaactttggattcatgtacggagggagtttatgtgaagacatattacttggtgcagtttatctccaacaaaatacaaaaaaaagaaccttgtgcagttatacttcagtcttaatgtcgtgttcatcggatttgtgacgc

SEQ ID NO: 250 - DNA, 952 bp, Zea Mays
gcccacttggcccatctccccagccgccgtccctgcactatcctccctcaggccgccgccgcccctggtagccgtcgcctctccttgctctgctcctctctctcccaagcggctctccctctatctcctcgtttctctcccctcctcttctacagccgctgccaggcaaccgaccgccgagcagcgcagccacccgagccccacgcccgccgcgccaggaaccagcgcccctgctctcgccaggacgccaggaattgctctttctatagcaagtttatgagttcagtttatattccattgaatatttgttgcagtgaagagaaatgagagaaagccttcggttgtagccttcagtttatattccattgaatatttgttgcatccgactcatctctgtttcgattccatccggtttggctcattttttaatcgagtgtgttgtagttttgtaccctaatgtcgtgggagtgctaccgaagtactgatagcatcactttaatttcattagctccgtcctggcaatcactttgggaaggtggtcagtggaataactttgcttaaaaagcttgaagcagttggtagtgaaactggaaatccttcttatcaagtgaaaattgtagactgtggtgaagtttccaacacaaattctcaggatccgctaaagggagataaagtaagctcaaagacagataacagcagttcagacagtgaaaagggtggccatcgtaccaagcgttccttgacgaaaggcttcaatgcagcagttgctgggtgcttctttgccattgaaactgtattaagacctcttaaagcagaaaattcacctccatttacgactgcaatgataatattggcatctgttatatcatctactgtttcaaatgttttacttggagccagaccagcttttatagtgccagcctatgagctaaaatctgctgccgctctgact

SEQ ID NO: 251 - DNA, 2460 bp, Zea Mays
aaccctctgttcttttcaaaacaaaaaaccaaaacccttctgtggaaaaacgtaaaaccaggcgcgccccgcaggaattgcggtcaggagaacctcatccctctcgccttcaggttctactcgccctctccccacccgcagcgcctcctcccattcccccaacggacattgcctaggaggctaggacagaaccacccagagcgcacaaccttacccgaatcgccgttgcatggaggccgtgcgcgcgtcggcggcgtgggtcgccagtcgctcctcccatgtcacggtcgaccttcaagataaggacttgagctatgaccatttggcttctggactgaagtcagccttggagaaagacaaaaatgcccttgattcagatcgtctccagaattacactggtatcttccttctcattgggatcttgttaggtttaagagttccttcattagcattttctgaacttctgcttctggttcaagggaatgcttctcagcttctatgataaactgtcgttttctggaaatgtcatttaactgtgtaggttgtggtaccagatgaatgaacagttacaagttgtgcttaactggatgttatctgatcctctcagtctgagtacccttttcatccctttattcttctgttgatagtgaaagggcctttaactgagttggtttctgttgataataataagctactcattttctaattttcttgctgtgcttctaattgagaaataattacttgcatctctgctatggatcctcataaaaactgctaatttggaaggacatttgcaaaatgtagggccccagctccgccaacttctgaactggccacgaccactgccaattgaggaggaaagagtacgccttctccacgaggttgggcaggaacttaaaagaagctttggaggtcaggctgctaatctagtgaagtctgctggaaactctgctgcgactcttattgaactgattactcgacattttcctggtttccgggaccattcactctacaaggggcaccaggttttcctgtacaagagagcccagatctttgttgctgatttgtggggcgccttcaagggacaaaactatggcgagttccacgatatcaattccatcaccatatttgctgactacattgttccagcggtcctgagggagcttggagtacttaaatatggctcgaatctatcttgctccatcgactcgaacagtgagatagtgcctggaagcgaggaggaagtggagatacgcgcgtgctccatctatgcagtggagaagatgagggacctgatcagtaagaagtttggaaagcagcttctgagcatcgacattgatctctggctctggtcctgcggcgtgcagaacatggcgctgtcacatcaccgcaccctgtcgatttactactagacagggcagtggcggaggacggataaaaattttggtatggcttgagctatacctagccacaatggaccctccgcccctgagacaggcagtcagtcaggaagctgaccctgctggtgcgctcgttcagctggccgggcgttgtcgtcgcttgttcgtcctaaccataacggtgcatgtaggtgtcgagagttttgtctccttgggaatgcacacaggtgcaaggtattgtaggcccgtcccatgaggatgcatggggttggtagtacaacatttttttttgtgatttagagacttgaactgctgcagttttcacatgaatgttatccctaaggacaaggcgggagagcgagtgtttctctatctccagaactgatcgcggcgtttattttctgtttccagttactgctccaactctttctgaatcttgctgaatttgagtaagcgcactgcgatcagtatacaggtaatgtatcagtaagagcgtacagcaaggaaacagacacctgaatactcggacgtcaaacttgtctcctgttgcgggggagacaagacaaccctgccgaggtgtcgagagaccagcctcgcagtgacaaaaagagtccagccgctcacggcccgatggaggagcgaagcaacctcggaaaagacatgtcgcgtcgaataaatgctacctcgtctgcatccaaggctgacctgcacacctgcaccggccgcccccggtcctacctcccacggtgacgggactgtccgaagcggccagcggcctagctttccgcgcctctgagccaatgcctgcgtgcagtagagtagagcacgcggcgccgcctgcgcgtcagcgtgtgtcggggacgttcggcagcgtggcaggcggcttgatggactggtggtgtcagagctgtcgcctactcgcctcgcccagctggtgccggcacgccggagttgggcgtcggcagtgggctgtgggccgccttgggcagaagctgggtacagtacaggtactcctacctggctggctgccaggcagcgcagaaaagcagtaggcggcgta

SEQ ID NO: 252 - DNA, 710 bp, Zea Mays
ataaaatccgtatatacggcttggtgagtgttactgtgtagcccaagattcaaactctcccgtgcacaattttactgagaaactcctcgggggtaaagacttccccttcgctctgctgtcccgtctctttgattcctgaaccccacccaggcattccgcagtggctggccgtcgctggctcgccgctacttcggccctttcgccggtgacgataacccaccagttatccgagggaaaattttctatgtgctgattggaatggcgagtacagcatgctttgtaataattgtcagtaagaatgatatcccaatctacgaggcagaagttggatctgcacccaaaaaagaggatttgtcttatcaccatcagtttatcctgcatgctgcgttagatgttgttcaggacctagcatggaccacaaatgcaatgtccctgaagtcagttgatagattcaatgaccttgtggtgtctgtttatgtaactgctggtcataccagattcatgttgcttcatgactcacgcagtgaagatggaataaaaagcttttttcaagaggtccatgagctttacatcaagatattcctgaacccgctttacctgcccggctctcgcatcacatcatcccattttgataccaagtgatggatttttcaaggttaaagggcgcgactatctctatggagggagatgatatcttaagcagattattg

SEQ ID NO: 253 - DNA, 2155 bp, Zea Mays
cgccatcccagtcctacgactacgaggcgcccccgctctcggaattttcagcgggtcgcgtcgcgttctgtgcggggtgtcgcagtgccgaggtataaatggcggtcagtccctgcggccgcagcagcaactgaatcatccgaggaaggagggtggagggaggagggattttgccgatcacggtcaatttgtcagtttattgagacatccaacttgcatgagttgatcaacaagcccatccctggttccttatggaggcatcatcttccttgcgcttccaagtttctcgttttagttcgttcaagatatggctatgcctttttctggtactcgttcttcagaactgcagcccagcactttcagattcaccatatttggtcggtatggggagctatgacataacagggccagcagcagacgttaacatgatgggatatgcaaatgctgagcagattgcatcaggaattcactttaggctaaaggctcgtgcctttatcgttgctgagcctaacggcaagcgtgtcgtgtttgtaaatcttgatgcttgcatggcatcacagcttgttactataaaggtgcttgaaagacttaaagcaaggtatggagatctttataatgagaataatgtggctatcagtggaatccatacgcatgctggtcctggtggttatctgcagtatgtagtttatattgttacatcacttgggtttgttcgccaatcatttgatgtgattgtcaatggaattgagcaatgcattgttgaagctcacaacaatctccaccctgggaaaatctatgtgaacaaaggtgacctccttgatgccagtgtgaatcgcagcccaagtgcatatctaaataaccccgctgaagagagaggcaagtataagtacaatgttgataaagaaatgaccctcatcaagtttgtagatgatgagtctggtccgattgggagtttcaattggtttgcaactcatggaacatctatgagtcgtacaaattctttgataagtggtgataacaaaggagcagccgcacgtttcatggaagattgggcagaacaaaatggcattccaaaacaggcagctcatgtaaatcacgatggtttggaatcttcacacatgacctctcgacttccgagaagagtctccccaataattcctgaaccaaatgagataactgatgacttagtacaattggcgtcatcctacgaagcctcaggtggacggcgattatcaagttcaagtatcaccaagcgtatcagaagtacccaacaaaacagacctaaatttgtttctgcattctgccagtcaaattgtggtgatgttagtccaaatgtcctgggaactttctgtatagacactggccttccttgtgacttcaatcacagcacatgcaatgggaagaatgaattatgctatggacgagggccaggatatcctgatgaatttgaaagtacccatatcattggcaataggcaatttcaaaaggctgtagatctttttagttcagcttctgaagaaatacaaggcaaaattgactacaggcatacttacctagatttctcaaaacttgaagtgaatgtccgtacaagtacaggaagtcagcaagttgtgaaaacatgcccagcagccatggggtttgcctttgctgctggaaccacagatggtcctggagcttttgactttaaacaaggagatgtcaagggaaaccctttctggagattagtaagaaacttacttaagacaccagggaaggagcaagtcgaatgtcaagcaccaaaacctatcttgctagacactggtgaaatgaaggaaccatatgattgggcgcctgcaattcttccaattcagatcataagaatcggccagctggctatcttgtgtgtccctggagaattcacaacaatggctggcaggaggctacgtgatgccgtcaaagctgtacttacaagtgacaacagtggtgaatttaataacattcatgttgttcttgcggggctaacaaatacatattcgcagtatattacaacttttgaagaatatgagatccaaagatacgagacccctgggtgcattattgcaagctgttttaaccgccgcggaccccttatatttagcgtcacaaagggacaattctacatttttttcatctttgg

SEQ ID NO: 254 - DNA, 2044 bp, Zea Mays
acgaggcggagtcgccgcacgccctccgctttccgagtgacagccgcactcggccctcgtagctggaggagtgggggcgcgggagagatgataaggatggcggcagcgtctcagccgccatcgtcagccttgcggatgcacgggtgcggcggcgcggcttctgcgtcgtccgcgcccgtgcgcctcttcacggagtcgcggggtagagtcgtggcgtcgattgggaggggcaggaggcggaggcgcgccatctcgtgctgctcgtctccagacgcagatggccctcgccccgccgcgccaccgacctccgcagcgccttccgacgggtcgatacagctctattcccagatcgagagggtaatcacggaggcggcaaagcagtcccgggaaggctggggttcgactggagattggaccgaagtcgagggatcatgggtgttgagaccgaagtccttggagccatcatttgttgtccactttgttggaggaatttttgtcggagccgctccccagatcacataccgcttcttcctcgagtgtctcgcgaacaggggagctttggtgattgctacaccttatgcgagcggctttgaccatttcttcattgcagatgaagttcaatttaagtttgacaggtgtttgagaaacttggatgagcctgtaaatgatctcccaacgtttggtgttggacattcattgggatctgttatccacatgttgattggatcaagatatgctgtgcagcgaagtggaaatgtactgatgtcctttaacaacaaggaggcaagctctgcgatcccactattttcacctgtaattgttcctatggcacagagttttggccctatattctcccaattggcatcgtatccaacaatccgatttggggcagaagcagctattaagcagcttgagaatctaagcccacctgttgttaagcaacttctacctttacttcaacaacttcctccgttgtatatggacctaataaaagggcgggaggacttcattccaaaaccagaagagacacgccgcctgataaaatcctactatggaatttctcggaatctcttaataaagtttaaagatgatcaaattgatgaaacctctacccttgcacaagtactaagctctgaagcagctattagctcattgcttgatatgtcaattcgatcacttcctggggatcatgggttaccattacaacaggttcttcctgatgttccaccagcaatggctgatgcagtgaaccgcggaggtgaacttctgacaaatctgacaacaggcacaccatgggaggctgttgctaaggaggttggcaccactttgggtactgactcaggcattctacgagcacagatctcaaaagacgttgaaactcttgttgatgtaattgcttcatggacatcttcaaattctggtccaagactacttcgcccatgatcacccagcagtctgcgtacagaaatgttagtaacagtgaagagcaacaggatttaatgatgcattatgatacgagacgttggcaattaaggagttatgttaccttggccggtggaggaaggatgcatggcactggcaataggagcttttgtggacaaactatcttaacccattggcaaaggcaagatctccttcccagatattttagtctgtaatcaatttggattaaaggtaaacaatataggcttataaggtgaactaagtaagttaggatatttctccccactaaatgtattaagatcttatattcaagatgactgagtaagagatgctagtaaatggacaatgaaattacgtatcttatattcaagatgactgagtaagagatgctagtaaatggataatgaaattaccctacgtagttatacataataagtattttacatgaaggcatagagcgtgtttggtttagcttcctgaactagattcgctcataaaaatctagaatctcaaccacacatagattcctctagttcaattcataatcacctcctacctagatttttcagattcttgttatccatgttacaaggtgccatac

SEQ ID NO: 255 - DNA, 2310 bp, Zea Mays
agtccacaaagcccagcaagcagcccaaccgatcccaatcccaaattcccaacacgaagcccagccagcccttccccactaggctagctagctagtagtatcttttttagtacgtggccagccgacaggcgcttgtcggagtcgagcacttgagtccccttctctccttcccttcacctcccgattgccgccgccaccaccaggcaccaggcccaccaccgcgtctcccaaccccaagcactcgacgccatggtgtcggatgccagcaagaagaaggccgcccagaagaaggccgccgcggctgccaagaggggaggcaaggccgcggcggcgtcctcctcgtcgtcgtctgcggccgcggccgcggccgtcgacaaggcggcgaacggcgtcgcggcgctcaagctatcggaccggacctgcaccggcgtcctcgcgtctcacccgctctcccgcgatatccacatagagtctctctctttaacattccatgggcatgaccttattgtggattctgagttggagctgaactacgggaggcgatacggtttgcttgggatgaacggctgtgggaaatctactcttctcacagcaataggctgcagagaacttcctatccctgaacacatggacatataccatctaagccatgagattgaagcttctgacatgtccgcactgcaagctgttgttacttgtgacgaagaaagagtgaaattggaaaaggaagctgaaattttggctgcacaggatgatggtggtggtgaagctttggaacgtgtttatgagcgtctagatgcaatggatgctggaactgcagaaaagcgggctgctgaattattattcggtctgggctttaacaaacaaatgcagacaaagaaaactaaagatttctctggaggttggcgtatgaggattgctttggcaagagcactttttatgaatccaacgatccttttgcttgatgagcccacaaaccatctagatcttgaggcttgtgtctggttggaagagacactgaagaaatttgaccgcatacttgttgtcatatcacactctcaagattttctaaatggagtgtgcactaacattatccatatgcaaagcaagaagctcaagttatacactggtaactacgatcagtatgttcaaactcgctctgagcttgaagagaatcaaatgaagcagtacaaatgggagcaggaacagattgcttcaatgaaggagtacattgctcgcttcggtcatggttctgcaaagcttgctcgtcaggctcagagcaaagagaaaactcttgcaaagatggagcgaggtggtctcacagagaaggttgttagggacagagttctagtgttccggtttacagatgttggcaagcttcctccgcccgtgcttcaatttgttgaagtcaagtttgggtatacaccagataatctcatatacaagagccttgactttggtgttgatcttgactctagaatcgcattggttggtcccaacggggcagggaagagcactcttctgaagcttatgactggtgaccttgttccattagatggcatggttcggcgccacaatcacctgcgcattgcgcagtaccatcagcatctggcggagaagctggacctggacatgtcagccctggcttacatgatgaaggaataccctgggactgaagaagaaaagatgcgtgccgctgttggcaggttcggcctgtcaggaaaggcgcaggtgatgccgatgaagaatctttctgatgggcaaaggagccgcgtcatctttgcatggctggcatataggcagccgcaactgctactgcttgatgagccgacaaaccatctggatatcgagaccattgactcactggcagaggcgctgaatgagtgggatggtggtttggtcttggtgagccacgatttcaggctgatcaaccaggtcgctcaggagatctgggtgtgtgagaatcaagaggtgacaaggtgggaaggcgatatcatggatttcaaggcacacttgaagagcaaggctggtttatctgattagaatgcttttctagtaaccatgaactttttaactctgtatgatgaagtccctgttttacagtagcgaactatcaaatatactcgaatgtgtcagactcctacttccctcgcaaccatactaccttgtactacctgaaatttttatttatatatatatttgaaatgttattatgtgttccgtaagctttgtaggttttgtaagtttggatttgtcaaagttactgcatattatgatcattgtgaacatacaacttaactttagtccaaa

SEQ ID NO: 256 - DNA, 2165 bp, Zea Mays
cgggacctcgcagcatctccctcgccccaccccaacctccacctccaccgccacccattgaaaagcagagcggcagactggcagaggcaggcgctctcggctctcctcgtggacaaaaccaccggctcccgatatccaaattggaacaggttttgaagggtttgtacataacgatgaaaggaaagagagcagatctgatgcagacaactcagaaggagataagaagactaagatcggatctttcaagaaaaaagcaattaacgcggggaacaaattcaggcattccctgagaaggagaagcaaaaagaagaccgaaaggggggattccatcaaggatataagggacattaaagaacttcaagatgttgagacatttcgacaatgcttaattgacgaggatttgctgccgccacagcatgacgattatcacatgatgttaagattcctaaaagcacggaaatttgatgttgagaaagctaagaatatgtggtcagacatgcttaaatggaggaaggaattcggggttgacaaaatagaggaatttgagtacgccgagttagatgaagttaaaaagtattacccacaattttatcatggggtagataaagagggaagacctgtctacatagaattaatagggaaagttgatgcgaacaagctagtacaagtgacaactctagatcggtatgtgaaataccatgtcaaggaatttgagaggtgcttccagatgagatttcctgcttgctccattgctgcaaaaaagcacatagattcgtcgacttctatttttgatgtgcaaggcgtgggtttcaagaacttctcaaaatctgccagggaattaatcacacgattacagaagatcgacaacgataactacccagagacattgtgccagatgtatataattaatgcgggccaaggcttcaagatgttatggagcacaataaaatcattccttgatccaaaaactgcttccaagattcatgttcttgggaataagtatcaacataagttgctcgaaataattgacgagtgtgaattgccagaatttcttggtggcaaatgcaagtgtattgaaggttgcgaaagatctgacaaaggtccttggaaggatcccaacataataaagagagtcctcaatggcgaggcgaactatggcaggcaaattgtgaccatatccagcactgatggaaggatagtcagttatgcttggccagtgcacccaaatagaaaaggcagtgatgcatctgccgagtctgggtctgaagtggaagacgtaacatctcctactgcatcaaggaacctgattacacatcctattttgacccctgttcacgaggagtcaaaattgtcggcacatggttcttcatctgttgttcatgcttctattggagaaaacattcctgttgtggacaagattgttgatgatggatggggtagtcccagatctagtccacaagctgcttcttcaggttctttgtccctgaggaatttgcatggcacatttgaaggactcagagctcaaactatcacatggctgacattcttgatgatgaccctttttgccatgctttgttctgtcccaagcaagatggctagaaggatctccaaccaatctggtgcaggtgcttgaaacgaagccgtctgagatgccgtttgaaaaggaagaattgctcaatgcagccgtccgccgtgtggatgcattggaagctgagctgatttccacaaagaaagccctttatgatgctttgatgcgacaggatgagctactcgcgtacattgataggcaggagctgatcaaatttcgtaaaaagaagttctgcttctaagatttgaccgtggagcagctgttcatgtccggagccgtttatgtgtatattggattgcggctaatatgtagtagaatgtaatgtgtccatctttagaagtgtgtaaagtatagtaggaaagaaaataggtgcgttgtggtgtgcgcctctcctccccgaggtgaatgtgtggtctagcacttgtgtgctaccctaaattgtaatcttggaagttggtgtatagctgattgcgtgctaatacgtagttgtaaatgaaatcgcatgtgctcgtgtttacatgaaaaactaaatatagcagcaccaaaaataaaaccggttatttggttagaatcatat

SEQ ID NO: 257 - DNA, 2154 bp, Zea Mays
gccgtgcaatatctgcggattgcagctgcatccactgcgcgccgcgcgtttttttttctctcctcctcgacaacgagaagtcgagaacacacacgcacatacggaacggaagctactagcccgcagccttcttcagtctcccgtcttcttctggtgcccaacacatcctcattctcagggtcgccctctcgattctccctcaagtccagtccagccggatcagtccccttcccctcctccacaaggtgccgcctcccgcagatccgaattggaatctgggccttcgtctccgcaccaccaatccggtaaatatacgcgggcaataaaaatccctccctcccccccgaaccgtaatgatagatagctgcttgcctgctccggagtttcttccgctgttctctctcgcgcaaatttttatgctgggcaaagacggtgttcttcagcttcgacccccaaaaagggcgaagctttcgcgtccttccccacacacacaaattacctgggagccgtagcttctgtttggtgcggccacggggtggaagaaatggtatgcgggatgctcgccaattggcatgctgcgctttccgtccctgcagccgcaagaggccttctcttttagatctgtgccgcgccttcctcttcctggtaccctgtgattggagccagtattgttagcgtttaatgaagctgcttttttctagccggcttttggatggtgcttactactacatcgtatcagttgccaccactctcgcgtgcttttgccttctttaggtttgctcgcagggcacacaaagccatttttactgctggaagactgccgcttttagtatctctgggctctggctcttgagtgatctccaagggaagggaagggaagtgatgggggagtgcgaggacggcaaggagtacaggtgctgggaggagctgctgccggacgcgctggggctcatcttccgcaacctgccgctccaggaggtgctcaccgtcctgccgcgggtgtgcaagtcctgggggcgggtggtcgccggcccctactgctggcaggagatcgacatcgaggagtggagccagcagcaaagcaagccggagcagatcggccgcatggtggagctgctcgtcggccgcagcggcggctcgtgccgccggatcagcgtctccgggctgccctgcgatccgctcttctcgttcatcgcagacaatgcgcgagctcttgggaccttggagatccccaggagtgagatcagcgactccgtagtggaagccgtggcgccgcggctatcgaacgtgacgttcctagacatcagcagctgcacgaagatcggggcccgcgcgctggaggcgttcggcaggcactgcaggtccctggtggggctccggcgggtgatgcacccgatcgacctggcggacaaggtgtgccagcacgacgaggcgcacgccatcgcgcgcagcatgccgaggctgcggcacctggagatggggtacatgctggtggcgacggaggcggtgctggagatcctggagcagtgcagcgagctcaagttcctggacctgcgcggctgctgggccgtggacgaccggttcctgcgggagcgccacccggggctgcgcgtcctgggcccgcgcgtcgtcgacgactgctacgagaacagctactgggaggagtgctccgactactactcggacgaggacgaggactacgacgacgacgtcgtctcgtgggggttgttcgtggacgacgacgacgactactactacgccgtcggcagcgacgacgacgaggctatctgggacgacgcgcagggcctggagaacctcgaggtgaggttctacggcggtggcggcttcggcgagagcttcgccggcttcgactggccgccgtcgccgtgacgcgtggcccgcgagagccgccgctgcgcttgcgttgcgcggaccgttttcggctcttgcttatataccgcgtgcgtgcctgagtcgttgtttgttgttcgtccccaagctttgcttgcagatgtaagctttcaatctttaagctctagcttgcagatatgtgaagtggactgctagtagtacactctagctgtaaactccggtgtttacctgaagcaaaccagcatgcaccggtgagatttcaccggcgccatccccatccta

SEQ ID NO: 258 - DNA, 908 bp, Zea Mays
atggcggcagtccagccgtccgtggagatgacgacgcagcaagggccgccagccgccagctattctccggccagggatggcggcggcggcaggagcgccgaggatgaggagaaggagaaggcggcggcgatcgacaactggcttcccatcagcgcgacgcggaatgccaagtggtggtactccgccttccacaacgtcacggccatggtcggcgccggcgtgctcggcctcccctacgccatgtcccagctcggctggggtgccggcatcacgatcatgctcctgtcgtgggtgatcacgctgtacacgctgtggcagatggtggagatgcacgagatggtgccggggaagcggttcgaccggtaccacgagctggggcagcacgcgttcggggaccggctgggcctgtggatcgtggtgccgcagcagctggtggtggaggtgggggtgaacatcgtgtacatggtgaccggcggcacgtcgctgcagaagttccacgacgtgctggtgtgcggcgacgcggcgtgcgagggcgggcgcaagatcaggctcacctacttcatcatgatcttcgcgtcctgccacttcgtgctggcgcagctgcccaacttcgactccatctccggcgtgtccctggccgccgccgtcatgtcgctcagctactcgaccatcgcgtggggcgcgtccgtcagcaaagggcgggtgcccgacgtggactacggactcagggccaccacgccgccgggcaaggtgttcgggttcctgggcgcgctcgggaccgtggcgttcgcctacgcgggccacaacgtggtgctggagatccaggccaccatcccgtccactcccgagaagccgtccaagaagcccatgtggaagggcgtcgtcgtcgcctacctcgtcaagctgcc

SEQ ID NO: 259 - DNA, 791 bp, Zea Mays
acaccacccaaaagggaagtcaagtcaaccaaaggccgcacggggtacagccctacccctcccgtcacaaatcccagcggcgccaagcccaagtcagcgcgcgcggcgatggagcggcgggggcaacagcctggcgacgcgcagcagccaggcaaggacggcgccggcgactcccctcctccaccgccaccgttcctggaggtgagctgcaggagctccggcaaggttcggcggttcgcggcggggacgacggcccgctacgcgctgcacgccatcaaccgcaagctcggccccggggccccgccggcgctgcacgtcgaggccgtcagggacggcgaggagcccgtcagcttcggccccagcgcggccctcgccgactacggccgcggctggaggctgcagaccgtcaccgcgcacgacgcgcccgggatccatcacgcgccgcacgcggacacgggcgacaggcagccgtccaaagaagatgccgatggtacggagacagtcaggggcacttgcatctacgtcgccaagatcgtgctcgcgtttgcgtttctcttcctgctaggtggatcgctcacgtacctgctggaggtgatccctgacatgctgcagactgcatcggcgcttgagttaactgattttttctacgacccgctgactgaaaatgtatgacgcatgtatcatttcattagcattaattatatggcattgtgtggggctttgtaacttggtcaattttaattcgtgtcgctgcagctcatgataattcatcgtctttgttattaggtcta

SEQ ID NO: 260 - DNA, 1980 bp, Zea Mays
ctggattggctgcaacgctcccttcaccagccgcaggagcatcgccgctgctgctccactgcaacgccgccccttccgtctccttccgccaccgcaggcgttggcagcggccggctgctacacggcacgatggccgcgtcgcgcagctgttgctgccggtcgcgcgccgctggctgccggcagcagcgcctcccggagtcaatggcgcgcgcggaggcattgcggcgtcggggtcaggggcaggggcagtggctggggaggcgccgtacagaggcaacgaggggcaggggtcgctgtggatggtcttcctcgccacggcggtggtcgtgtgcggctccttcgagttcggcacctgtgtcgggtattctgcgccggctcaagctggaattgtgagcgacattgggttgtccaactccgagtatggtgtctttggatctgttttgacaattggagcaatgattggtgctgtgactagcggcagcctggcagacattcttggacgcaaaatgaccatgcgatttgcagcagttgtaggcatttttggctggcttactgtatattttgccaaggatgctatgatgctctatgctggaagagttttgctggggtattgtactggagttctttcctatgtggtgcctgtgtatatatctgaaatagcaccaaagggtatccgaggaggccttgcaacctcaaaccagttattcatctgttcagggtgttcggctgcttacattattggagcacttgtttcatggcgctgtttggttgtagtaggattgataccttgtgctgtcctacttgttgggcttttcttcattccagagtctccaaggtggctggccaacatagggaaagaaagagaatttcatgcttcattacaggagtttaggggggaagattctgacatttctgaagaggctactgagatcaaagttatttattctgaacatagcttccatttatcaaacaatgtagaccgatattcaaactaaacattctgtccaggattatataaaatcagttcgtcgattgcctaaggccaagattcaagatttatttcagagaaaaaatatgtatgcagtcacgttattgtttcctgaaaagtacaaaagaagttcagaactaattctgtaactttgatattcaggtatccaagctagataaattttgtcctcttaaaaaacgaggtatctacagctctttctaaaaacttcaggattttctggaaaacttgggaccaccttgattggcgttattcagattccaatcacattctttggggcccttctgatggataggagtggaagaagagcccttcttttggtctcttcatctggaacatttcttggctgctttctgactggactatcattctattttaaggcacaaggactgtgcacacagctggttcctactttggctctttgtggcatactggtatactatgcggcgtactcagttggaatgggcccagttccttgggttatcatgtcagagatattctcaatcgacatgaaagcaatcgccggagggtttgtaaccctggccagttggattggttcctttgcgatttcatactcattcaacttcctcatggattggaaccccgcaggcacattctttctgttctctgcagcgagcctggtcactgtgctgttcgtggcaaagctcgtgcctgaaactaaaggaagaacactagaagagatccaaacattgctcaaagccacatgagtggcttccattcgctcagtaggtaaagatccagttaaaaaaatgctgtaaatattcgcctcttgtaaattattgtgcatggcaggtgaatgatttcgcctcttgtcgattctcctatattttagtctctttgatatatgttatttaggacaaagatacggtctacaacatatgcttatcttcaactatttcattttctgagttttctctctgctactatacatcatcagtttcgacggttgtctt

SEQ ID NO: 261 - DNA, 1071 bp, Zea Mays
ctttcacaaaatctctctgtctcacgcctctcccgcgcgcccttctcccacgcacggccggctccgccgccggtcgcgccgcccccgaccgcgccccgccctcgaggagcccaccccggctgccaccgcggccgcctctcccgcccccgaccgcgccccgccctgcccccgtggagcccgccccggccgccaccgcgatcgcctctctcgcccccgaagtacaagaaggaggagacagccacgtttgcgctctatggttgaagaggtggttgacatttcaaattgggagaaaaaagtttgtggcaagaaacggaagttacaaagctttagagatgaggagtactacataagttcagtacctcaaaaccatcatttggaagctgggctgtcggtgagggacaatgaaggatttgttgaaaataggttggatgctgctgttcttgatttagttgatgatgaagcttctggtatgcaagcgcagaaaactcgatatcactggatgaaggtgatcagtcaagccatgtttggtagtgaagggcgacgtccagagagtaagaacaaggtgacacagtatggactcgatatgactgagcaacaatatcttgagcattcgattccatggatagctgccaatgatgctgcttggcgtgcgttatgtcattattgggcttcacctccacctatacctacatctccatctaccgaacatcagacccctccagctaccttgccgacgcatgaacaagaggacgggttagactttgtcgaaaccctcttcaatagtggaggtattgaccatcactcttcactgtaacccgatggtgatcggcgaccatgagcttccatgttattgcgttctgatacttgatacttttattatgactatgtatgagatattgtcttttattagtactggatgatgatatgtgtcttattatgactatggatgagacttttgtgatgtaattgatgagactatggatgagacttttgtgatgtaattgatgagactatggatttaaatattgttatgtgattgtgtgtgagatgttttatgtgaaaatatgttgt

SEQ ID NO: 262 - DNA, 1789 bp, Zea Mays
aatcagaagttcattatctatctgaatattttctctactctccataaaagttacttgtacgtgagttgagccagcaatttcctgcagttatacctcttgccttgattctcaagaagtttttggctgaccggagtttggaccacccctattcaggtggtctgagctcttactgtttggtgctgttaattgttcgttttctccagcatgagcatcatcttggtcgacctattaataaaaatctgggcagccttttgatggatttcttgtacttctttgggaacatatttgatccacgccatatgcgcatttctatccaaggaagtggaatttatttgaatcgagaaagagggcaaagcattgacccgattcacatagatgatccacattgccctgctaacaatgtgggcaggaattgtttccgcattcaccaatgtattaaggcatttgctgatgcgtttgctgttcttgagaatgagctactgcagttcagttcagaatgtagcatgcctgtatcttcattcaatatactaaagaaaataatcccaagtattgattctgatgagctgtagctataaaaaagaggtacgattccacagaatacaattgatgacagggtggaatgacctgtgctgccttctagacacactgatgtctatgcagctgctcagaagcctcagtgtggcaagtttgatacctctggaatagaccaaaaaatagaccggcaagatggcaatattcaaacgtgagctcttgtgtgttcatgcaatggcacatgatgccttgctccctgatcgagcttcttgatgttcagatctctgactgaggtaaattggcttactcaagaacaaggtggtgaattggctttctcatgaacaaggcgttgctgcacacagactactgacgtggctgttcttgcacctttctgaataagcccattcatgtaatgtttggtaaatgcaaaccgcatgattatccgcttgatactgtgattgatagatgcttcacctcgtgccaatattctgtgttccaatgccaagtcacatattctgagcagcaactggagatttgctcatgtaccgattcttcaaggtcctaggatcatttggggtgatgaagattgtgaaatacatgtggaggggtacttatatgatgaaaacaaggatggttgtgaagagaacggagtagtggcatcagctatcagggaaagggaagtgctattgacatcatggctgacccctttcagattatcgcgctgagatcttcctggcgaggattgggagctacgagccagatatccttgacggaaatgtttgcttggacagcgtaaaccggaaagtaccggcgatgatattgatgatgataatcgcactgctctctattgtcatactgttgtctgcactcttcagcgacatgtcttgtgccttttcaacgtgcgaaatgtgagcaattgctcttgtaaagctgcactatttcactaaaacattattgtttgggttatttagatccatggtattactatttatctatttggaaacttacattacaattttccctggatgtacccgatccatgccatttcctacgcttctccactcggcagattgttgaatcgtatcccaaaatctctcccattgtcgtctccatgaattgctcatctcacctctctaccatggagggtttagggtttatatctttctatcaggttaaactggttggtgtatataacttaatatggtattagatgtctcgaatttaaatcctagttagtataattaaataaaaataaata

SEQ ID NO: 263 - DNA, 854 bp, Zea Mays
atgatcatgggcggcggcatcatcggcattggtaccggtccaagactcgccgggcgtgtagtacaagccgtgagccagcggcatggtggcgttgacgaggcggatggaattgttgaggcccatgagccctttgacgccggcgtggcagtggcgtttgtcgccgtcggcctcggcccggtcggctgcgaagggcgccaccatggatggcggcggcagatgggcgacgaggtcctgcgctgcctgcggtgggaactgaagcggaggcagcttgtcgatctcgtgctgcgcggcgtcgagcagccagtccaccaccttgctcggctggctgaggcccagccggtcctggaggtcgtagagctgtatcgccgtcggcacggacagccgcacgcgccggtcgcgcagccccttgaccgtcctcaccttgctgtgccggtccttgccgccgaagacccgcgacacgcgcacgatcctggactccgtcgacggcggccagtgccgggagctcggcagcacgggactcttcgcgacggccctggccgcggtcgtcggcccctcggccttggtgcgcccggcccccaggtcttcattggtgaggttgccgcttatcatctcttattatccactcatgatcacacacacaaagcatcatcaaattgccggcccagctcagctcagagatagatcaaatagcttcgaccatggctcctagtcctactacggctgatgaatcaaaaaacgggatggcccagctggcgggccggcctgacgccgcacgggtcggaggagtccgtccggccggcgactcagcccggagcgagggaggagctctcgatcggtatcaggagatggagtaa

SEQ ID NO: 264 - DNA, 1431 bp, Zea Mays
cagctcgcatcgtcgtcttcgcagacacctgtaaattttgtatgccttcacgccgtgaagccacatttgcggccattggcaatggctgtatccactgtttcgatccatatatttggtgatgtcccttcttcacctcttgttgggctgcttcaggacaaaatcaataactggagggagacatctcttatattgacatccatccttttcgctgcagttgtgttctggttcattggtgtgtctgaggctgcacaagatgctcttgatcatcttttcaaccaaggccacaatctcgtaacagaaaatgagatttctgatacctttactaggctggttgaaaggctaccacaagtggtacttggaagcgaggagacaaccacactttcacatgctaggatgttgttggctctgaccttttatgctggtccctagtttctgataaatcatcttcactgttctcctgtgagctcactctctcttggatgtcctcgacatttcttacatagatatatggttcccctgttgacttttaatttgattccttgtgtggatctgccatttttctgttgactttgaaattgattaccctggcaggtattgctgctcgtttctttgattgtttgggtttatgcataggtcatagctcacagttttctggttccatggacaagctaattgtatcaaagccactatctatcgggtatctttattcagttgctgagttgaagagtggcgcctattctaaagatacaactaacatatctctgcatgccacgtcaacatttgcagcctccaaaatatctgttatccatgataatgctttgccaaattcattacttggtacagttgaatatgagttgccccatgtgcctccatggtttattcatgctggtatccagaagctttatggggttcttgctggaataattagacttgttggcctatcaacagtgtcaggaaccgggccatgttgatgttcaaaagagttgtcagaagttcatgacatctggtatttattatatcttcttttgtagtgggctggtgtggtctgcttagcagcaggtagcactacaaccagcaatgtatggatgaattgaaggtagtaaagaacgcatgcaatcttatagaaactctacatcttgaaactggcatgattgacaaagaagctggatgcatcctttggattggtgtcttcttatcatcaagcagtaatgtgaagcaagttcatttgttgactaagaacagatgagcacaaatcagtgaagagttcattgcactagagatggaggatggataggtggtagatttcaatatggctttgatactattgtttctctttacaatctttgtacataacaagaaaaatgacgttgtatgtggatactattgtaattcaagaatttatttctgaataataaatatatttgtttataa

SEQ ID NO: 265 - DNA, 2123 bp, Zea Mays
aacgccgtcacttcccatctttcagtccaccccagatggccctcaaagccgccgtctccgtcaccccgttgctgccgtcgcctcccctccgccgtctcctgctctccccctctcctagctccgcggcggctcgtaggatcgcgagggtttccgcggcgatggcgacgacagaggtgcacccagccgtggtggtgggcggcggccgcgtaggccaggcgctcgtgtccatgggcccgccgggaggtgacgtcctcgtgggccgcggagagaaggtacccgacgatgcgcctggaccgatactggtgtgcacgcgcaacgacgacctcgacgccgtgctcgaggccacccccaagtcgcgctggcgcgatatgtctcaattggtggatttgtctcagataaaggtttatcctgttcaaattgtggagaggcgaatggttcgaaagggcaacaaaccggtggttcagattcgagtggcttggtcgaatctccctgcagacgcaacaacttgggaagattatgaggttctgaagaggcgctttcctaacgctcttgattgggcgcaatcaacttttgaggggggggggggagatgtcaggaacatgagatctgcagaggagcaattggaaggctgaaagagcagaaggttgagcgggaggagtaatctgagtataacgtcggagttggcgctactccggccacgggtctcacagtaacaaaggagatgcttgatccattttacaaatggaaggtttagcagttgaactcgtgattattgatgggttggaaaactcagggaagttatgtaacatctttttgtttctaaattctatagtgaacattccagaagagcttcagggtgtcattacttagaagcttgtttcttgaaatatgtaaatttggtaaataatctctggctctctgtcatcaatgtagtttgaagaaactaaccttatatggtggccacattgtatgaatttgtcactaaatgagcatttacttcgattctgaagtgttccttctagtatggcttcgcatccagtcactttatcaagaagtgatctgccatgattctatcttatgcatgctaaacacagcattgtgtaccatttttgcgtagtgttgctgcatgttggttcttgtgagctaatattacagcagatttggtgttcttccagaatggaatgctggatccatggtttaagatcaagggcctagtgggtgcaaaccaggtgttggcctacttcgctgtatcaaaggttggagagccaccagtcgatgggattactgataccaacccagaggggttgactgctgcatttggcagctgggctcctgcagtggctgcccgcctgcaaaatggtggacttacctgcaaggtgcttgaaaaggaagcctttcagaagcagatgctagagaagttgatatggatttcagctttcatgcttgttggtgctcggcatccaggggctactgttggtgtggtggaaaagaattaccgatctgaggttgcgagcctgatagctgaattagcatcggctgcggctgcagaggagcagctcacattcgccgaaggcatggaggatcggctctgtgcttactccagggctgtggcacacttccctacagctgtgaaagaggcaagtcttaccaatgaggatttattattgagaagttaagcccggacactattttattccctgcaaaattaaaatatgctaatttgaatggagcagttcaagtggaggaatggctggttttactccctcaccgagaaggcgcttgcagcaggaaagccagatccttgcccactacacacagcttggctcaaggagattagggtcatataaattgttttcatgtacatgagcttcgttagaagcatgaaacagttgcatgttgcctatatagagaaaattgcttttgccacgttaaccttttggtatcgtgtgtcaaaacaaaatgcctgaaaggtttgctgccatccgtgtcgaaaggtcgaatcaaactgggactacacatgtattaaaccacatcatagaggccatgtaagagtatctccatgtaacacctcgttcaatctcggaccggcgatatttacttctggcagccctttaagatcatat

SEQ ID NO: 266 - DNA, 1436 bp, Zea Mays
ccgctcgccgctcaaccgcggggatggagagagtttgtgagaacacagtggctgttgacttcaagcagactaagctgaacaactttgtgccattcatccggtcaggggaatggtctgatattggaggtcgcgattacatggaagatgcccatgtgtgcatctctgatctggcaaagaattttggctatgactcagtcgaagatgaagtaatttctttctatggggtgtttgatggccataatggcaaagatgctgctcattatgtccgtgataacttgccacgggtcatcgtggaagacgctgattttcctcttgagcttgaaaaggtggtaaagaggtcatttgtgcaaactgatagtaagtttgcagagaaattttctcatcacaggggactttcttctggaacgacagcacttacagcaatgatttttggaaggtcccttctggttgcgaatgccggtgactgcagagcggtgctctcgcggcgtggcactgccattgagatgtccaaggaccacaggccttgctgcatgaacgaaaggaagcgcgtagagtcacttggcggctacgttgacgacggttacctgaacggtcagctggcagtgaccagagcgctcggtgattggcatctggatggcatgaaagaggtgggcgagccaggagggcccctgagcgccgaaccagagctgaagatggtcacgctgaccaaggacgacgagttcctgataatcggcagcgacggcatctgggacttcttctcgagccagaacgccgtggacttcgcgcggcggaggctccaggaccacaacgacctgaggctgtgctgcagggagatggtcgacgaggcggtgcggcggggcgccagcgacaacctgacggctgtgatggtctcgttccacccggacgcccctcccccgagccgagccaacaagaggaccggcagggtcaccaggagcatttcggctgaggggcttcacagcctcagagtgctcctggaaggccagtgacgtcgccgggcggcgcggcgccattgctgcccgttcgtccctgatgctgtgctacgttgctgatgagtgttaactgtaagtagcggtttccggtatcttggtgcttgctcttcttcttccgctgagggcgggcgactattcttgtccttcctccgacaataaaccaacgggcctgagatctcactgtgagacgctgtaaataaggaaatatggaagttggagctcgtcattaaggacgagttagcggtgtgcatccagggggcttttgtggctcagtatgtgatgccttttcgcccctcctgattttctgtaaataaaacgatgctgggagccatcggtgtgattgaactagtgttctgttatgcgtgctccccatcgattcaagatctacagtttttatttactaattactactagtacaagtcttta

SEQ ID NO: 267 - DNA, 2187 bp, Zea Mays
aagaaaaacgaaaaacgaaaaactagagggtggaggacaacggtgtccagcaaaagagagagaagaggaggggaggaggtggaagtagcaagaatggcgtgctccaccaatctctgcttctcggcgtcgattcctcctcttccagcctcttcttcttcttctgtctcctcccccttcctcacggtggagcgtgtgtcctatgttccgtccttgtccaggtggacaatccgatacaagcaattggggcatgcatatcagagaagccacgttctggcctttgctagtgcagatgtatgcatcaggcatttcgagtaggccatctattttttagggttggtaggattatgacatataataatgtttattgaacataactttatgtgcttttgaatttttttagaagtttaagttcaatttcttaggcctatatcccaaccaggataccgttattccttagtactctttactttatgcattatactaacccaggtcctggagaaagttattcaactttctttagtgccagttgctgcattcttattctgtataatacattctctcttggtagctatattgtttttttaatgaatcaggcatcacagggtaaaagaagctcaggtgagaatgttgtgatggttgatccactggaagctaagcgtctagctgctaaacaaatgcaagaaattagggccaaagaaaagctgaaggtgcattgcagctgtattggagtgtatcattccttagattaaatcaatcttatatgctaaaggaagaaaacttcatgataaggaaaggaggaaaacatttatctttttttttttggaccaatagttggtgatgaatcattgtttcagataactggagacagaactaggcttttacctgttcatgttgtcctgcgagttctccaattctaatttatttatttattgtgtgggtacaaacttgattgcatgttcttcagttgaggcatctaattaactgcaaaaggatattcaacttaatattacctagtggctgtaaattgcagtaatgttcacatgggcatttatattattatttaaaaaaaactctaccagcaggggaaattatagggaacatatcctgtgttcatggagctcttgtgctcatatgagcactttaaatctggtgcgttcatttctcatccagaaggtgagggcagcagtggcacacagagacagacggcgcggcgcaacaagggtggtcaagagtggcacacactagaaaatgtctattcacacttggatgagaaatgaaggcaccagatttaaagtgcatatgagcacaagagctccatgagcacaggatacgtcaaatttgacccaaatcactgctctgttttgcagaggcgcagtcaagcagaagctatcaatgggccattggcaatgataggactgactgctggattgatagtggaagctcagacaggaaaaggcatcttagggcagctagctggatatctgacggctatttctagtttatttggacaataatagtgggccatctttggagatttattttttcacgttccttggccaggagagctcttatctgttgcatccacccaatttttgtgggggagttaatccgagcccagacttgtatgtttatcaagcacgcatgggctgaacattaattatacatgtaacggggtcgttctatgtagcccaaccatttctgatgatagaacctgctaaagagcagttcttcatcatacttaaatgtgaaatgttaagtctttgagaactctcctttttgcccaaaccattgagcctgtaacatgtcgattggactcagaagtctctgactggttgtttgtatatgcaggagctgatgacacctgcaatggaatgatgagtctattgcttcgatttaacgtgtgattacatatatcttgaacttattataagccagtatgtcgcctgtagagtgtagacaggtacttttataatatataatcacaacttccatatgtactgatacattttatctttgttctgcttgctactgttttaattgaatacaagacatactatggaatatttaaatttgtcatttgtagtagttgtgtttgtaactgcaagctaaaaaacaatctgttgagcatgtgctatatgtaagtagcgtggatcggtttagggtccgtgcatgttaatgagatatgcg

SEQ ID NO: 268 - DNA, 2652 bp, Zea Mays
aattttctgagaaaagtctccaacactgagttcatggcacactggaaactagctggtgcattagtgagaccaaaaggcatcactcgaaactgataatggccatgatgtgttttaaaagcagtcttgtattcatcctcagttcccattcgaatttgatgatatcctgctgtcatgtcaagactggtaaaatactgtgcaccagctaattcatccaggatctcatccaccataggcataggaaacctgttctttatagtcattccatttaacttcctgtaatctatacagaacctccagctgccatcttttttttgcacaagtaaaactggagaagcaaacggacttacactaggaactatcaaccctgctgctagcagttcagtaatttgcttttcaatctcagttttgtgagctggagaatatcgataaggccttgagtttactggaatagaccctggcaacagaggaatgtgatgatcataaggtctgattggaggcaatttcgaaggcacagcaaaaacatcttcgaattcctttaaaatctcctgtagaactgcatcatttttcccaattgtttcttctgaaacctgctctaaaagcacaaatacccagacttcctctcccttcatccatttctccagctgcaacacagatacttgtcgcacttcctgcacttctctagcaccaccctgtaacctgaccttcttcccttgatcagtaaaggttaataccttgttattccagtcacactccataggactgtgagccttcagccaatcataccccaggatcacatcatatgcttccaagtctaacaccctcatagcagtgttgtacaggtgccccccagaactccacactacttccttaactcttttgtcactgatcatagctgctccatttgccaccttaacccgcacagtggaacaatcttcagtgatcaaccccaattttgctacaattctctggctgataaaagttgcagagctaccagaatcaatgagcatgaccaacatctgatcctgaaccagagcttggaccctcatacatccatcacattccgtgccactaatagcattccaggacaactgatgtaactcctccacacacttctcctcatcttccaacttctgcaatacctcatcagtcaaaaccaggcccatatcttccacggtcagattatgcagttgagttaccaccctcttgggacattttgcttgatggcctggctcaaatttatctccacaaataaaacacaacccattcgctcttctatattctctcaactgtctttccttgctcaactcaggatacaatattcctgccctattctccccccttactcctgcaacctgagttttaagaacttgtcccttttggtttctaactctattcttctctgcaatctcctgatacaccttggccaacctcttcgccttatccactgtcttaggcatccgagccatgacttgattctgaatttcaggtttcaaccctttaatatagtgtgtcacaaacagggtctcacctaactcaggattatgcagggtagcaacatatctaatatcatcaaaagcttgagagtactcctccactccttgctgctgagtcacattaaccaaatctctcatagcttgagggtattcatccactccaaactgctccctaactgcttgtgtaaactgcccccaatcacccaatccatgtttcagcttatacacttgtaaccacttcgacgcattcccctccatgtgcatagaagctgaactcgcccacaaccactccggcacctggtaaacagtgaaataatcaacacaccgatcaaaccagactcccggatcactgccctgaaacttgggaaatgtccacttcggaaatgggcctgtcctattctctcttcctccaccccactgctctctacgatctcttccacgctccattcctccaccccgatcatcccctcgaggaacacgcagctcgcgctcagagtttgtgtcattaccttcctgctccttcgcttgcaaatccaatcgcagctgcgcaatagttctctcgttctcctccatgtgtcgagccaacagtgctcgatcttcctctgccttcttctgcccgatctccatcgcttccatcttcccggtcaaccgttccaccgccagcatcatccgctcccagcgctcctcccctttttgctcggtccccgccattgcttccaggatcagccgcgtctgaacggatggcttcgtggaaggcgccgtgatgcccaccctccgaggatcaacagctctgataccacttgtgatgacccgtggccgcggctagggttcgccgggcgtgagtcggtagcagaccggcgaaaagaacgaagccaaggacaccgaatgttgcatttgacaaatgactactctcaggcctgcaaactgcacattacaacgtgaagttggttattgaaagggcgcccatagctgcaaacatagctgtgaccacatgatgatgacgatttactacagcaggcacttgcaatgtcaatggagggtggtgcttcaggatctgcagctgtgactgactctgctatggcagaagctagtgcagttgaccctgacttagcgttggcaagagaagaaggaagacaagtaagacaaaacagaagacgag

SEQ ID NO: 269 - DNA, 2276 bp, Zea Mays
ggctgaggttcaccgagccgccgcttcggttctcctctaaaaccctagaaactaactcccacctcccggttcccgccgtcctcgctcgccccccattctccggccctccccaccgccaccattttccccggcgacatgggccgcaatcttccagccgagcaagtggaagcacccaggagcagcaagatggacaagaagagaaagaaggacaagaagcggaagctggcagccgaggccgaggaggaggcggcggtgacggcgacagtggagaccgtgaagagcagcaagaagaagcgggtggagaatgaacccggcgcaggagcagtggaggcggagaacggcgctgagaagaccgtggcggtgaccgggaagggttcggaggaccctaagtacgcgccgctacggtcgttctccgctgccgagctgccgtctcaggtgctcgaatgctgcagcgcgttcgcgcggccgtcacctatccaggcacacgcctggccgttcctcctcgacggccgggacttcatcggcatcgccgccaccggatccggaaagacaatcgcctttggcgtgccggcgctgatgcacatcaggaagaaggtaggggggaaagcagggaagaaggctgtgccacggtgcctcgtgctatcaccaacgagggagctcgctcagcagattgcagatgtacttagtgaggctggtgcaccatgtgggataaaatcagtctgtctttatggtggaactaaaaaggaaccccaaatatctgcccttaaatctggagtggatatagtcataggaactcctggtcgtatgaaagaccttattgaaatgggtgtttgctgtcttaatgaggtttcgtttgtggttctagatgaagcagataggatgctggatttgggttttgaacctgaagtcagggcaattttgagccaaacatcatctgtacgccagatggttatgttcagtgcaacatggcctcttgctgtccacaaattagcccaggagtttatggatccaaatccgataaaggttgttattggatcagaagaccttgctgctaaccatgacgtgatgcaaattgttgaagtattggatgatagaacaagggattcaagattacttgccttgcttgacaaataccatcaagcacaaagcaacagggttttggtttttgtgctgtacaagaaagaagctgcacgagtggaaacaatgcttcagagaaggggatggaaggctgtttcagtccatggcgacaaggctcagcatgatagaacaaaagctttatctttatttaaagaagggaaatgcccattaatgattgctacagatgtcgcttcacgtggacttgatattcctgatgttgaagtagtgattaactatagttatcctttgaccactgaggactacgtccacaggataggaaggactggtcgtgctggcaagaaaggtgttgcacatacctttttcactcaagcgaacaaggcacttgctggtgaacttgtgaatgttctgcgggaggctgatcaggttgttcctccagcccttatgaaatttggcacacatgtcaagaaaaaggaatctaagatatacggatctcatttcaaggaacttacagcagatgctcctaaatccacgaagatcacatttggcgattctgatgaggactgatgtgatgacagcttactgatttttcatccctgctgacggaagcttgatttctccgttggtgatgctatggatgtgatcagatcagccatttgcaagctgattgcagccacggatgagtattgtggcagtgggcaatcccaaaatatagctctcttgttataggttagtttattatgagtagcattcggcttatgtttttctggaccgtccccattatgcattagcttgggctgcttggctgtatgtaataataagcaacattctgcttattatgatttgcattctcttggaggcttagtttggaaacttaaatcgtctccggtatttccagggattgagtgggaaaataagctattttcccactcaatcttcagggaaaccggaggggatttaagttttcaaactagcccagagtgtagttaaattcagtgcgtccttagtacaagcagcccggttatggtaatgataggatagtgaaaggtgtacttctatcctggttagagtaaaaaaagaatatggttttccgtgttatagtaaaaaaaagaggatggttttgcagttggattttgattgggttccatgtgtttgaatcaactttgtgtttccacaacttg

SEQ ID NO: 270 - DNA, 2366 bp, Zea Mays
acgcttgcgcgtacatttcattttttccatcaattcagccgaaaccgccaccttaaattaggatatattattttcccccaaaacaaaccctaaccggtcggcccaattctcacgcgctcgccacagatctagccctgcctacagcgctctcgctgctgcacgtcccgttcacgtcgtcgtccgcccctggcccttgcctcaccgactcgtggccgtcggcagctccacgtgggacacggccacgcctgacgcctccacctccacgactcagctgacggctcctctccatgggacggtgcatgacgacgccatggcggttcaccggctccaaccttccccctccggcctacagtcctccaccgtccggtcgccagtggtcctccatgggccatggctgacgggtgcacgcaccgtttcgccttttccagtggtaatacttgacagagaaatcctgaaccaagcgcaaaccttctgcaagacctggtaacttattttaggggctagaaataggcgacgacagttcaggccttgttttttacaccaatccaaccctggattagcaatgatttttatgcagctcttgtttgttacgactactcatggcaccatttatgcatacatctgaactatttatgctgttgatatgtttctagtgtggcaatgatttttttacatatagatgcttaccaaaagttcaaaatctttccggtcggtagcagtagaagcagcacacccaatttgtcatacactctgtaatttttatttcctaaatatgtctttttatgctaatttgaatacgctattacgcccaattactagatcgcgcgtatgctccattttgtaaacacgtagaccaccaaattgtacattttttatgttctttttatgcttttattctgagttgaattggtcctcacatgatcatgcatcaatacccaatggttcagactcatctaatgcttctgcttccttacatgaacatgcattagcacatcagtcatctagcgctacttactataacaagcacacattatccaccgatatgattcttattcctgctaattttaatgtgttattatgctcaattatcagatctcgtgtacgctccgcattgtaaacacgtagaccaattctcctacattgtttttgttcttccttttatgcttttacgatgatttgaattggtccttttcagaacaatgcacccccagtacgtagtccactctagagcagtatacgacagatacgcccagtacctccagatctagttccttgaatcttactgtcttttgagtttgagcatatactgatgtggagaggaagtgattggaaatcatctcttcctccattagaaaatagttatgaagtgacaaaggtgcaagaaagttttagtggcaaagaatctaatgaaaaggttacacattcaggaaatgttctgatccagatttagttggtcagtgttgcaacatctcacaagaactggaacttggatgaaggtcaagaaaaatttaaagattccactgacagtgatatggtactgaattctgcaaaggatgttcctgcattgttccattctacaggtatatctagaactgaaccctcagcagacattgcattggaatattccccattaaatccagtatgtgatattatggatccatccctgaactgccgaagtatcccaacaaacaaatgtgaaagtagagctctggtagagaagtcagaacattgtccgaatgattataatttggaaatgaaggggaaaagaaacgatggtacaaaatgtacagttgttctaaatagcggttctaaagtagagggattgttatgtcttttggagcaagccattcacagtggcagggcacttgttctgagtgaagatgaacttgctgattcagatctggtctatgaaaagtctgttgcttttagaaagtcaattctgcgaagactggtttttgagaatactcgaaggaagtccagtgccaggagaaatgtgccagacaatcatgcaagaactaaaacacatattatagcaaataaaatgttgagcagtcctgttgaaaataaatttatcgttaatggaggatctgcaatgcagacaattgaccatggacaagagtgtctttctggtgttgttcatcaaggtaccttaagagtagatgaactagcaaagttactagcttgagaggtgattgctcttttatcaaccacatagaccagtatcaacatcctttgaaacatatgcaagatttgcatgaactctgaatttggttaaaacaagtctcaggtctgttgcgtcgtggcgagtcctttttaaccttgaaatattgaactataatcatgtgcgatgtacaaacaaccttccg

SEQ ID NO: 271 - DNA, 1741 bp, Zea Mays
aaggtctaataccgaattatcggaaataatgttgattacttaaaaacgattaacgaattttgattgcgtgattgcgtccgcctccttcaaccctatccacatctggcacagaggaaaattggctacggtacaaaacaccgaggcatcgatggactcttccaccagctgacagctatgatttcccctgctcacctcgccttcgccgccgccttcctcctcgtcgtccggtcgtcggcgcctggcgctgctgccgcccgcccgatcttcgatggcaagccatccccctccgaggccaccgccactgcgaggtggctcgccgcccagaacacgtggggtgtcctcagcacaatatcaagtgacttaagtggagctccatttggtttcatatagtgatggagtaccaggcgagggccgtggaataccctacttttatctgacaactctggatcccagtgcaagagatgcactggaagatgaaaggacctcttttacccttagtgagttccctctgggaacttgtggggaaatagatcctgaaaaccccacttgtgcaaaacttactcttaaatggaaaggtactaaaaattacatccatgataagatgatcgatcactcgccgtttgtatgcatttagcctatttgtttagttgtgtttgaactgacaatgatctatttgggcctgaactggttttctacctataaatttcacagctgatgtttctgtagaatgaatacacgctgatgggcttgaactgtcactatttgggccatgggctgtatacttatagctgcatgtgtgttttcatttcatgttagtaatgctaatgccttatgtatttctcataattaaacttttcgactggatcatgaagttttcaataaaaagaagggacaactcggtggtatcaatttctacaatcatgaaaaaccacatggaagtagcaaattcttataaattataattgtcacgacaactcggtggtatcaatttctacaatcatgaaaacatgtatttgaggctgtctcctcttaatttatctcttatggtaaaataatagaaagttaaagagtatatttttttatcacatgttagatttaacgcagtacgattcatcagagaagaaaatccttccctttactcctctcccacaatagacataagttgaatactataacatatggtttacaaactattatatattgtggatgccacattgctgtactcgtttttttccatatgataggcatttgctatttttgcagttgaagatggttgaccttcagtcatctgaagcagatttggccaagtcagcactttttaccaaacatcctgaaatgaaggattggccaaagaatcatcatttcaaaatcttcaaaatggaaatcgaaaacatattcttgattgattggtttgggggtcctaaacccatatccccctcccagtaccttgaatttggaagaaatcagggctcattgatgtactcataagcgaagaatgcttcatcgatcaatatcccgtctgtgtatgctcttctcaaaaatgaaatccatattgcacatattgtaaagacatctctgtgcacggaataaacctgtagtgttattaaaatgaaatccatatggcacatattgtaaagacatctctttgcatagaataaagttttagtgttattattattgattatgttgtttaattatcacatcttcgtgaacaattactttacaaaaaagaagtctacag

SEQ ID NO: 272 - DNA, 1768 bp, Zea Mays
aacgccgtcacttcccatctttcagtccaccccagatggccctcaaagccgccgtctccgtcaccccgttgctgccgtcgcctcccctccgccgtctcctgctctccccctctcctagctccgcggcggctcgtaggatcgcgagggtttccgcggcgatggcgacgacagaggtgcacccagccgtggtggtgggcggcggccgcgtaggccaggcgctcgtgtccatgggcccgccgggaggtgacgtcctcgtgggccgcggagagaaggtacccgacgatgcgcctggaccgatactggtgtgcacgcgcaacgacgacctcgacgccgtgctcgaggccacccccaagtcgcgctggcgcgatatgtctcaattggtggatttgtctcagataaaggtttatcctgttcaaattgtggagaggcgaatggttcgaaagggcaacaaaccggtggttcagattcgagtggcttggtcgaatctccctgcagacgcaacaacttgggaagattatgaggttctgaagaggcgctttcctaacgctcttgattgggcgcaatcaacttttgaggggggggggggagatgtcaggaacatgagatctgcagaggagcaattggaaggctgaaagagcagaaggttgagcgggaggagtaatctgagtataacgtcggagttggcgctactccggccacgggtctcacagtaacaaaggagatgcttgatccattttacaaatggaaggtttagcagttgaactcgtgattattgatgggttggaaaactcagggaagttatgtaacatctttttgtttctaaattctatagtgaacattccagaagagcttcagggtgtcattacttagaagcttgtttcttgaaatatgtaaatttgatttggtgttcttccagaatggaatgctggatccatggtttaagatcaagggcctagtgggtgcaaaccaggtgttggcctacttcgctgtatcaaaggttggagagccaccagtcgatgggattactgataccaacccagaggggttgactgctgcatttggcagctgggctcctgcagtggctgcccgcctgcaaaatggtggacttacctgcaaggtgcttgaaaaggaagcctttcagaagcagatgctagagaagttgatatggatttcagctttcatgcttgttggtgctcggcatccaggggctactgttggtgtggtggaaaagaattaccgatctgaggttgcgagcctgatagctgaattagcatcggctgcggctgcagaggagcagctcacattcgccgaaggcatggaggatcggctctgtgcttactccagggctgtggcacacttccctacagctgtgaaagagttcaagtggaggaatggctggttttactccctcaccgagaaggcgcttgcagcaggaaagccagatccttgcccactacacacagcttggctcaaggagattagggtcatataaattgttttcatgtacatgagcttcgttagaagcatgaaacagttgcatgttgcctatatagagaaaattgcttttgccacgttaaccttttggtatcgtgtgtcaaaacaaaatgcctgaaaggtttgctgccatccgtgtcgaaaggtcgaatcaaactgggactacacatgtattaaaccacatcatagaggccatgtaagagtatctccatgtaacacctcgttcaatctcggaccggcgatatttacttctggcagccctttaagatcatat

SEQ ID NO: 273 - DNA, 2060 bp, Zea Mays
aactaattttagcggttaactactagttagctactgaagattccaaaaccaaccccccatccacgccgcgatgctccgccgccgccgggcaccgctcctcctggccgccgccgccgcgggcgccgcgctggctgccacctctccctccggcgaaaatggtcgaagcgtcgcctccgcgctccaccaaggcatcgctcgctcctcccgttccgtctacacggttcgccctcccgtatctgttgctattactcctgagtttcggatgctgcttttgctcgattttctagccgttggctgtcgcagattggttttgtgatggcagattacaagtattcgctgaggggtctggatgctggatcggcggattaccgtgttaagctctccaaggttcatctgcggtcagcaaaaaaactacttaaactatgtgaagtgaatggagggttttatgtcaaagctggtcaatatgtatcttcactaagacaagtgccaaaggagtactcatcaactctctcctgcctgcaagaccaggcaactccatccaagtttcaagatattaaagcagtaatagagcagaactttggcaaggaattgtatgacatgttcatcgaggtcgattgcataacaatcaagatgtagctgtcaaggttcaatatcctggattggagcagcgaatgaagatagacattatgacaatgtcattcttgtcaaaaatggtctcttgggtttttcctgattataaatttgacagaatactaattgaatttgagaaatccatgacaatggagcttgattttacgcgggaggctaagaattctgagagaacagccagctgcttcaggaaaaatagtgttgttaaagtgccttatgtgttctggcaacttacaaccagggaggttttgacgatggagttttgttatggacacaaggttaacgacttggacttcctgcggaaaacagatattagccctacaaaggtagctaaggctttgattgaactctttggtgaaatgatatttgtacatggttttgttcacggtgatccacatcctggaaatatattagtttctcctgaaggccatgggaaattttcactagttctgttggatcatggaatttatagagaattggaccaaaagttcagattggactattgtcggctatggaaagcactgatattgttggattcaaacaaaattctggaattaggcgaacagtttggcgttggcaaatatgcgaagtactttcctgtaatattcacagggagaactatagaaagcaagtcagctcttggcacacaaatgtctggtgaagagcagaggcgtctgaaggaggacttaaactctcttgggatggatgatatatcttcatttatggaatccttgccaccggacttctatgtcatactacgaacagacggactattgaggtccattttagggaatcttggggcaccacgccatgttcggcttctcacttatgcaagatgtgctatacacggtcttgagaagcagcacaaaatggagtctggtcttggagatgttcaattgtgttcaggtgcaatcagacgtatgttcttgaatgtcaaaacaaatgtcagctatctccgtctgagagtgattattgcggtattattagctaaagcaaatggtgccaagcagaaagtcgtgaacaaactcagacagatgttacaggagaccagtcaaggttttcaccgccgtatgtgatgcccagaagtcagcgacgtggtgaaattaaggctacgagaaaggtgggggaagttggaagtacgtcaggactccggagtagaatcataactgtgattgttctgtttcaacttgtaaattggaggttgtattgtgtcaaggagtccaatcataactgtgagtgctctgttgtaacttgtaaattctacttctacgtcgagtctgcgctcgagagtccaggtgttttttttttgttggaccaagtacgcatcccaaaataagtctacatcccaaaattcgaggagtcaaacaaatcttaatttgaagtttgcctaaatttataaaattggtattaac

SEQ ID NO: 274 - DNA, 3568 bp, Zea Mays
cgccagcccagcccgcgcctattggcgccattgacttgagctcaaggtctttcctagtcatgttctggctgcgccgttacgttagatgctctgctctcagtcgtaatgtcacagggacgcacagagagagaaacagtcgaaccaagcttctgacgataaaagctcacacacaagcttccctctgtcgcagagacacgcaccgatctagagagaggagccaatgctgttgtgcttcgagccttgtgttgcgcatcggttgtagcgtcgtcgacgacctaacaagctcgttctgtcgcatcgggattcattcctcacgcgtgatcccgccagacgaaggaacagcaggggaaacacgatgacccttccatctcatagaagagaatcagatctggagatcaatggggcttcgcaagatacagtcggcgcaaagaaaactgcatgcaagacgacgcagcggcaaatattgcgatctgaaatagttagcacttttcttctcaagggtagtcgatttgcgtattcaattcaactctttgctttcggtgcatctgggtaggatctatttaaatttgaatgtctacgttggactttaaattaaaaatatgcggtgcccattgttttatatggacctgaccacctgacaggtagactttaggccccgttgcttcatttcaataattttgagtctattttagttttttctattcaaacaggtctagctgcacaagctctatctttaaaaaactgaaactagaggtcaacttcataaaatttttgaaactccttaaaaggtacttcaaaagcattgtttttatgcattctcgtgaggttgcaccaaaattacacatcatagtattggttacgtgacctgtcgattcatgtctttttctccacccgctaatcatgaagattaattaaaaaaaactcacacaaattcattgtattacagaagctagagtctatgtgcaagctaaacatattctttaaccctgtcttactaatttgttgaagttgttttacagtgaaattggaaaatcgaaactataatttttaaagtgaagtctttcaaacagggtctggccgtaatatgaagtttttttagtttctatctctctacatgaagcccacttggtcacatttagtgaagaaagtagcggtgggccgggttaggctcaagcactctcaaccgctcctaaggccatagagttttattaaaacctcccttaggcttatataatgtagcaatttagctgagtctctcataattttttttatttctaacaaacgtcaccggtcacactaagatatacgaagtagctgggaacgtactaaaatcatctccatcaagttttagtcaatttcgctaacgcgcatctaaattttttaatcgatttaaattttatgatgtgaacgcaggctttttatttttaggtctaaagcaataacatttcacttttattaggttatactgcatagatttggatttaaaagcaactggattggataatatttattttgtaccaggataagtttggacttgacctttttttggttggatattaattggattaaattatatggatttggattctaatccgttgtgagtagggatgaaaatcgaaaccgaatattccgtaatcggagtctcgtaacatatcgtttctgtagatataataccgttttaaaaactaccatatttaaaattttaattttaaatttctgtcaaaagtatcaagtagattaattataaaaccgtgttaaaaaactatcatatttaaaattttaattttaaatttctgttaaaagtatcgtaatcgctaataagtagattaattatgaaaccgtgtaaatttctgaccaagcaacaatcgttctcatagacgaagtcgtttcctgccattttcattcctagttgtgacagatctatatgcctgattttactgacacatgagtattgtacatatgtcgtgtgtaaaactcaacgagcttccggtgattagtcactgaccatctatcatcgtatgtgtacaggaaaaattgaagaaccgcgtccgagcattcaccggagcattcgtagttatgatttcccccgtgctccttgccatcgtgctcaagaaagtcagcttgactggcaccggcgggaggtatcaggggaggatacgactacgagcgctggaagcattcgtcgacctcgtccaaagaaggttcgcccacctcgcagccgtgactctgcagatgggcataatgcccttcctgtgcgtgatggtcgcggaagcgtgcgccagcttgccgccgctcagctacgtcgccccaaggctggtggccgcgtgcagagtgctggtgttcctctccaacttgctgctcatggccctgggctgcgggatcctcctcctcttccacagcaacgccctgctagtgctcactatctgctccgccatggcgctcggtgtcgctgccgtgcaaattcggtacctctgccgcggcgtcgccgatgccggggccgccgacgacgcggaggcggaggagtaccacagcaagctggagcagttgcttgagctgtcggccgggatgaccgtcatgatgttcctggtgctggaattcgtggcactggagagcctgctgaggaacactcgtcaggggcaggctgtcaaaagagggcagacgttcctcggcgtcgccttgctcgtcagcttcatggccagcacgctgggcgtctcgctcatgaacgtatggaccacgccccacgtcatcagcggctgcgtcgtcttgaccgccgagttcatgagggtcctgaatttctccttccatgctctgccgatcgccgcggtggtggtcttgatcacgctggatgtgcttccgcacgcgtggaagctggcagtgtggctgccgttcttccctctggtcatagtgctcctggtgctgctggcgcggtacagccgtgaggcgatgaaacagcaggagccagcagcaagaggaagagggaagcaaggaccagaagcaacgggcagcagcacagcatcggatccatcgtcatcaggtgaaaagaagcctgatgatccaaagccggcctcgttggagttgaccaaggtggcattcacgggcttcttggccgtggcagtacccagcgtcaccagtgcttctttctgcgtcccgtctgcattctttgtgttattcagtgcagcgaccgttctcctgggcctcttgtggaggctcctcacgcacgaggcggaaccaccttcgtgtgtcctccaagctgccaatcatgcttccttctccgcgcacatgtccattttcttggccgggattgcattctgggtcatggctgcctttgctcttcattaatgctcgacgtcatcctttcacagtttaacatcgtattcacggtctgctgtaccgtacgctttttttaatggtgtaacggagaatgtggaacagcctaccaatcgagcgcaaaattctttaattatttgtattttccatacaactttgttcttactatcatcaattgattagaagtcggcaatctcgtggaccatatgatggatattctatttttttaagcactgcttca

SEQ ID NO: 275 - DNA, 1647 bp, Zea Mays
cgtgagccactgacttgcaggccccacattctcccgccctcttcctcttcactacaccctttcctccgtgccgccccacttttctcctcccgcgcccctccgcgagctccctacccctcgcgctcacgccggcgacaagtttccgccagagttaggtagatcaggtgctgcgccggcagccgtggaagggatggaggacctcgcgagttcgcgtggcggcgggggatgcggtggtcttgatgcgcagatcgaacagctcatggagtgccgcccgctcccagagacggaggttaaaacactgtgtgagaaggccaaggagatattaatggaggaaagcaatgttcagccagttaaaagccctgtgacgatttgtggtgatattcatggccaattccatgatcttttagaacttttccggattggtgggaagtgtccagatacaaattatttgtttatgggtgattatgtggatcgtggctattactctgttgagacagtaacgcttttagttgcacttaaggtgcggtacccgcaacgcattacaattcttcgtggaaaccatgaaagtaggcagatcacacaggtgtatggcttctatgatgaatgcctacgaaaatatggcagtgcaaatgtctggaagatcttcactgatctttttgattattttccgttgacagcattggtggaatcagaaattttctgcctccatggtggtttatctccatccattgagaatcttgataacgttcgcagtttagaccgtgtccaagaggtccctcatgagggacctatgtgcgaccttctgtggtctgatccagacgatagatgtggctggggcatatctccacgtggtgctggatacacttttggccaagacatatcggagcagtttaatcacaccaacaatcttaaactcgtagctcgggctcaccagttggttatggagggatacaactgggcacatgaacaaaaggtggtgaccatattcagcgcacctaactactgttaccggtgcggcaacatggcgtccatcctcgaggtcgatgactgcaggaatcacacatttattcagtttgagccagctcctaggagaggtgaaccagacgtgacgcggaggacacctgattatttcctttgagttatctgccaggccatttttggattttgcccaatgttggaatagtgatgctggccagtaacaatttttgttggatctatatggtaacttaaccgaccagcaacagtaagaaaatgtggaagctgcatttgtcattgcaagaggtgctcgctaacttaaccccaagctgtcaaaagatccgcttgtctacccaacccacccagtggtgcctcccttgggctttgggacgtcgagtttacgctttcagcgtagagttgcctcagttctgtcttgtgtgtcagctagttttgtgtttgtgtcttgtgtggttgctcgttgtagcttctgtggtctcgagtgttgcaagaattggaattctgctagctcctcctctgtttggttgtccatgcccttggtacacgagtgttggccacccttctcatgtagcaccaaccacgttacagtcaagctgttcgcatcttatttttagagtcaagagtataatatatgtaatgctaccccaactacag

SEQ ID NO: 276 - DNA, 1084 bp, Zea Mays
atgtttatctcttgcgcgctcctcttcttcctccctggcgctcggtcgcttctctctggtctccacgcgcaccgcgtccagctccctcctccagctgtgtctgctgctcgccccagcctggagcttcgctcggcttccaactccggcgcccggccgagctccctggaactcgacgggaggcttaaacaagaatcctcaccgatggcttggaattctttttgaatcggtaaccgttctctagttcgctatttttattaattgactgagtcgatggattgaatagatatattaatcgcgacgattatcttgattgaagcataaacatgtcatagttatattcgatggttgccaaaatatcttgtcgcatgtgaggacatgcttatggcgtactagtgtcgcgaggtaaaacttaggtttaaaatgctagttacataggagtacccgagcggacatgactgtcgagtgtattcaaattggttttacttatgaaatataccaaattagtggcgtgaagaatagatttagtattttaaacgattattcgataagtttgtcgatgttgattgtgttgaatagtgaggtcaaaagccttgccttagtaattattatgttgtattatatcgatggttagaatggcctagtggaatataggttagttaaattgttcctgcaggtactataactcagatgtccaataataggagtttgaatattgttatcctttcggtgttatgcattagttaaggaaaatagaggactcatacaaggtttaaggtttcttgatgtatgagctatctccgaataggctagaaaagtgtaattattataattagtcttatatcgctagctggtacttatttgtgactgattttaatgttttgttataagtgtttcatcctcttcggtgtatattatctatcttatgctatttatactcatgctcatacatgtgcatcatgcatctcatgaggtacactagttgatcacgtgatgtgaagggcaagagctggattaatctcaaggtaatgatgatggatgaacctgaagatggataatctgaccaagtgccaagacaaaagctgat

SEQ ID NO: 277 - DNA, 3285 bp, Zea Mays
aacgtaacaacctcggcttctacgactaggagtcgaagtcgactgacgactcacgactggcgtagcgtaggaggcggcggttccaagcgaccatccaataatcgccaccctcacgcgagaaatccccgttttgggggacttcgtctctcgtaggagggattctttggctgaggtagtgaggttgccctcggattggtccaaaaacgaaaaagttagccctcttcctcaggtccaatttggctgcttctgctacacgatccattaactgctttccgatccgtgttctgtgatgtttgccctcttcctcagggccaatttggcaatttgtcagaacacacacaggcaacttttggggaactacacgtgtatggagttttattagtattccaggggcgtcacaatggcatactttcctgatgaagtagtagggtatatccttggttatgtaacgtcgcatcaggaccgcaacgcggtgtccttggtctgccgggcatggtacgacattgagcgtcatggccgccattcagtgcttgtaagaaactgttatgcggtgtgcccagagcgtgtacacatgcggtttcccaacatgcgtgcactgagcttgaagggcaaaccgcactttgctgaattcaaccttgtcccggcgggttggggtgccactgcaaatccatgggtggatgcgtgcgcccgtgcatgcccaggtcttgaggagctccggctgaagtttatggttgtgactgatgaatgcctcaagttgctttctctatcctttaccaactttaaatcacttgtccttgtttgttgtgaggggttcagtactaccgggcttgctaatattgccaccaattgcaggtttcttaaggaactagacttacaaaagagttgtgtgaaacatcaagaccatcagtggattaattgttttcccaagtcttcaacatcactagaatgcttgaatttttcctgcttgactggggaggtgaatgctgttgcactggaggaacttgttgcaaggagtccaaatcttaaaagtttaaggctgaatcttgcagttccatttgatgttttgtccagaatcctttctcgcacacctaagctagaggatttaggcacaggatcctttttacaaggcaatgaccctgctgcatatgccagtttatgtagagctcttgagaactgcacttcactgaagagtatatctggtttttgggatgctccaggcttttatgttcaaggaattttgtcaaattgcaagatcagaaatcttacatgcttgaatctcagctatgctacattgattcagagtacccagcttatcggtattattcgtcattgtaagaagctccatgtcttatgggttacatccagttctcttgatgagtactctacaaccttactgaactaggaattagaaagacacggccatttgattgctgggtaagatgtccttgaaacctgaggcagtgagttttttttttgcttgcttttacaagcgagcgaatttgacccaccagctctggcaaggtatgcttttttgggctggcttgggaactaaacttgccattaggctatctccaacagctctcctatcattttctctatttcaaactccactctccaaacagtgatatctacagtgaaaaacagtgttttgcacgaccttatacataatatgttggatacagccttagatataagttgtgcctaataggcaaaagtctgcatactgtaacacttttgttaaactgtctggcaattgcgatgcacagagccataataatacattaataccacacccatgtttcgtaatctccagcttgtaccaatatagacgtgtcagaaccttactacctgccaacactatacattcctgtatttttattgtgataagagttggctaaatgtaagagtcttctgaaataaaaaccttttcaaatttctttgccatgtttagtaagatcaaaacagtttattgatactgttttgtgtttctctttcaactcagcctctctgtaaaatgcaggggtaaggcttgccttggttattgtttccccagatcccactcatgtggaaccgccaaaattgggtttgttttgtgtttgtcttcacaagaaaaggtgttagatcacattggtgatgagggcttgaaggctgtgtccttttcttgtcctgatcttcaggagttgagggtatatccaagtgttgttgcaccaagaggtactgtgacggaggaagggttggtagccctatcttcgtgtcggaagttacagcatgtgctcttctcttgtgttcgaatgacaaacacggcgctgatgacaatagcaaggtactgcccacggctaacgtccttcagactatgcattcgcaagcccaggtcagcagacgccgtcacaggacagccactggacgaaggctttggggcgatagtgcggtcctgcagaggcctgaggcgtcttgccatgtccggcctcctcacggacagcgtgttcctgtacatcggcatgtacgcggagaagctggagatgctctcggtaacgttcgcgggggacaccgacgacggcatggtctatgtgctcaatggctgcaggaacctcaagaagctggtaatcaaggagagccccttcggtgacgccgctctcctcgcgggcgcgcacaggtacgagtcaatgcgcagtctctggatgtcgtcctgccagatcaccctgggtggctgcaaggcccttgcggccaccatgccaaacatcaatgtcgaggtcatcggtggggcgagctttggtgcgatggatggtggtgtcagcggtgcgaggaaggtggacatgctctacctctaccgtactctggctggacctagatgcgatacgccagggttcgtctcgatattgtgagctgtatctatggctactgttggtggcgttcagggaaacccgatgttcttaaccgtgcctgctgcgggctgtggctgtgctactgtctggtagtgtttcggaaacatgatgtttatttgcgtaaggtagtgtttggttctggaaccattttaagccttgttcagatattcatatacctcatggattggaagtgattagaaaaaaatatgaataattttgacttactatgtattgaaactcacttaatcccctctaatccatatgaaattgagatgaaaccgaacagacccttaatccatatgaaattgagatgaaaccgaacagacccttagatgaaatggctctgttttctagatcctaagaacagaatggcttagatgaaatggctctgttttctagaacc

SEQ ID NO: 278 - DNA, 303 bp, Zea Mays
cttctctctctatatatatatgcacctcccaccgatgcgaacccgcttccctctctcttttcgcaaacagtagtacccagcgccttgaaagactcatgcgtcgtggtgtccctgcgcacaagcagcagaaccgtcgtagcctgctccatcttcggcgaacttcaccttgatcgtgatctgtttccgagcttcaaggaatcgacggtcaagcttcggcgaccaaatgatccaattcttcaagttctacgagatcgaataccctgagcatctgtttggtgaaggcaagtgtcctctgacccatta

SEQ ID NO: 279 - DNA, 2702 bp, Zea Mays
atggatggcccaagtgatatttttgatggcatgctacggaaccaaagaaaactgcgtgtattgtctctatcattttacaacagcagcaagttgccagaatctattggtgagctgaagcacctccggtatttgaacctcatcaggacgttagtttctgaattgcctacatcattatgtactctctaccacttacaattactttggttaaaccacatggtggagaatttgcctgacaaactatgcaatttaagaaagctacgacatctaggagcgtacgtgaatgatttcgcgactgaaaagcctatttgccaaattctgaatataggtaagttaacgtcgctacaacacatttatgtcttttatgtacagaagaagcaaggctatgagttgcgacagttgaaggacttgaatgagcttggtggcagtttaaaagtgaaaaatcttgagaatgtcattggaaaggatgaagccgtagagtcgaagctatatctgaaaagtcgccttaaagagttggcatttgagtggagttccgagaatggcatggatgcaatggatattctagaaggtctgagaccgccaccccaactgagtaagctcagaatcaaaggttacagatctgatacatatcctgggtggttacagatctgatacatatcctgggtggttactagagcgatcctattttgagaatttggaaagttttgagcttagtaattgcagtttgctagaaggcctaccaccagatacagagctccttcggaattgctctaggttgcgtataaactctgttccaaatttgaaggaactatctaatcttccagtaggccttacagatttatcaattgattgttgcccactgcttatgtttatcaccaacaatgagctaggacagcatgatttgagggaaaatataataatgaaggcagacgacctggcatctaaacttgcattgatgtgggaggtggattcaggagttattaggagagtactgtcgaaagactattcatctctgaagcagttggtgacattgatgatggatgatgatatatcaaagcatcttcaaattattgaaagtggtctggaggaaagtgaagataaagtatggatgaaagaaaacatcatcaaggcatggctcttttgccatgagcagaggataagattcatttatggaaggaccatggagattccattggttctaccgtcaggactctgtgaactttctctttcttcatgcagtattacagatgaagctttagctatttgccttggtggcctcacttcactgagaactttacaattggaatataatatggcattaactacacttccatcagaaaaggtgtttgagcatttgacaaagcttgacaggttggttgtaataggttgtttgtgtctcaaatcactggggggcttacgtgctgctccatctctttcctgttttaactgttggggttgtccttctttagagctagcacggggagcagaactaatgccgttgaaccttgatatggagctcagcatccttggctgcattcttgcagctgattcgttcattaatggcttgccacatctgaatcatctttccatttatgtctgcagaagctccccatccttatcgattggccacctgacctcccttgaatcattatgtctaaatggcctccctgatctttgctttgttgaaggcttgtcttccctgcaccttaagcacctaagtttagtagatgttgcaaacctcactgccaagtgcatctcacagtttcgtgtccaggaatcgctcacgattgcaaggagccgtcagtttcatttgaagaacctgcaaatctctcatccgtcaagcacctgaacttttcatggtgcaaaacagagtccctgcctagaaatctaaaatctgtctcaagtctggagagtctttctatagaacattgccccaacataacatctttaccagatctgccgtcctccctccagcgcataactatattgtattgccccgtcttgatgaagaattgccaagaacctgatggagaaagctggccaaagatttcgcacgttcgttggaagagctttctaccaagaccgcaccactttgaaataaatgagaaggcaccttgacgtcacccctcttctcttgaagctccagagttcaggctcaagtcagaagccaatccgtcgttaattctgccgtccccgcggttccctgtttttgccgcttgtattgctccgctatttcagttgctatatcattcattccttggttgtgcacaattgccaatatgtatttctctgacagaatggagtaataactgtggccagagcttttgttttcatgtgcacaattgctatatcattcatgtggcaattagtataaatactccaggcaatgcaatagagaagatagctcattttcctacacttgtgcttgtggatggtgtggcagagaagttcaccatggaaccagttccagtaatgtgtgtgctacagtcaaaataggtcttaattctctgctacgtacagtcaaaatgtgtctgctacagtccgagtgtttctggagattcgttgttggcggatgatgagctacatttgtacagtatggattgagctcgaggacttgttcatctccttgctctattaccagttaaaaggtgattgcttgttctctagtaccaattggattcgttgttggcggatgaggtgcttgc

SEQ ID NO: 280 - DNA, 407 bp, Zea Mays
gggaccgagagatgatgatcgagccagtgatgtggtgccaaccacaagatgccgtggtggacgacctgaagaatggacttaactagtggatgctcgccaagcgagtacccccccagcaaacactatctaagtgttaaattaaagacaagccccagttttatgcataaccgtttatatatgctattttactacaattaatgtttgtaggtttgtactgtgcacttaagtgtaggagttgactgaaaccctagttgcatgaactcaggattcctttttgagatggatactagcatgctaggtcgagtagctgctttattaattagggatctcggtagaagtcgagtgatttttctagcactcgcgcgaggtcaggacattgattgtacccactttcatatcatactgat

SEQ ID NO: 281 - DNA, 430 bp, Zea Mays
ggcacactcggtttcttgctcctttgtatttgaaccctttcttcaatcttttattggtttgtgttgaacctttatgcacctgtagatcatatactctagagcaaactagttagtccaatatttgtgttgggcattcaaccaccaaatataatactaggaaaagattaaccctatttccctttcacaaacctaccttcaacatttcttcgtctgacctaagcgaaatacccagcgaagccagatgcgtgggtaacagatttgttacccagatttggacgaagggtggacgcgaagtcgtcgaagacgaagcacaggcgctacttgacgaggctgacgtcggtgaagagggatgagtcgaagctgaagttcatgaagagattgtaacacccaggtgtttatattccgctcgacaacgagtacggatttaagc

SEQ ID NO: 282 - DNA, 3400 bp, Zea Mays
ttcctcctttggaactggagaaaggagaggagacaaaaccatccaagcgatccgtttctcccacttgtctcgcgccaccattattgcccgcccaatgggacgccgccgtatcctcgccgcgccatagttttaaccttgcgtccacgcctgcccaagtgcccatcccacttttcttccacgcaaaggattttctctctctctccttttccattttaatactgcacgatctctgatcgattgattcggccgagataactggagccttgtgtttttatttcgggggtcttgtaccaaaatagcgtcgattttatctacttgacccctgacccattctctctctctctctcccttttcaatttcgggggctttatttctctcctcccacgccttgcatcttcttgatgcgttgcgtcccgactcgaggcagacatcggaggcgcgccactgacttagctcgcgatttctagatccgcaaccctgcgctgctcaactccgattcttttagttcggattcgggtagcagcagggcttcggtggcgatgacttgattgatacgaattggggatttcttgctgtttgcgcctctcttcgtatcggcgctgaagggctcagctcgagattagaacaatttgggttttggggtcttttcttcttctactactgctggtcaagttcacagaaatcgctggctccgtggtccaatggacgagtccggggaagcgagcgtcggctccttcaggatcgggccgtcgacgctgctgggccgcggggtggcgttccgcgtgctcctcttcagctcgctgtggcgcctgcgggcgcgcgcgtacgcggccatctcgcgcgtgcgcagcgcggcgctgccggtggcggcgtcctggctgcacctcaggaacagccacggcgtcctcctcatggccgtgctcctcgccctcttcctgaggaaactctcggccgcgcggtcgcgggcggcgctcgcgcgccggcgcaggcagcacgagaaggccatgctgcatgccgggacgtacgaggtctgggcgcgcgccgccaaggtgctcgacaagatgtctgagcaggtccacgaggcggatttctacgacgaggagctcatcaggaataggctcgaggaactccggagacggagggaggacgggtcgctccgggacgtggtgttctgtatgcgcggcgatcttgttaggaacttggggaacatgtgcaaccctgaacttcacaagggcaggctagaggttcctaagcttataaaggagtacattgaagaggtttctactcaactaagaatggtgtgcgaatctgacactgacgagttgctgttggaagagaaacttgcctttgttcaggagaccaggcatgcctttgggaggacagcgctactcttaagtgggggtgcttcactcgggtctttccatgtaggtgtagtgaaaacattggttgagcataagcttctgcctcggattatagcaggatcaagcgttggttccatcatatgttcgatcgttgctacccgtacatggcctgagattgagagcttcttcacagactcattacagaccttgcagtttttcgacaggatgggcggaatttttgcagtgatgaggcgtgtcaccacttatggtgcactgcatgacattagccagatgcaaaggcttttgagggatctcacaagtaacttaacatttcaagaggcttatgacatgaccggccgtgttcttgggatcaccgtttgctctcctagaaaaaatgagccaccccgctgcctcaactacctgacggcaccacatgttgttatttggagtgcagtaaccgcctcttgtgcatttcctgggctctttgaagctcaggaactgatggcaaaggataggttcggcaacatcgttcccttccatgcaccctttgccacagatcctgaacaaggtcctggagcatcgaagcgcaggtggagagacgggagcttggagatggatttacccatgatgagacttaaggagttgtttaatgtaaaccatttcattgtgagccaaactaaccctcacatttctccactcctccggatgaaagagcttgttagagcctatggagggcgctttgctggaaagcttgctcgtcttgctgaaatggaggttaagtatcgatgcaaccaaatcctagagatcggtcttccaatgggaggacttgcaaaattgtttgcccaggattgggagggtgatgtgaccatggttatgccagcaacacttgctcagtacttgaagatcattcagaatccaacatacgcggagctccaaatggctgccaaccaaggccgcaggtgcacatgggagaagctctccgcaatcagagcgaactgcgccattgaacttgcacttgacgaatccatagcggttctaaaccacaaacggaggctaaaacgaagcatggagaggacggcggcggcttcgcagggtcactctaactatgtccgacccaagactccgaggaggataccgtcatggagccgcatcagtcgagagaactctttggagtctctctcggaagagatctctgcggttgctgcttcgtccatgcagcaaggcgctgctcttgttgtcggcgcaccaccaacgactctttctcagcatgttcggcgcagttctcatgacggaagtgagagtgagtcagaaaccattgaccttaattcctggaccaggagtggagggcctctaatgaggacagcgtccgccgacaggttcatcagtttcatccataacattgagattgacacagaattaagtaggccctgtgctgtggaaggtgatgctgcaggtagatgcacagaaaattctgggaccgagtcgtgcaacactgtcaacaccagagcttctactcccacaagcatggctgttcgtgaaggagatttgctgccgcctgaaagcactactgataatgtcctacttaacattgtgaaaagagacgccctgcaggatggtgtaactgaattggcggaaagctcctgcgctgaaggatatgcggcaaactgtgacaccgtctcagggctagactgctgaaggtaacaagacgctcgctgctgacttgagcaatcaacaattagctgatgattagattcttcttgattttgatgatgaaaggtcatttatatgtagctcactacagcaacgcagtgtaggaaaattgtacctgctcgatttaaactttaaagagcatgccatgagtagctttgttaatgttaatattcacatccattgtggaattgttggttgatgcatttcttagcacgtcgagcaaccatatcacagcatgccatgagttcggcactggtacttggaatgtccaaatcatctgttcgctacatgtaacatgcagtggtttattagtcttgcagacacttcat

SEQ ID NO: 283 - DNA, 1660 bp, Zea Mays
aaacattcctaattgccaattggagccagagcgcagagcgcgaaaggcgagcggcgactccctggcgttgaccagagccccaccccactcgccgtctcgccctaaaccaaatcctccccaaaggcaaatacgaaggtacagtgccccagccccgcgccccctagaccaaagcagaccagaatccgccctaccaatcgcctccccagatcggcggtccacccggaggcggcgatggcgtcgtcgcaggcgaacctcgacaagatgcagctccgccagagctaccgcaacgtctggcacaccgacatgacgaacgccatccaggccgacttcccctactgctgcctcgcgctgtggtgtggaccttgcgtgtcgtacatgcttcgcaaaagggctctctacaatgacatgtcaagatatgtctgttgcgctggctacatgccatgcagtggaaagtgtggcgagagccggtgcccagagttctgtcttgcaactgaggtgttcctttgctttggcaattcagttgcatcaacccgcttcttgctgcaagatgaatttaacatacagaccactcagtgtgacaactgcatcattggcttcatgttatgccttcaacaagttgcttgcatcttctctatagttgcagctattgttggtagcgaggagctttcagaggcttcccagatccttaattgtctgtctgatttggtctactggacgataaatgcaaatgcagacgcagcacaaagtcgaaatggacaagagggatggaaagttcagcccacagcctatggcagtgcccccggtgcaacaaatgtcacgcatcgatcagcctatgccgcctcctgctggatatgcaccgcaaccagcatatgggcagccttatggtggttatccgcctcctcctggccaaggttatccgccagctggatactcgcagggcggtgcataccctccacccgctcaaggttacccacatggtggtggatatcctccacctggtcaaggttacccccagggtcagggtggtgcatatcctccgcctggttcttaccctccacaaggttcctaccccccagcagagggctcctacccagcacaaggttcctaccacccagcacagggctcctacccagcacaaggttcctattccccagcacagggctcctacccagcacaaggttcatatcccccagcacagggctcgtacccagcacaaggttcctaccccccacaggcttaccctggcaagtaaagatgacacgacaggtgaaccaaatatcgtgaacatgtaaacagtaggaccgctttagcgctataggttattttgataaaattcttgttactgttcagggtggcattcggtgaacaatatttctattttatacggtcaacatcttgtgttgatcatgtcgtgttgagtctatcctcttttttcttttcctgaataaggaatggcattcaactggaatgtatttgaatttggtgacaactcacgtggatattgttttggttcagagttgtcactttgctgtgtatgatagtcgcaacttttgatgacgtttgataatggagtgaaggaatggaatgcttatgacttgtgagcacgagcagtccctttcacacacgttactattatcataggacgagatgaatagacaga

SEQ ID NO: 284 - DNA, 2055 bp, Zea Mays
gtcagaggctcagagcccagcccaggccggagaccactgtccactgcgtctgtctctgtcccgagctcccgatccatccatctgcatcgtgggaacaagaagaacaatgggtataatgcgagtcgcggacgatgtggaggccaggttggtggtcggggcaggtggcggcggcgggaccgccaccaccacgacggagccgcttctccgccactgccacggcggccgcaaggaggaggacgaccaggggtctaagatccgggacagcccggaggcggagggggcgtccgactgcgggaggacggacggaggctcgctgcggatggtccttgtctccaccgccgtcgccgtctgcggctccttcgagttcggcacctgcgtcggctactctgcgccgacgcagtcagggattgtagaggaagtcgggctatctatctccgagtttgcaatttttggatctgtactgacagtcggagcaatggttggtgccgttactagtgggcgcttggctgattttctcggacgaaaaatgaccatgcggatatcagctactatttgtatattcggttggctctccatacatctggccaagagcgctatcatgctctactttgggagaaccttgctgggtttcagcactggagttctttcttatgtggtgcctgtgttcatagctgaaatagcgccaaagaatctccgcgggggtctcgcaacgtcaaaccagctcttgatctgttccggaagctcagctacctacatcataggagccctggttgcatggcgcaatttggtacttgttggtttagtgccttgtgtcctcttgctagctgggcttttcttcattccagagtcgccaagatggctggccaatgtcggaagggaaaaggaattccacgcctcattgcaaaagctgcgtggagaggatgctgacgtatcagaagaggcaattgagatcaaagagtatattgaatcactctatagccttccaaaggccaggcttcgagacttatttctgagcaaaaatatatatgcagtcattgtgggcgttggcttgatggtttttcagcaactcggagggataaatggtgttggcttctatgcaagttatatcttcagttctgattttctggaaaacttggaaccatcttgattggcattattcagattccaatcacattgtttggggccatactcatggataggagtggaagaagggttctcctgatggtctctgcatctggaacatttttgggctgcttcctcacaggagtatcattctatctgaaggcacaaggactgttctcagaatgggttcccacactggctctttccggcatactggtttacatcggggcatactcaattggaatgggtcctgtcccttgggttgtcatgtctgagatattctcaatcaacatgaaagcaactggtgggagcttggtgacccttgttagctggctgggctccttcgcgatttcttactcgttcagcttccttatggactggagctctgcaggtaccttcttcatgttctcttcagccagcttgatcactgtactcttcgtggcgaagctggtccctgaaaccaaaggaaggacactagaggagatccaggactcactaaacaccagaagatagtaatgaatttacttcacactacagaataattaattctaagatggaaaaatgggaatttacaggacacagcagaataattccaagatggaaaacgaatgtaccgtcagacctctgctcatcgatagatatgtatacaagaaacaatatatataattctcacgtcctcccgcttcccctccctttctctcccgcaccacctccgtgtaatacgtagtgtactgtgtaccctatgtaggttaaggaatgctgcagattcagattacgcattatgtaccgtgcccctccagattgtttgagcatgagcagcgacagaaccgacattatgtttatgtaccatgtccctctagatcaaccagcagtacattttttatattcaggatcaacatttatgtatcatgtttttttagggaaaaggctcag

SEQ ID NO: 285 - DNA, 1782 bp, Zea Mays
cgaggccgatgaggatgggtcagacggttcctagtgaggtcaggatgcatgggaaggctgccatctgggttgaccaagcttaccaagtctttgaagatatgaaacaaaactactgtgatccagatgcatacacatacactatactaattagaatgtctggaaaggctgggaagaccactaaatttgtctcattgttggaggaaatggtgtccgaaggatgtgttcttaatctgattgcttataatactgttattgaggctcttggtaagaacaagatggttgacgaggcgatttttatgctttctaaaatgattgagagtgactgtcggcccaatcaattcacatatagcattatgctggatgttttatcaacagggggacaactccacaggttgaatgagattctagatatttgtagtggatgtctgaataggccagtttattcttatttgatcaaggcactctgcaaatctggtcatgcaagtgaggctcatagtgtattctgccgtatgtggaattcccatgaaaaaggagaccggtatgcttttgtatcaatgcttgaggcactatgcaatgcagaaaagacaacagaggctattgatctactgcatatgatgcctgaaaaggggattactacagatgttggaatgtataatatgatattttctgctcttgggaagctgaagcaggtgtctttcatgagcagcctctatgatacgatgagagccaatggtgttgttcctgatgttttcacgtacaatattatgatttcaagttttggtagggttggcttagttgataaggcatctgaactttttgaggaaatggaggatggcagttgcaagcctgatgtcgtcacctataattctatgataaattgtcttgggaaaaatggagatctcgatgaagcccacatgcttttcaaagatatgcaagagaaaggatatgatcctgatgtcttcacttacagcatattgattgagtgctttgggaaatccaataaggttgatatggcatgcagcttgtttgatgagatggttgcacaggggtgcattcctaatattgtaacctataacattttactagactgtttagagagacgagggaagacaacagaagctcataaattttatgaaactctgaagcaacagggattgactccagactcgataacttactcaatacttgagagattggaaagtagatctcaacgaacagtaagaatacgtaaaccaagccggaatacaggctgggttataagtccagtgtgataacctaccctggatctttcagttgcatacctccggtgtagtggggctgaggacaaatagtctgtatgcattatgcaaacttgcaagtatattgctggtcaataatgtcagcaagtgactactcaattaccgtgaaaacaatatagtagtcctgactcatcagaattatatgtatataatagtattgcatggctgctgatatttgatatcttggttctgaacaattcgtggaagatggacatcttgagaacaggtctgtaccccttcagtctactctaaaatctgacgtggtgtcgacctagatagtccactacggcaagagttggtcatgttaggttggaatatgcatataactcatgttgagtttgcatgcaatgggcaaaacaaggaattaccccacagtgaaacaagaccacacttaggggtggtaatgaatcaccatccaaattgaatgtttcttcacaattcatttgataccttaattaatttttagttagaaaataaataaaaa

SEQ ID NO: 286 - DNA, 2592 bp, Zea Mays
atgcttcatgatccactatttcgccgtcgccgcaaaatcctccgacctcgctcgcgccaccgaaaaccaaacgaggaaaaatgccgtccccgtccctcctcctccgcgctcctcctctctgcccctccccgtcccaccccccgcgccgcttcgctcccccctccctcatcacctcgtctccgcctgcccgcctcctccctctgcgcctgccctccgccgcgtcccgccacacgcctcgcgccggtgacacgcgcgtgcccgacgacctcatcccgatcgcgcgctgctacgagggccgccttgctcgactcgagctcgccggcgccgcgcgccgggaacaggccgtcgcggcagcggccgcggccggcggaggggcttcggcggaggaccacctcgccgccggctccgacgccatggtcgtcgaggcattcctccccgggccccatggcggtgggacgaccgcttcctccacgcgagtgattttgcaagccaaggaagttaaagataaggccagtaagatagagaaacagttcggatctgattttttctttgcaaatcaacctgattcagagagtatgttggctatggcctttaagcaagttgtaattcagcggctctcaaactttcggctcgaggtcttccccccaggttcagagagagacttccaagattttggcaaaccccgaaaggggtctttggattgtagtatcagctcatcagatggaaaacttctgtcttctcttgctgaggccattttctcctgtgtcattgaggatgtcagaaaaaatcattttgggagcataggcagtttttttcagaagcgacagctcaactgctcaatggattcctcagtttgtatacacaaaacttctgaggcagaagtagtgaaaaatgctaagaggtgtctggagatcgttagtttaatgaagtcttctcatgaagtacgtgaaacaaagaatggatggtggccacctccacatcatgaaagtttggtgaagattgggggtcctgagttagtgctttgggccaatgagtacattcctacttataagctgcaaattaatgccaacgcattggagaattctaatcttgaagttgaaggtctttatgagttagaaagtaataggcgggaagttctcttaacccactcacaactggtggaactagggaacgttctagacatgtactttgaagatcaattcacattaccaggcaaaacattccatccttattggaatccagatctgtcaaagattaaaaagaacaatggttacttgaacaaccttttcacttttttggctgggacctgtatttttctttttgtcaccatctttgctcagttatgctggcctcaatcctttagagacaaaaggctattcaaggaaagttcaaatgcctcattatctcagaactattgttccgatatcaagtctctttataacagtgaggtacaagcttattgcatgtcacttgttaagaaaatgaaagactcgtatggctgccctggtgatgtaatggttgattctcacattggagcatgggttggagaactacctaactgcttcaaggcaatcagtagtgaggatgctgctgcttctggctcttttcagtatcctgacactcttagccaagaaaatcaatcccagccagtgccagttaatactaagatgtctcatttggaacaaaatgatagaacccaggaatttcctctgcagaatattgctagttttcaggtggtcatgtcagaagaaggtaaagtagtgggatttcagccaactaacctcccagctgtgaaccattgggcaacaaacccactagcaacacttctgtatcaaggacggtcactttctccagcgagcttcctcagattgattctactgcaagattgtgaacagttccaaagatgtgaaacgaaacaaatagtggcagctgagcctgaacaggatttaacaaggtgcctgagttatgagaaagaaatcgactaatgggccccatcattttaagtaagatgccggaggagtggtggtggctgacgtgaagaagaaattccactagtatcccgtcggagtgcaggaggagcgatcggaggggcacaacaaacgtgggaaattgggcacccggagactatgacccataagccctccagctctctatggttgaacacttgaactataaagtcttatattcagaagtatctaccgagtaggatcaaacaccattcgagtactttcttgggagaaaccatgaccactcttcaaatcttcaagtcttctatatttgtcaccatactatgaagagtctgttgtgcaattctgatgtttttttcgaagaactttgaacgcatcgtgatgatatctatcccgtggcacctaagcctaaaattggcttacaccaagccaattatagggtctcctaagttaattatagggtcttgaacatccttcaaattggctaccctgtgtcagctacagggtcttacatccttagtgatattgatgagtaatgatcgcttgttattttttttttttttggtaaaaataacccttggcaatttcatacgttggtctttcaatgttgaataacagttcccga

SEQ ID NO: 287 - DNA, 1878 bp, Zea Mays
gccatttcccactggccacgggcctccccctccagtcggccagtcctctccctccctccctcctgcctggccgtccaggcttggcgcgttcgttgcttggcagatggcaaaagagtttaccaactcccttctccctccccttccccgccccgctcccgcgtaatctaaccgctgctccgattagcgccatcccaccgctataattacgctcccgccctgcgcgcgcgggcctatcagcgctagcttagctatccggccgcatccgctgctcgcctcctcacttgcgcgtgtgtcgtgtagcatttagtcagctgctcctgcttgctagggttagggtttgcgggcgcgcgcgcgcgtgcccgcgcgtgagctggccgcgggagggatgacgccgcaccggtcgccggcggggaccggaggaagtggcggcggagggccgccggcgctacactacctgagcggcccttacggagacaccaccttcaccaaggttttcgtgggcggcctcgcctgggagacgcggagtgaggggcttcgcgcccactttgaggtctacggggacatcctcgaggccgttgtcatcaccgaccgcgccacaggccgctccaagggctacggattcgtaaccttccaggacccagagtcggcgaggatggcctgcatggacccatatccagtgatcgatggccggcgtgctaattgcaatcttgccatcttagggcgtcctggtccagctgtgcctttcgtagcacctataaggccggtcatcccttacaatggaggtgtggcggttccagggggcatgtatgtgcaaagcccaacatatcagcaatccccttacaactacccacaggcctttgtatattcttcttatgggccatcagcatatggacctgaatacctatatcagcagaatgcatatggtccatatgttggacaacagtatattccagtttacggtggcccaaggacagtaggcccagcagtctacccatatgggcagtctggccaacctgtaccaagtgatcatgcttattctcttggttatgccccaagtcgtgttctcccactatcgaatcagaatgttaacgctgcaaatgttgtgcgcataccaccacttcaacaatttcctccaggagctccacgacctcagcaacagcttttggcccctgctcgtgcaccgccattcccacagaacaacgtttctgaacaagcgacaggttgacaaggatgccagaaagtgacgaattttaggtatcctatagtctgcagcaggactaagaaaagttgtaccgctaaattgggcggcatgcttttttcttgcaaattgttttcgtttgctctctaaaggttgtccctatccatggttacctgaacttcttataacgtgagtgtctgatctgctccgcgggaaggggcaggcaagctcgagcgactgaagatgaagcccctcttgctcagcttctgtcagtgtctgtacattccccatctgccagacatcctgatagctgatggtctgtgcaggaccaaagtggatgccggaaatggagtccggcctccaacctgtgtataatataggtcatgtagtggtccaaatcgtagaacaggtccattctttgaaaacatctggttgtgtatattaattctcttagcaccttcagtgcatgttttcatgtctcattagagggaataggtatttcaatgtcattgcattgtcagtgagtcatgtacattattatactgaaaatgtaaactatatatgtcatctgtgtcaactgacaactgtaatcaaataatgacatccctatcttgggaaagaacatgatttattgcaagttgcaacggatggggaaaactagggatggatacggatactta

SEQ ID NO: 288 - DNA, 1719 bp, Zea Mays
agccacgtcccaacaacttgccaattcgcaccgcgggaccggcgccgtcttgttgctccgctccggccgtgacacgagcgcaccagccaccgccagcccctcccccgtcgactcgagccacaggacaaggcatcccaaccgccgcccatctcctatcgtcatctgccgatccctcctcggttcctcacagtcacagagcctcacgtcacgtgtacctcccccaacccaacccagcccaacccagcccaaaacctagcgggcgaggggccggggaaccgaccgccggacgcggagatggaccacgcggcggaggcgcagcggacggacctgatgacgatcacgcggcacgtgctcaacgagcagagccgccacccggagtcccgcggcgacttcaccatcctcctctcccacatcgtcctcggctgcaagttcgtcgccgccgcggtcaacaaggccggcctcgccaagctcatcggcctcgccggagagaccaacgtccagggcgaggagcaaaagaagctggatgtactgtccaacgaggtcttcgtgaaggcgctcgtcagcagcggccgcacctgtgtcctcgtgtctgaagagaacgaggaggccatcttcgtcgacccggccctccgcgggaagtactgcgtctgtttcgacccgctggatggctcctccaacatcgactgtggtgtctcaatcggaacggtgtgtcactgtcactcccgatctttgggatttacatggtcaaagacaaggacaacgtgaccttggaggatgtgctgcagcctggaacaaacatgcttgctgctggctactgcatgtacgggagttcatgcacgcttgtgctgagcactgggaacggagtcaatggcttcactctcgatccttcccttggagagttcattttgactcatccaaatatcaagataccaaggaaagggaagatctattcagtcaacgaagggaacgccaaaaactgggatgggcctacagccaaattcgtggagaaatgcaagtatcctgaggatggttcaccgcctagatccttgagatatatcggaagtatggttgctgatgtccatcgcaccttactatacgggggcatatttttgtacccagcagaccagaagagtccaaacgggaaactacgcgttctgtatgaagtcttcccgatgtcattcctgatggaacaagctggaggccaggctttcacaggcaaacaacgggcgcttgaacttgctcccgctaaacttcacgacagatccccagtgttcctcgggagctacgatgacgttgaggagatcaaagcactgtacgcttcaatgtcaaacagcggttgacctttctgcctgaggaaacgagcgagatcaaaagcaccgtacgcttcagagtcaactgcttgatctttatagattgtaataaaataataaaagagtttgtaaaaaaaaacaacaacactgcttgatctttctgcatgaggataaaaagcgcatagtttccccggttggatatatccatcagatatttattatgttgttgccttctacacaaatttaacgtgctttcgtgattccttaatgcaactttggattcatgtacggagggagtttatgtgaagacatattacttggtgcagtttatctccaacaaaatacaaaaaaaagaaccttgtgcagttatacttcagtcttaatgtcgtgttcatcggatttgtgacgc

SEQ ID NO: 289 - DNA, 1753 bp, Zea Mays
cagtaaaagcagtttataattccaagataagaaattctggtgtttcagtttaggccatggagacacaccattgctgtggaattttgtttagtggtggtgctagatgcgcctggatttggagaccggaaactttatgccatttttagtgatgttgcaggctgccctttgtgctcaagttcttccgagacatcaagcatgtgcgagaacaaggagttatagatgatcgtgacactttcctccatgcagtgcgagatctcctatgttttcactcaaatgtccaagcaacatgccaacatacatgtcaccacatgcattggttcagcagatatcaacacttcaatctgacttgctttctcttcaatatgagctagagaaaaccttctagctgactagaaaagatgtatcaattaatggtaagctaacaaagcactgtctaataatttctttcctttaccttatttgctgtcaataatttctctagctcaaagagtcgggggaaattttatgcatgaacaggagtactatctacttgcgtggtgctggagggttttcagactcttcacgaccatactcatatgctacctatcctgctaatcaagtttctcgcatttctattccgaattcggcaccttctgcagtatgcgacgaccagacaaagcaatcccaggcattgttatacaggccatctggggattacaatcctttgcatttagacccagatattgcacagcttgctgggttcacccgtccaatcctgcacggcctctgcaccctaggatttgctgctcgcgccatcataaaatctttctgcaacgacgaaccgacggcggtgaagagcatcttcggccatttccttctgcacgtctaccccagggaaacgttgtccactgagatgtggcttgacggccagaaggtgcactaccaaacgaagcttgtggttggagaatcttgtgccacaaaccaaacatgttcatatcgtggccgttttggccatatgttgggccatctggaaatcaaggaatagaatgtctttgagaatattctaattaaatcacctaatgaaattatctgccatgcgagcgctctgatgatttcgtggacaggtttgagcaaaagggagctgcagcctgcagggcttgattcaagaaggtgcaaggctgctggtcagggcagcgagcgttaagttggatgctcgcgttgtcgatcaagtggaagaggagaacgatgatacagggaattaaaagtttggtatagtgatcagctttctggtggaagcctgacgaggattgtctacttttggatcttggccgtgtagctttgttctgcttctcttgtgctgttcttgtccgagtataaggtctatcatgacataatgcttgtaccatctttttcagtggtaacttattttttctcatgcagtgtatgtgacttgaaactttgttaggacatagtttgtgaaagggaaatggacccaacatttcctatagtcgattttggtatttagcatccatcacaaatgattatgaacagaagctatgtacttgtctggattttgtatatcatactgtatctatttttactcccgtcgcaacgcacgggcatgtaactagtaagttcttatgtgctaaatgaagagagaagtgcaaatcgaagagaaggtatgtttctagatttagtacatagtttttaagtactaatatgttttatctaagtgctagaaacagtgagaagaaaagaagaaaagaaccaaaaa

SEQ ID NO: 290 - DNA, 377 bp, Zea Mays
aaaaccacctcttaagagactggactgaaatattttagtccttccctttagtttcaatgtttgacaatttagagattaaatatgactaaaaagtagagacaaacaagccctttgcatttgcatcactgtattcatcttacgaagttctataaaatggtgagtttacaaattcagcgaccagagtacatttgcaacgtaaattgttttacataaaacggtgaagctgcgacgatggtacagagagacgcgctccggcagcgctctgctttttcagatgaagatccagcttcgatagagaacaggtaagaactagacaatttctgctccagggggaagtatagttaccagtccaatccccagccgcaggttttttatgg

SEQ ID NO: 291 - DNA, 1925 bp, Zea Mays
tccgaatcagccgatggatattttctcacgctcaatggccgatggccttatctatcgccgcgctgctctgcgttcgtctccatcagtttcacgcgcgcaggcttcttcctccagctcctgctcacgtcgtcgccttgcctgctcgcccctgcgtgctcccctgtcggcgctcaccttcatggccgcgcccctctgctcgtcgcccctccccagcagagatctctccccagcaaggttcctcccatggccatcgtgtgcagccacgagctccagtcttcttcttcctccctgcgtgcggatctcccctgctggcgcgcctaactccagcccgccgcggtctgtgacctcgtcgttgaattctatgatatgcgactcgacctcacctcgcttggccacgcgccaatgttcctgttcgtctccatctgtgaccaagccgagcccctgactccatcgtcgagtctagccccatgttactgcgctctgcgtcctcgccgcggtcgtgaaactgccgtggaattgcggtcgtttctctttgtgtcatgtgcgcagcacaccatcgtcttcatgtttttggcaagtcccggcgtgcgctcgcgctcgccatcccctgctcgacctcgtcgtcgaacttcgccttgccagtcgtcgttcttcgctcagcaaggtttcgttctaagctgcgccacccttcaagttcgcgtccttggcggactcgcacctctgtgtcgtgtctgctcgtccatgctgtcggcccgtacggactcgggtcttgctagtgtcgcgctgccgtcgatgcaacgcggggttgtccctctgctctgcccagctcgtcaagtcccaaaaatctgcacacacgtcatagttggtgctcaacatcttcgtgtcgcctttcgtgtgctgtaacacccccttgttactcgtcgtcaatccacgtcacgtccgcgacgtgctcgtcgaccccgatgatctatcttccaattacgcgctacttgtgttgagctctgaagccccctgtcgagctcttcctctggaagtcgccttcgagcacaacccctgccaagtgttcgctgggaggtctgaaccaatactcatcatcgatttgcgattatcaaatcattctggtcacggtaagctgataatttatttagaatagttcgatcgttgaataaattaatgtgttagtgcgaggctcattagggtgctcgataaattgtgtaagtcacgaaactctcgttgacttcgcagttcttgcgattatcgagccaaattcagtatgacgagttatttcgctattccggttaattagctgaattaatgtaccgagtagaatattagtaggcctgtgtgataaagaaatgtttgattaattgtggacatgtaaaatatgtgaggagtaaaataaaattaaaatagtactttgtgaacgatgtagtatcatttataaaacaagggataattttagaatttaattaattagctaatgagttgtgtttagtgtgattgtattaaaggtgtataatttgttgtttcatgatgtttgcgttaggttcggttaatctagagaagtgtaattattgcgcttagtcgtacgtcggtaactagtgtttccgtataaaattatacaacgcctcgccactaggtgtttaatacgctatcatatagcactatttagatttgtgccattcctgtttatatgcattcatgtgcataatgcatttcattcaggtacgttaattaatcgcgtgatgcggaagacgatccaagtcgaccccaagtgcggactaatccgcaagatgatgctggtggattaacctgaagatggataatcggaacaagtatcagaacaaaggatactcaccaagtcgtcatctaacaaacactaacctagtgtttcttccaggcaagccccggtgcatgcaacccct

SEQ ID NO: 292 - DNA, 1952 bp, Zea Mays
actcgcatatgagtcgttgcctcgcagtttatatccctactgtttcggactttcgggttttggccgacacccgacaatcttaacatcaaactcgtcgtccacgcctcctcggcaaggttgcgtacggcgtggccctaaggttcatctcgccgcctccctcaacctcttgattccgcctccctgaaggcataccagcgggatcaagctattttgctggccaaccgaacggtcaagccgacgatgacgctcggatcggcggcacacaagatcccgctggaggttgcgcacaccctcgtcgagatcgccgaggtcgcgcgctacgcctaccaccaccgccccggccgccctgcaacccacgagggggacccgactgcgccgcccgcaggggctgatagcagcgggggcaccaacgaggatgccgcgcggctgctggaggagaacgccatgctccgcgcccgactcgcagatgacctcgcgctcctgcgtgagctccacggcgcgccctgcgtctccaaggagtgccctcctgatctatacaaccgattgatggcggcggtcaacaatgttagcttccttgctcatctcgagaaattacaggatgagtcagcacgtcaacttaatgaactaacttctggcgacatgacagaggtggaagctgcagacattccggacaaagcgggtaacgggaagaaaggattgtgggtcttggtcccttgtgatacagctggagctaatttggaggaaattagtgggattgatgatgaaaattatgtcatagtaaatgaagacgatatagtcgatggtattgccgcctttgttgctaggtgcattcttgaagatccaaaatccaagtcgttatcgccaatgcagctccaaaagggttcgtctatcctccatgcaaccatgctgcactcaaacattgcaccgttaaatagctagctgtctgggtttctggggttcatcatttctgaatagttacataaattctcaactccgctactatatatcttactatgcattgatgatgattgtagccttttgttttatttatctagttttctgattacttgatgatatgtgagatatagtgtattgtacaagatgttaatccttatggtacctgagagtgtacacctatggtgtatgatggacaacgttgctaagttttgccactgtttaaagatccattgctgctttgacgaggttgcatatgtgatgattgattaagttgattttaagattgctatttgatgaagttgtactgtgtaggacatgttgggtacttttttctttcaatttctcattaaattaaccccactgggggtgtaacatgaatattagacagtatacatgaggttgaactttgtatttttttactcgccaacatcagtttcttattcatggctgagcttgagctgtgttcatgtgcaatctgatattttgttggatttaacttgtaagcagctgttgcaaaggcattagatagcatgaaagctcgatggagatggtcaaccttttgggaggctggacagattatatatatcttggctacttggggcatcacattagcagggttgtacaagagccgccatgtcctgaaggtggcagcaaagggtgctgctgtgtctgccagatttgttatgaaggccatttgagtgtaagaggcactcatgtgggatcagcaatttgcaaaatgtaaatacaaaactcgtcccgtcagttgtgcatatggttgtggcatgtttatcatgatgaagttatgatcatccagacatgaaaaactgtttcatttattttcgttgtatggacggtggtgtgattgcagaaaaaaaaaagatacatatgtgattacttgtaggatcgatactcgggccatgtttgtttccctcctaaattatacggagtataagctagactatggagctagactatggtgcaaaggtagtcctaaa

SEQ ID NO: 293 - DNA, 2046 bp, Zea Mays
cgggcatcggccggttgcggcggtatccataggactctcagattcccatctcgtcttcttatctccacttccccacacggcctcgcctcctcttccgtcctctgtttatataataataataataacttgccaggcgcgcgccatctcgctccgtccatccctgtcgccaccaatccatcgcttccgcttcggcctcaacgacggccgccaccaccgctcccatccctctcctcctcctcgcccagcggccattaccacagcctcccccatcaagccgggatggctgcacagcctgcactcaaggcgtcgttcagaggggagctcaacgccgtctccttcctcgactccagcaggggacctttcggccaacacaaagtggattttacgtttcaaaggaagggcaaacgagctatttcactgagaaggacatgttgttccatgcaacaggctccaccaccggcatggcctgggcgagctgttgctgagcctggccggaggtcattggatggcccaaagcctatatcgattgttggatccactggttccataggaacacagatcattcgtagtagttcaatgctattatattctgcagcactaatattcaatcttttacataacgcgaagacattggacattgttgcggagaatcctgataagttcagagttgttgctctttctgctggatccaatgtcacgcttctagctgatcaggtcaaaacattcaagcctaagttggttgctgtaagaaacgaaacattagttgatgaactaaaagaagctttagctgattgcgaagagaagccagaaattattcctggggagcaaggtgtcatagaagtcgctcgacacccggatgcaattacagttgtcacagggatagtagggtgtgcagggctgaagcctacagttgctgcaattgaagctggtaaagacatagcattggcaaacaaagaaacgcttattgcaggtggtcctttcgtgcttccccttgcacacaaacataaagtgaaaattcttcctgctgattctgagcactctgcaatatttcagtgcatccaaggcttgtccgaaggagcacttcgtcgcattattctaactgcatcaggtggtgctttcagggactggccagttgacaggctgaaagatgtaaaagtagctgacgctttaaagcatccaaactggaatatgggaaagaagatcacagtagattctgctactttattcaacaagggtttagaagttattgaggcacattatttatttggtgctgaatatgatgacattgagattgtgattcacccacaatctatcatacactctatggttgaaacccaggattcatctgtcctagctcaattgggatggccggatatgcggataccaatcttatacaccttatcgtggccagatagaatctattgctcggaggtcacgtggccccgtctaaatctttgcaagttgggttcgctgacgttcaaagctcctgacaatgtaaaatacccgtcaatggacctagcgtacgcagctgggcgggctgggggcaccatgacaggagttctaagcgctgccaacgagaaggccgtggagctgttcatcgatgaaaagattagctacctggacatattcaaggtggtggagctcacgtgtgacgcgcatcggaacgagctggtagcaagcccatcgctggaggagatcatccattatgatctgtgggcgaggagacacgcagccagcctacaaccagcttctggcctgagcccggtccctgcatagtagtaatcacatgcgaacgttgtcacgaccatggtgtgtatagcaagcagttctgagatgtggcgaagtgtgtggcccctggagctggatgaaattacatgcgaacgttgtcgctggaggggacatctctaggtcgccctcctggatgtagatcgtgcctccacagaataaaatgcatctgttccatgtgaatgtttttcatgggtggagtactcgaattcgggtaggaatcaggtgcatcactttcggttgaattttcctaattcattc

SEQ ID NO: 294 - DNA, 2585 bp, Zea Mays
caccatcatctgtctccataaacaaggcctgcagcgatgtgctccactgcagtgctgctagttcgcacatgcgttgtgcttgtgtgtttggccgccttggcgcgagcgccggccaaggtccatgctgccgccggcaccggggatgggctccttgctatccctaccaacgcctccctgtcgcactgcccctctcgctgcggggatgtccaaatctcgtacccgttcgggatagggccgggctgcttccggcaaggcttcgagctcagctgcgatcgcacaactccttctcccaggctcttcttcgtgtcggggaacagctcgatccaggtgacttcactatatgtccgcaacagtgtggtttgggtttcagctgttgggttcaacgtcaccatgagcgcaggcgtggacacctacaccaagtcttgggaggcccctactgccacgggtgtttgtttttatccagattataataatctgtacactgttggatgtggtgtctacgtctatgtgttcggtgataatatgacagatatcattggttcttgcacaagtatttgcacagataacagagagatcatggagagcgcaaacactggttctggtgcctgtgaagggttaggctgctgcagcattccaatacgtggcggccaaggcttcactctcaaactaggtcgcctcaatagtaccattccacagttcggtgaagcgctctccaatgtcaagattatcttttcgcaaaactatgacttcgttacagatgatgtttacgcaagttgggtggtgaatacaagcaatgttcacgccatgctacttaacattgcaatcacggatcaaccaagctgcgcgagtgcccagtcccaagagaacaaggatacctacgcatgcagtagtgaaagcatctgctacgactatctaccaccatcagtatctcaaagaggctacacttgcttctgccctggtcaaatagagggcaacccctatattgaagatggctgcataggttggtgcctctctgctgcttcctttttgctcgtttttccatgctttggatcaatcataactcctctctttgtctaccatatatgaagcatattacaacccagaggcgcccaataggaactgtatgagattatgtggaaacataagcgttccatttccttttgggattcaagaaggctgttacgcaaatgataacctacgactcgactgcacaagtaacgacactcttattcttgatcgagggtacgcacagtatcgcgtgaccaatttgtcacttgatgatgggcttctgatggttacaaacatgttgaatgacacaagctccaacaatgtggggaggataatcatcactagtaacaatgacaaataccaggaggttatggatggtaattatgatttctctcaggaggacgtggcaataaaatgggttatatcaaacataacttgtcagaaagcaatgcaaaataatgctacatatgcgtgcgtaagtgacaacagtatatgcaaagatgtcatgcgaggaaatatacgtgacgggtaccgctgcaagtgttccgatggcttccaaggaaacccataccttcataataactgtacagatattgatgagtgccttattccaaataaatgcaatggagtatgccacaattttgatggaggcttcaattgtacaagttgccctcatgggaaagaggattgtaattgggcttgtttgtggtcttggatccataagttttgcacttggtgcaattgtactcaccggtaagtggaaaaaaggtatccaaaggagaattcgaagagagtacttcaagaaaaatcaaggtctactcttggagcaactaatatcaaatgaaaatgctacaaacaaaacaaagatattcactttggatgaactagaggaagcaaccaacaagtttgatgctactcgtgttctaggtcatggtgggcatggcactgtttacaaagggattttgtctgatcagcgtgtcgtggctataaaaaaatctaaaatagtggagcaaatagagatagatcagttcatcgatgaggttgctattttatctcaaatcattcaccgcaatgtggtgaagctttttggttgttgcctagaagatgaggtacccttgctagtctatgagttcatatcgaatggcactttgtatgacattcttcatgaaaatattgcaacaaaatgcttgttgtcatgggatgatcgaattaggattgcaacagaagcatcaggagcacttgcttatctacactcagctgctgcaataccaattttccatagagatgtgaagtcttctaatatactcttggacgacaacttcactgtaaaggtttcagattttggtgcttcaagatctctatcccttgatgaaacacatgtggtgacaattgtccaaggaacattcggttatttagatccagagtattattatactggttctctaactgagaagagtgatgtgtatagttttggagtgatacttgtggaacttttgacaagaaagaaaccaatttttatcaatgaatcgggtgccaaacaaaacttatctcattactttattgaaggactacagtaa

SEQ ID NO: 295 - DNA, 1624 bp, Zea Mays
ggcaaacgacagaaatgcagtctgtggctgagatggcttctaatgcctatcgcaaacccagtgtcagtccatcagctacgatgctgaaagctctgcctatgcggttcctcgcctcgccggagcccggtgggtggagccggcgactaccacgacgatcgctgcggtcggtttcggcagcgctcatgaccaaccccgcttacttcgaggtgggaagattcttgggtggctatggcttcatgaacatcacaagttactcatcatctcaatttggagagccttcaaatgttgccggtattcaagaccttggtcttggatattcaccagaagagatcgaacggttgagggtccaagatattggagaaggagaagtgacaattagactttatgagggaagagttgttcaaggtccattcaggggcacacgggctgtatttaagacataggatttgaaacaaaggtataccctggagcccgtgctgatgcttctgaagctgatttgatggcactgaatgagttaaggactcatgcgtttcttcagagtgatgctagtgacatatgcgagaacatccagtttcttttaggggccttcgagacagcaactggagaacagtggctcgccttccgtgatgacgggagatatagtgctgcagactatgcaaatgtaactagtgcaaggcaattgaaggaaaaatctggagggacgccattctggaaccctttcgatcgagcatacaaattggagttaaggagatactttgttcttaagttgctgaacggtgctatgagtggccttgttcacatgcacaatcatgatagactgcatcaaagccttggaccttcttctgtaattctcaatacggcattggataaagagggacgctacttggttccaaggctgagagatttggcattttctgtagatattgggtattcatctattggggctggagtgctgtcggacggactatggcgtcgagcctctgctgctggggcttccactcctttggagaagcgagcctttggaatagctgatgacatttatggagctgggctgcttcttgcatacatgtcattcattccattctgcaaagcgggcgttatggatggtatctccttgcagagacttttagagagcacctttcggcttgacatttacgctgcaagagagtattgtctggcagatgaccagctgtcggaagcagtaagttttctagatttaggggatggtgctggctgggagttattgcaggcaatgcttaatccggattaccgcaagcgaccaattgcagaggctgtactgaaccacaggtttataactggagcagttttacgaaactactaatcagcattttttttacttgtataaagttgctacgtggaaattgtaaaagtacaataattttagtgggtgaagaggtgatacgtttcttggatgaacagtgcgtgttctctgtctgtcgcttcccattgcatggctatggctatggcgagcaaatagccgatgagcatacccactttcagctgcgctgcaggcaatcacctgagggaccgtagtgctgggagtagagatggcaatgggtacccgaaacccgatgggtttttaccccattagggtacgggtttg

SEQ ID NO: 296 - DNA, 3047 bp, Zea Mays
tcgtggcccacggacgtgtaggaggggacacgccgccgggcctcactaaccgcaggttcgggagtactccggaacccgccgccgcatccacacgacgccacgactgacgacggagagccccggtctccttccacggctccaccgccaccaccccgcataaaaaaccctacagctcgtattcgcctcatctcgcagcagcagcagaagaacaagggtatggcgaaggatgggggtcccgactggaacggcctgctcaagtggagcctcgcccacggcgacggcaccaacccgccgcgtgctctcagcgaggaagacagaaaatggttcatggatgctatgcaagccaacacggtagatgttgtgaagaggatgaaggagatcactcaggtgatgaaaactccagaagatgtcttgcagtctcagggcgtgacccctgagaacatcgaagatatgttggatgagctacaggagcatgttgaatccattgacatggcaaatgatctacattctattggtgggctggatcctctacttggttacttgaaaaattcaaatgctggcatccgagcaaaggcagcagaagttgttagtacaattgtgcagaataatcccaagagtcagcaacttgtcatggaatccaatgggctagagccactgttgacgaacttcaaatcagatccaagtacaaatgcacgcacaaaagctttaggagccatatcttctctaattcgtcataaccagcctggagtttccgcatttcgattgggaaatggctatgctggattgaaggatgctcttggttccgatgatgccagactccaaaggaaagctctcaatctcatacaatacttgctgcacaactacaaggcagacaggagtgttgccacagagcttggtcttccgaagctgatgatgcaccttgtgtccagcgatgattccttagtgcgtgaagctgctctaggcggcctccttgagttggcgcgggacaagacatctggtaacgcgctacctgaccaagaaaagctgaaagacatgctcaagagccgaatagaagggatcagcgcaatggacactgacgatctccacgctgctcgcgaggagcggcagctggtggattcactctggaaggagtgctacaacgaaccttcgtctctcagggagaagggcctcgtcgtgcttccgggagaggatgctccccaacagccgccaccagacgttgcagggaagatgtttgagccaccgcttcgtgcgtgggcggctgcaagacctgctcaggaagatgactctgactctggcagcggaaagaaggctccgccattgctgcttaagttttgacggccttcttatgccgatactagttcttaggctccaccatgggtgttgaaagctgaaagatcagatctgatggatgcctgaccttcttcgaacctcagttgtggttcttgtaatttgcaccgcatttctgttctgagtatgtttttatgagaagactgggaagatgacagacagatactgtatcacgtgatgctcgtaaattaacactacatgcgaattctcttgctcgattgctcattttctgatgcttccatgattgctgatatatcttaatccgatccgatagttataatttcacgggtctagttctagagatgctgaagagcttgcgcctgcttgcaggcatatgttactttcagcttgaaggatggccgtccgattctcgcgttcgatctggacggtgggtgattttgcctactcccgtccgtcgatgattcgtcgcgagccattcagaaggcagcaaatctagctatctcctctgcctcctgctggcggtcctgctgcgccatggcgctacagctgcgggccgccgctctctgtccgcccctgccactcaccgccttccatggccgcctcgttgcaccttggcctccgcctcccttggtcagcatagctgtcgccgccgcctccagcccgggtccctccgcgcccctctcctgccgcggcccggcgcctcgctggcgacgttcgagcgtgagggcgcgcaccggggccggcggcggcgggcagagggagtccccatacgaggtgctcggcgtgtcgccgtcggcggcgcccaacgagatcaagcgcgcgtaccgccgcctcgcgctcaagtaccacccggacgtgaacaaggagcccaatgctcaggagaagtttctgcggatcaagcacgcttacaacactctgatgaactcagagtcacgatccaagtacgcgagcagcagttcggattcgtcctggtcctccagctcccgggagagcaaatcagctgctgcagaagagccgttctatggatttgcggacttccttaaagatttgcaaacagaatttcagaactgggaagctgggttgaattcggatcagaaacctaaaagcctttgggaagagttggcagcaattggcgaggaatttgtagagtttctggagaatgagttgaagattgatgactcgagaccagaggacgtcactggagatgacccatacacccagtttggacagcaggcaaaaagcgctaaggatgacaagacgtcgacgaacagctttgatgatggtctttctgaaatagaggccgctcttgagaatctgaagaaggaactcggactgggctaaaccgttgatgtggcaactagaggtgttgctgctgctactgacttagttccttgttcatacaaagatcgtaccaacgatgctggaaccatacacggtttctgcaaaaccattgttgacgcacagaaaaaatcagagatcatcatgaagattgtgtgttacatctattcttttatgaggatgatcttcagggagaacaccttaggttcttggtttaccattgaagactgagttgaccgcatacagtttcacatataaagatcaatattttcgccagtttccgtatgagcagtcttctactgttggtaatgatacattgttgatagacagctattgttcatgtcttgtatattagccccttgtttatgccgtacatattcagatattatggtgcaagtgga

SEQ ID NO: 297 - DNA, 2420 bp, Zea Mays
gttatttctaactattaagtgttaattatctaatgtatttaatgaagtaacacagttagacttgcctaaagaggccagtgaagcttcactggctgcatagagaagtacttttttattatcatgtaaatgcatggttctttggaaccatttggcctatctgattaattattactataaccgggaatgggggcccgaggctataacccggactcctcgccctcgtacctcgttgctggcgaagagcgtcatcaatggcgagtggaggttcactacacagccgccggatcttggagcatcattcgcggtcttggcgcgtctacgcaactgtatcctaagggcgtcgaagaggagagacggtacgccggtggcgacaaggtacgatagatttgaactggagtgtggaggtatcgtcggccagtgccatcagcgatgggtggaggtttccgtcgagtcgaggaaggagcgcttcgtgtaaaggtaccaaagtaaacaagctctggacagattcagtttcagtttcagtgatcctgtttgcaacatccaagcatcctgtaatcacctgtatagcagttacacctgttcatgtacatgcttttaacaataaatcaacaacttacatgatagctttattgtagatgttgtttgtttattgttattatcttatcggaagtgccgtcaaggaagatgacgatggtggtagggatcgacgatagcgagcacaacttctacacgctgaagtgggcgcactgcagcacttcttcccgccgaccaagctgcaacactactgccttgttgtcgtcaccgccaagccctctgtcgcctccattgttcgccctgccaacctagtgcaggcaccgcgaatgtgttgtcgtatgtggggagcagacagtcaacttgcatctaggtctaaataaaatagtagtgattaaatctttgaatctgtagatcaaaccatctcaagtaattttagttttgttatgaaaatttttagctcagatgaaataattgcattttgattattaagatttaacatacatctggttctatgaggaaggaaatcataagtggagattgaagttgatcaacttgacactcgaataaaagaatcaacaaatattgcaagtgctgaaagttgtgactgctcaagtccaattgctttatcacacaagttctggtggagatacttattctagaatcttcaaaagcatcaacgttagtgttcaagggactgattctggactttcaacttaatgcttctctacctgttgtcatactgaagctactgctcctggaagagcatcaccaacatatccctgatggccctctctgcttcatgctccaagcacttggatgttcaccttgaaatataattattaatagggactgtccaaatacttcagctaagcaaaatagcgacctccataaaaaagcaacctgtaactatctctgaaaattttgaaaaaaactgatggtaactgataagctgctgctagcaactaccgtcgcctatttgttttgtttcagaaagttaaggtgcatgaacctctgatatagcatttgacacactgtactttacacatcacccaggaggaactcttgtgtgggtgtgggtgtgggcagggctagaaggaagaaccatgcatgctactacattcatataatctttttcagaggtttaagatatcaacactaatctgactttgattgtctgaaagaatttatcatgctgctgcttactgttttcggtagggggtcaatgcttactttagctgtgcaataattcctcaatattaaaccgagtttgatcaagtaccttgaagctacaagtagcagtgatttgacaggtttactactgcctgaaacatgattgtaagtgttcttagtatatagctcttctccatttcctctccaactgtcacatgtgctcatacgcttttgccttagtttattacatgtccagaacaccaacataaagaaaacctgccctcgattagcattattcagtagagagagttgtggagaaataaagttaatttgtttgttggcgcaactaattagaccacgttttcattaacaataatactaacatgtttttgttgtagggagggcacattgtggcggctacgagagaccgattttcctgtgtggtggtgacaacgacaccgtggagccaagtcaatgtcggcaagctgatttttcagattggaacctatggttctttttaaagatcgaatatgttctagcatctttaaaagatttgtcagaatgtaaacatttgttttgaggtcatttaagcctcaaacaaaatttcttggacttatttcgttggagggaacgagacatctcgagatctaaatgtgtatagaacatatattttttatgggtatcaaatataattgtgtgtaaagcacgtacatagt

SEQ ID NO: 298 - DNA, 1405 bp, Zea Mays
ctctcacgtgtcaccgacacccagccaaaacaaaaaataaaccaagctcagtagtactgcctcacattcacactgacactgtcacacacttccgtcttcacactcactctttacacgaccacgctagcacgccctctccgtctctccccttccggttccggttccagtggctgcatccgctgcgccaccccccgtctgctcacccaagtcccaatcccgcagcccggcggcatggcggtgagcaacaacatcacggcatgcatcaacttcctggtgcttctctgcaccatccccatcgccgcgacggggctgtggctggcctcgaggcacggcggcgaggactgcgccaggctggcccgctggcccatcgccgtgctgggcgcgctcctcctgctggtcgcgctggcgggtttcgcgggcgcctactggaaccgcaggggcctgctcgcctgctacctcttcgcgatggccgccctcatcacgctcctcctcgccctcctcgtcttcgccttcgccgtcgcgcacgactccggcgcctacccggctcccggcagggcctaccaggactaccgcctccagggctactcctcgtggctgcgggggtacgtcgccgacgacccccgcaggtgggagggggtccgggcctgcgtcgccgcctccggcacctgcaggaagctcgccatggatagatcattcatcgtgccggagcagttctacatgtcgcacctctcgcccatcgagtccgggtgctgcaagccaccgacggtgtgcgggtacgcgtacgcgaacccgacggcgtggacgggcccggcggcgagcccggcggcggacgcggactgcgcggcgtggagcaacgaccccggccagctctgctacgcctgcgcctcctgcaaggccggcgtgctgggcggcctgcgcgagcagtggcgcagggccaccgtcccgctgctcgtcgccaccgtcgcgctcatcttcgtctacgtcgtcggctgcagcgccttccgcaacgcgcagaccgaggacctcttccgccgctacaaatggggaaattattaacgatctctcccactgatctacatctactacgccacaggattttcacatgcgcctcggagagaccgagaatggactctgcgttaccgtacattttcagcaatccggttcaccaagatttgggcccaatggcccatcacggatatcccatccgtggcgtgtgctcgccaaattggagcacgccgtccgcgctcttcgcgtccttttgtttgggatggttgccagttatattaaggtcgctcagcaattatgtgttacatgcaaaataaacataaaaataaactgtaacactgggtgtatttaaatctatagtcctctattatctatatctattaagacgatagtgtagact

SEQ ID NO: 299 - DNA, 1442 bp, Zea Mays
gcgccaaacaatcaaaccgggacttccttgtcacagtccatgtcgtagctattatgacatgggaatgggatggatgctgaaactttgctagctagctagctgaaaggctccggccgggcctggctggtacacacgcccagatccttgttgtgcacgtacgttccaaacttgctcatactactcagagcgcggcgacatgttcggctttctgaaacaacggaggcagaccccgtcagggttctcgtcgtcgtcagccgccgaggaggtcaccgccggcatcgatggctccggcctcgtcgcgatcgtcacgggcgcgtctagtgggatcggtgccgagacctgccgagttctggcgctgcggggcgttcgcgttgtgatgggcgtgaggacaccgtctgccggtgagcgcgtcaaggaagagatcgtgaagaacgtccccgctgccggtatcgacgtcctccaacttgacgttagcagcatgtcatccgtcaagagattcgctgacaacttcaacggactaaatctcccactcaacattctcattaataatgcaggaatcgcattttctcctttcaccctttcggatgatggaattgagttacaatttgcaacaaattaccttggccattttctactcactaatcttttacttgaaaagatgaaaatcacggccatggagagtggaatagaaggtagggttgtgattgttgcttctgacagctacaagcacacgtatcgagagggaattcgttttgataaactcaatgatgcatcaggctataaaggcatcctggcttatggccaatcgaagctggccaatatattgcgttccaatgaactttcttgccgcttgaaggaagaagatgcaaaagtagtagtcaactcactgcatccgggagttgttgccaccaacatcacgcgccatctgggtatcataaaagatattctttctccaattgctaaacttgtactaaggggtgttgaacaaggtgcagccaccgtttgttatctggcattgcatcctcaggttgctggagtcaccggcaaatactttgtggatttcaatgctgttgaactaaaaccgcctgcaactgacaaggagttgtccaaaaagctctgggattttagtgtcagcctactccagtgatataactgccgattagttctcctacgccagctggtaaataaaggtcgatctgaatgagagatcatgtttcagtaatagaacaaggtgatccagcagtgtaatatctactactacttattgtttgactagatatggatgccatatgtttgtaatttgaataaattgattggatacatttctgcacttgtttgaattgtggcaatgtcggacatgtctaaagatgtgatactattgagtgttgagatgcacatttttttttaaatcctttgtccataaaatttccgtttatgtgctg

SEQ ID NO: 300 - DNA, 1216 bp, Zea Mays
gacgctgaagtgtgctccgctccgcctccgcccgcggccgtacgctcccgagctccacccgtcgcgccccgaccgagatcgtccccggcgatggcttccgcggtggccgcttcgaccgctacgcggttcctgccgcggcttccggacccgtggtggacgcgtcgtgcgcgagcggcgctcccgccgccgccgctcacgtggcggcctctcccgttcacggtgtccgccgcgtcgtcccgccctggggaagcggaaggaggacggcgcgggaggatgcggaggcggcgcgccaggagggcggaacaggaggaaggcgtctcgctaagctctgaaaaggagacggtaaattctactccacgtgctcaacccaaaaagggtgcagaacccgtagcggtgtccagcacgagtgggaaaggctctgccattagaagggtgacacttgtgattcttgctgccgtgctttttggagttagcattgccttgaaggacggggccgagaaggcatcggagtattttgctgggtatttattggaacagagtttgtcggtggacaatctctttgtttttgttctggtctttaagtatttcaaagtgccaaatgaataccagaatcgagtactttcttatggtattgctggagctgtggtcttccgggctgtgatgatcatcctaggaacagctaccatccagaaatttgaggcggtgaatttgttgttggctttgatcctgttattcacttcttacaaggctacaccattgctcttgactttggcagtgattgagctgagtgatattgcctttgctattgactcaataccagcagtttttggcgtcacaagggatccacttataatactatcatcaaatatttttgctatttctggtttgcggtcgctctatgtgctcgtttctgaaagcatgggtgaattggagtatctacagcctgccattggtattgtgttgggcttcattgggacaaagatgatctttgacttttttggttatcatataccaacagaagcttcgcttgcaattgtaactacatgtcttagtggaggcgtcatattaagtcttaggaaagcatcaaaagagaagggggacaagtagactgatgcaacaacacatgcaggttagctgcacatgacatggtgcctttattgcctccacagggtttgccatgttgctgcgaacaggattgcctaaagtgtagttcggg

SEQ ID NO: 301 - DNA, 2388 bp, Zea Mays
cagctatcctcatggaccgaaggtccatgacagacatgtaagactcgttttggaccaaaatctgatcatggaatggccacttcatctgcgggaagtatgactcctaggtctccaataacaactccaagatcaaatcatatagacatgcttttagccggtaaaaatgcaattaatgagagtgatgatcttccacagattgtcgaacttgctgatattgcacgatgcatagcaaatactcctctggatgaagaaagtgcattatctcaaatggttacctgcatagaagatctccaagaaattgtcaactgcaggaagcatgagtctctcacagtgcagacatttggaacacgaatagaaaaactacacagggagaagtatctgcagctctgtgactcggttgatatggacaaggttgattcagcaagcaccataatggatgaggaagacaacgttgttcgtagcttgcgcgcaagtcctgtccatccaatcaaggatcgcacttcaattgatgactttgaaatcatcaaacctattagccgtggagcatttggacgtgttttcttggccaagaaaagaactacgggagacctttttgctataaaggttcttaggaaggcagatatgattcggaaaaatgctgtcgagagtatattggctgaacgtgatatattgattacagtcaggaacccttttgtggtacggtttttctattcgtttacctcacgggacaatttgtatctggtcatggagtacctgaatggaggggacctttactcattactgaggaatttagggtgcctggatgaagacgttgttcgtgtatatcttgcagaagttgtactagctttggaatatttgcactctatgcacatagtccatagggatctaaagcctgacaacttgttgatagcccatgatggacatattaagttgacagattttgggttgtccaaggttggtttgattaacaacacatatgatctgtctcgtcctgttgttagtggggcttcactgtatggagatgatgagcctcagatgaatgaattcgagcaaatggatcaccgagcacggagacaaaatcgttctgctgttggaactcctgattatttagcaccagaaatccttttggggacaggacatggttgcagtgcagattggtggtccgttggtgtcattctatttgagctcattgttggcatacctccgttcaatgcagaacacccccagattattgaccgaagatcctcatcaacgactaggagcaaatggcgcctcagaggttaaacaacatccatttttcaaagacattagctgggatacccttgctaggcagaaggctgcctttgttccctcctcagataatgcatttgatactagctacttcaccagtcgctattcctggaatccatcagatggaaacatatatgaagcatacgagtttgaggattccagtgataatggaagccttagtggaagcagtagttgtctgagcaaccgccaagatgacatgacggaggacagcgatggcctcaatgagtttgaatctagtgcaaatgtcaattattctttcagcaacttctcgttcaagaatcatgcttccatcaattatgatatgttcaccaaaggattgaaggatgatccaccgccaagaactgaaacgtagcaatcaatccaaatttggactctcatccgagtaatcaaacagtctacaaggtgctcgcgcgatatcaaagtgtgaggcatggtctgttccaattgaggctgttcctacatctcccggagccgagtacagttttgctgttaccttgttttcatgaccaattgacatgccatcatcagtgaatcacccttgaccgaattgggcagagcgctgtctttttgttcccctttgcttttttttttaaaaaaatcagtccattatgagccttgggtttgcggagattggcccaggttactgtattcagaatacaacccctgaagatgtaggtgggttttaggaaattgccattctggcatttatagttgacgatggtttgttaagctggtagcccgctggatttcctgcggccagaaatgttcacagcattttttatggccatgggatacatcattttgctaaatgtgtccagtgtcccacagaatctgggacattataagaataggaaccgattgaggctggtgctgtttgtttcaacagagagtacgggaacggtaaatgcaactagcaaacggtgataattgttgcaaaggaataaaaacgctctctgtttggttcagctttgggagcgcagcgtccaaatagttgccgctgagactgaaagtttggctactgtatttcaaaatactctttttagtccatttagagtagggatttagaatagaatgagc

SEQ ID NO: 302 - DNA, 1630 bp, Zea Mays
cagcacgcagcacgcagcaccagccaccacaccacccgtcacgtcactactgctccttcctttgtcctctcctgcctcacgtctcacgccagcagaagcgccaaacaccagcagcggacgaccacgccaactctaggtctacgaggaaggggggggggagggaggagcagcgcagcggcagccgatggtgtcgacgagctcgacgccgcaccctctggatccgtccgtcccggccgtcgtggggggcggcaaggaggaggaggaggaggcggtggagtcttgtgccgccgccgccgccacgcccttgccgccggttgggatcgacgacgaggaggagggcccccggagagtgcgcaagccctacaccatcaccaagtcgcgcgagagctggaccgaccccgagcacgacaagttcctcgaggcactgcagctctttgaccgtgactggaaaaagattgaagcatatgttggctccaagacagtaatacaggtctagttaaatctgctcttcggcactcaaatttgtgccgttgttttcctgtttagttggttggctttgtcacacagtgttttaggctagttatggtttttggtcacgctgttttaggtgaggaggtctacatttttgaagtaccaactaccagcataggctcttttaacagattaggagtcacgcacagaagtactttttgaaggttcaaaagaatggaacaggtgagcatttgcccccacctaggccaaagcgaaaggctgcccatccatatccacacaagtcctcaaaaaaggcccttcaagttgtcttaccacaacaagtttcacacataatggagcaaggctgtggtacacctatggatgtagctactgttgctacagactctagtgtaaataatgcttttcctgttcaacatttcagtccgaggcatacacaagccatgccagactttgctcgtgtatacaacttcctgggaagcatatttgatccagagacaaatgggcatttgcagaagttgaaggaaatggatcccattgatgctgaaacggtactgttgctgatgaaaaatctgtcaatcaacctaactagtccaaactttgaggagcataggaggttgctctcttcggatgcctcaagcatggatcaaaagtcgggctcttcccgggttcatctcccgttcatgataacgagcaagtgagagaagcagctggctggcctgaaggcaagaaggtcgtttggagtcgtcacactcaggagcaaggcgatgcgtatgtacatatatcttaataagcagctttaggatagcttggtttgctcgaccgacatgttgcaagtttatgcgcctttttctttattctccgcccctccagttttgcccgttgtagtatggaacttataacatgcgtgttttatgccgcatcttacaaaatatttttgtcccatcacaaggatgaacgggtgggggcatgtgtgtgttttttttgccgtgtgtgtatgtatacagcatgcggctgtatgtgtagatcaggctatatatataacagactgtgtgctgttctattattgccctcgtttcaaatacttattttttttgccgttattaataatattattacatggagtatggtattagtatat

SEQ ID NO: 303 - DNA, 1664 bp, Zea Mays
gtacatgcatttgtattctattaatttttagagtgatttattatttatcaaatcatgtcattaatgtacagaaatcacttctactgagtatgagaaacaaagggcagcaaatgtgatgaggaacaatcagatgttccaacggcttgggattaatcagttacgcacaatgatgactgctacaagagtaaagagcaaatatgatggtccagaggaatcagggtctttgtttgatggcgaggatagtgaaggctctgagccagaggaggattcccatgttgcacaaggtgtacgtagccacaacccaactcatgttgctgacaaacctacacaacaaacacgagattccaaaagggttgtggcccctgatgttcatggacaacagattagattcactaggcaaaggagtgctgccataaatcaacaatcctccctaagcctaactactactacacaagctggttcaagagccaccacaaaccaagaatccacccaaaacttggctgctgcaacacaatttacttcaagtgttgccactgagcaagattacaccgcaggcctgactactactgcacaacctacttctcccacacaagctgaggtcaatgacaacaatagagatgaagaattggtaccaaggcaaagaagtaggggcaaacaacttgaatccttgagcagagggttaggcactaagattccaatccaaatctctaatgggaagcgaaggccagagccacctattcagactgcaaagtttgcatcggagggtgggatcatattgaggcaacacattccaatatttccgcactggaaggagtacaagaagcaagagaacgagggtaaaattacagactacattgggaagcttgctggtcaattcaccatggatgttgagagtaatgcagtaaaagatgcatgtgttgatatgctaaagggtggacagcgccaaatgaggtataggctgaaaaaaaagtacttcactggagttcctgcaaatcaagtgaggactacatcacctgtttcatgtatcactgatgatcaatggagagagttggtacaaatgtggtctagcccaaaccacaagaacaattgtgtgaagaacaaacttaatcgtgagaaggtgcaatttccacagtgcacaggatctcaatcatatgttgcaaaagcttatgtagtgagacaagaaaaatataaagatgtcgaacctagtgcaattgatcttttcaaggagatgcattgcagcaagaaaaaaggatttagtgaagttgttcagaaagccatagtaaatatggataccttaaaagccaagtcacaagcatctgaggcaaccattgctaatcaatcaactgagattgcagatttaaagaagtccttagcagaaaatagcatcctacttcgacagatattaagtattagtcgtgatcagctgaatccttaagcatgcttgctaagatgctggtgtcaaccatcctgaatacacatctcacaaaactgtggacctctttttatccttatgtttgctatatggaactgcaacttacagtctattatatgtgttctcttgctatagagttttagtacttgtctggttaaagaattatgaaccatgttcttttgtgtgttggacatattatgcttgaaatatatggatgttggaaaaagttgtg

SEQ ID NO: 304 - DNA, 1824 bp, Zea Mays
acaacccgatcgcccacgcaaacctctcgacagaccacagctcgatcaaaccgcgaatgaaaaaaccacaaaaaatctcccaattctcgcaaccccaagccggccagcccccacgatctcgaatcccgatgctctcagcatctatcaactcccgagcggtcgtcaccagcgcatgagctttctccgctcgctggcgaactccttctcctcgctgctcttctcgtcggggggcgagacggcgcccatggacgcggcggggtcggcgccgtcgccggcggcggtggtgagggagcgcgtggcggtgaagctccggggctacttcgacctcgccaaggaggagatggacaaggccgtgcgcgccgaggagtgggggctccccgacgacgccaccgcgcactaccgcaacgcgatgcgcgtcatgctcgaggcccaggccgcgcgcgtccctgatgccgtctcctccagcgagagggggcaggtcagggtgtaccaggagaagatcgccaagtggcaggcgcaggtcgaggagcggctcagagtgcttggtcagagaagtgctgaaggtgccactgctgcagtagtgcctaagaaggagctactaataaacctcaagagttggatgatgctgttcttcgaagactggtgaaaagaatatatgtgccactacctgatccaaacgtacggaggctacttctgaaaaatcagctcaaaggacaagcattcaaattgtcgagtaagtgctccagggtttctctgtataactacttgattgtggtggttgtatatgtagcacagtctttttatgtttggcacggtagccaacctggaactgatccctggcagaccatgatttcgaaagattagttgtggagaccgaagggtattctggaagtgacctgagagccgtgtgcgaagaagctgcaatgatgccaataagagagctcgggccacagagtattcttgctattaaagcaaatcagttgcgacctttgaagtacgaggatttcaagaacgcgatggcggtgatcaggccaagcttgcagaagagcaaatgggacgagcttgagaaatggaacgaggaatttggttcgagctgacggcggctcgcactgcctgtgcctgatgatgatcaagcggtcctatttccatctgtatatatgatttatgtctcccacgctgtggctcacaacacaaggggtcacaccatgcgcccattgatgcgtcctcgttgggctaggcagcacaacatcgacagaagcagaatgtaaaggtatacttctggcaacggcctatacagccattgagggctagtttgaaacaccgttcaagggattttcatttttcaaagggaaattagctcattttcccttgtaaaaatgaaatttttttaggaaaatggtgttcccaaactagccctaagtattgctgttgcccaagttaaacaaaaaaacgtgtctattattgggctctgtttgtttaccctctaaattatattatccagcttaaataagttaagagataaataaacaacacaacatagattattaggtggattatataatttagatacctagattacgataattcataagcaggtcattggatgcttatagaaataagttaagacataaataaacaacacacaatacagattattaggtcggaggctcggagctgcttgggccgaagggcgaaatctgtgtcgtcgttgtctagaaagacaaacacaaaaagctaaaggcttatctgctgatatgcgttgtacaacatacatagataatgcctgctaggctgtctgtatacagctgttgtatattttgtttg

SEQ ID NO: 305 - DNA, 2434 bp, Zea Mays
atgcttcatgatccactatttcgccgtcgccgcaaaatcctccgacctcgctcgcgccaccgaaaaccaaacgaggaaaaatgccgtccccgtccctcctcctccgcgctcctcctctctgcccctccccgtcccaccccccgcgccgcttcgctcccccctccctcatcacctcgtctccgcctgcccgcctcctccctctgcgcctgccctccgccgcgtcccgccacacgcctcgcgccggtgacacgcgcgtgcccgacgacctcatcccgatcgcgcgctgctacgagggccgccttgctcgactcgagctcgccggcgccgcgcgccgggaacaggccgtcgcggcagcggccgcggccggcggaggggcttcggcggaggaccacctcgccgccggctccgacgccatggtcgtcgaggcattcctccccgggccccatggcggtgggacgaccgcttcctccacgcgagtgattttgcaagccaaggaagttaaagataaggccagtaagatagagaaacagttcggatctgattttttctttgcaaatcaacctgattcagagagtatgttggctatggcctttaagcaagttgtaattcagcggctctcaaactttcggctcgaggtcttccccccaggttcagagagagacttccaagattttggcaaaccccgaaaggggtctttggattgtagtatcagctcatcagatggaaaacttctgtcttctcttgctgaggccattttctcctgtgtcattgaggatgtcagaaaaaatcattttgggagcataggcagtttttttcagaagcgacagctcaactgctcaatggattcctcagtttgtatacacaaaacttctgaggcagaagtagtgaaaaatgctaagaggtgtctggagatcgttagtttaatgaagtcttctcatgaagtacgtgaaacaaagaatggatggtggccacctccacatcatgaaagtttggtgaagattgggggtcctgagttagtgctttgggccaatgagtacattcctacttataagctgcaaattaatgccaacgcattggagaattctaatcttgaagttgaaggtctttatgagttagaaagtaataggcgggaagttctcttaacccactcacaactggtggaactagggaacgttctagacatgtactttgaagatcaattcacattaccaggcaaaacattccatccttattggaatccagatctgtcaaagattaaaaagaacaatggttacttgaacaaccttttcacttttttggctgggacctgtatttttctttttgtcaccatctttgctcagttatgctggcctcaatcctttagagacaaaaggctattcaaggaaagttcaaatgcctcattatctcagaactattgttccgatatcaagtctctttataacagtgaggtacaagcttattgcatgtcacttgttaagaaaatgaaagactcgtatggctgccctggtgatgtaatggttgattctcacattggagcatgggttggagaactacctaactgcttcaaggcaatcagtagtgaggatgctgctgcttctggctcttttcagtatcctgacactcttagccaagaaaatcaatcccagccagtgccagttaatactaagatgtctcatttggaacaaaatgatagaacccaggaatttcctctgcagaatattgctagttttcaggtggtcatgtcagaagaaggtaaagtagtgggatttcagccaactaacctcccagctgtgaaccattgggcaacaaacccactagcaacacttctgtatcaaggacggtcactttctccagcgagcttcctcagattgattctactgcaagattgtgaacagttccaaagatgtgaaacgaaacaaatagtggcagctgagcctgaacaggatttaacaagggcacccggagactatgacccataagccctccagctctctatggttgaacacttgaactataaagtcttatattcagaagtatctaccgagtaggatcaaacaccattcgagtactttcttgggagaaaccatgaccactcttcaaatcttcaagtcttctatatttgtcaccatactatgaagagtctgttgtgcaattctgatgtttttttcgaagaactttgaacgcatcgtgatgatatctatcccgtggcacctaagcctaaaattggcttacaccaagccaattatagggtctcctaagttaattatagggtcttgaacatccttcaaattggctaccctgtgtcagctacagggtcttacatccttagtgatattgatgagtaatgatcgcttgttattttttttttttttggtaaaaataacccttggcaatttcatacgttggtctttcaatgttgaataacagttcccga

SEQ ID NO: 306 - DNA, 1284 bp, Zea Mays
gcttctccagttctcctgcactctgctccccatattttatcccttcggagctcggatcagacgcttgtgaatcctggtcatcattcatggagaagaaggcagctactacagaggaaccccttctcgcgccgcggtccgagcacacggtcgcggcggaggccaagcggctgctgagcctggcggggccgctggtggccagctgcatcctgcagaacgtggtccagctggtttccgtgatgttcgtgggccacctcggcgagctgcccctcgccggcgcgtccctggccagctcgctcgccaacgtcaccggcttcagcctcctcgtgggcatggcgagcgcgctggacacgctgtgcgggcaggccttcggagcgaggcagtacggcctgctcggcctctacaagcagcgggccatgctggtgctcgcgctcgcctgcgtcccgatcgccgcggtctgggccaacgccgggcggatcctcatcctcctcggccaggaccgcgacatcgccgcggaggccggcgcctactcccggtggctcatactgtcgctcgtcccctacgtcccgctcgcgtgccacgtccggttcctgcagacgcagagcatcgtcgtgccggtgatggccagctccggcgccaccgcgctgggccacgtgctggtgtgctgggcgctggtgttcaaggccggcatggggagcaaaggcgcggcgctgagcggtgccatctcctactccgtcaacctggccatgctggctgtctacgtcaggctctccagcgcgtgcaagaggacgtggaccggattctccacggaggccttccgagaccttctccggttcaccgagctcgccgtcccgtcggcgatgatggtctgcttggagtggtggtcctttgaactgcttgtgcttctctctggtctgctgcccaatccgaagcttgaaacctcagtactgtcaatatgtctaaacactggcgccttgctgttcatggtgccgtatggtctttgcacagccataagcacacgtgtttcgaatgagcttggtgccggcgagcctcaagcagcgaggctagcagctcgagtggtgatgtgcatcgccctgtctgcaggcttgctgctcggctctaccatgattctcctgcgcagcttctggggctacatgtacagcaacgaacctgaagtcgtcacgtacattgctaggatgatgccggtcctggcgatttcggcggcggcggcggcaggggcagggccagtggctagacgccactggtcttcttagatattagtatagt

SEQ ID NO: 307 - DNA, 698 bp, Zea Mays
agttagcagtcccttagccttctcaaagagaccacatttataatacacctttaacaaagtggccaacataacctgcaagtgcaatttaatttagaaggtactccctcacttcaaaaggacaagaagtacttgttttgaagggaaaaaaaatcaaactcttcatgttttgaccaataattaatcaagttgtaagtatgttcagtgtatatactatacaattagatccatatgtcaaagttcttctacactaaattggttttgtagctacaaacaatatattttgtgagaaaccaatgatcaaagtcggtctgtcaaaataaaataaaccttcaaacacagatgtcaaaataaaataaaccttcaaacataggagaactgcttatcattgccttaacagaagaaagaagccatacaagaaagacctcgcaaacctagacacacatatataaaaggtaaacactaaacatcttgagtacaagtatagccgcaacacataagacttcaggaaagaagcaaaagtgaattgcaaagtgaatagtctatgatagaagaagttcacccgacgaagatgtttagtgttaagtgaattgcaaagtggacagtccgtccggaatccggtgaattgcgaagtgaaccaacaatgcctgacgcagcttcccgagggatcagcgtcgaggcgctgtccaccaccgggactt

SEQ ID NO: 308 - DNA, 613 bp, Zea Mays
aaaaggcgacggcgagctagagcatagggcgccgcgagctgaagaccgacgcaagaagtttgaatggggagcttcaacagggaggaacagggacacggcaagctgacggcgttggggaggaagatactcgcgagcagggagatacgcccggggagccaagtattgagaggtcctggccgacgaccagacctggctggagcgcaaacagtggatggtggtgtggtgactagccgggttggtgaccaacgacgcatgacgcggacacgttcaggtagccgcggccatggtcgagctcaccggtgtgccgagtacggcgtcctgttgtcggcaacacgggaccagaggtgcggatggtgagcaccccatttggtggagcagcagagcagagatatgcctgctggtgagggcggaacccgccgaagaccatgaagtatgggtgccgagcgccatggatcggagctgggagagagggacgcagggaggacgccacggctgggagctgctcgcggcagcaggcgcggtaccaagcacggccatgggagcaggccgaacgcgcgtcgcgagcagagaaaaagagagtggagggaggagagaggagcgcggacgagagccg

SEQ ID NO: 309 - DNA, 325 bp, Zea Mays
ctcaagcatactttaaggtggcttcactcatacacatgaatacttgtagtagtataggagtagtttttatttagcaacttgatgagccgaaagcagagggcacgtatgcacttggcagataagcatcagatattaacgtctataatacatactttctctgttctaaaatataattcattttaaactaatcatatatttattaagtaacatatgaatccagtttatatatagattcgtattcttagcaatttagaatctggagatgatataatgtgtcctcacccatcaaataacgctaaaaacatatttaaaccgcgcaccgcag

SEQ ID NO: 310 - DNA, 52 bp, Zea Mays
aggactttagcaaaaatcaacttatacttttgcagaagtagcttactaaagt

SEQ ID NO: 311 - DNA, 53 bp, Zea Mays
cgtcagggcttgttcggttctactccaatccatatggattgaggggattgagc

SEQ ID NO: 312 - DNA, 53 bp, Zea Mays
ctttccatcccttggtcagggccagttaatttagcaatctcagctcttaagtt

SEQ ID NO: 313 - DNA, 54 bp, Zea Mays
gcctctttcaccgaggcgcgagatgaaacgactcagagccgcaagacatcccgt

SEQ ID NO: 314 - DNA, 54 bp, Zea Mays
ccaccggcccttaacaccatcatcagcagcacaaaactataacctgaataacaa

SEQ ID NO: 315 - DNA, 59 bp, Zea Mays
gattatctaaccaacccaactggttccaccataaaattcgtccggagtcaacgggaatc

SEQ ID NO: 316 - DNA, 61 bp, Zea Mays
ctggtaagcacgttttagtgtaaaaaaaaccgggtttaacgggcttagaggtaaacgggcc

SEQ ID NO: 317 - DNA, 62 bp, Zea Mays
agtttgtttcgctagttatctacgatgaagggcagcgatccagtcttcatatccgagaagta

SEQ ID NO: 318 - DNA, 63 bp, Zea Mays
gcacacaacttgcctttttggtgcaactccaggtacttctcaaagttgagcttcaggttcctc

SEQ ID NO: 319 - DNA, 63 bp, Zea Mays
ccgccaggctccgccgcacctccgacagccatgacatcacgccagcagggtgcccatatctct

SEQ ID NO: 320 - DNA, 64 bp, Zea Mays
tactctacgcgttgctacgaggtcgtgggatcgagaaccactaaaatcggaattatggttaagg

SEQ ID NO: 321 - DNA, 64 bp, Zea Mays
ggtagggatgtaatatggttcagaaaatatccgttcggatccggattcgaagatggtgaacact

SEQ ID NO: 322 - DNA, 66 bp, Zea Mays
ctaggttgtccccattgtacttagtgctcaggaggtgatgctggcagcatggaggacttcgaggag

SEQ ID NO: 323 - DNA, 68 bp, Zea Mays
cccatctggctcgccccggtaaacaagtaatgatggcacccacgtgctcccatgacgacggcggttct

SEQ ID NO: 324 - DNA, 71 bp, Zea Mays
gaagaaggttgatcttgctcttgttgttcctacggtcgcacatcacctattgccattgttcacattgcgac

SEQ ID NO: 325 - DNA, 71 bp, Zea Mays
agttagctgatgctcaagctccttaatgtgattctgatcagcttggtgttgcgtctgaagttctatcacct

SEQ ID NO: 326 - DNA, 75 bp, Zea Mays
cttttattaccagtttattattattgttcatgttaagatcattatgttaatgggaacatggagtgaccacccggg

SEQ ID NO: 327 - DNA, 75 bp, Zea Mays
gcttataaacacatattaataatgttaattcgtcaggtcgcatattttagataattaacttaaggttggctcgac

SEQ ID NO: 328 - DNA, 75 bp, Zea Mays
ggacccgactttgttaaagaggccgaagagaaggttgccctgatccgcaagaagttacttgaagctcagagtcgc

SEQ ID NO: 329 - DNA, 75 bp, Zea Mays
atggatgcctcgttgtcgacttgtgcagttcatatttatcggatttggtggagaagaagcacagttcaatttgac

SEQ ID NO: 330 - DNA, 75 bp, Zea Mays
taacattcgatcacgacacttgattgactaccaatcatagaatataacgactactagcaaggtatcaattttctt

SEQ ID NO: 331 - DNA, 75 bp, Zea Mays
gcctaaccagagagcaccaccgttggttcttcctgagtatttgacgctccgaaaaggcgtcaacacggatgtagc

SEQ ID NO: 332 - DNA, 75 bp, Zea Mays
cctagattttgactatctttataccttgtttcaccactggttatactactaaatttttgggtagcacatgttatt

SEQ ID NO: 333 - DNA, 75 bp, Zea Mays
tttggccatatatagacatgcaacggattaatttgaaatagttgtgaggggttatttgtaaaaagatgacgcggg

SEQ ID NO: 334 - DNA, 75 bp, Zea Mays
attggacacgtccagtgagtgtatggcctctcacactcgtctacacagctctctgggcaggtgcacattggacac

SEQ ID NO: 335 - DNA, 75 bp, Zea Mays
tttgggagcaaactcaaaacaatgtgagcaagagaacttttagagagagaggagaggggagaaacaaatcgaata

SEQ ID NO: 336 - DNA, 75 bp, Zea Mays
cctgggtggtcgctccatgttcctattaacataatgatcttaacatgcatagtaataataaacagataataaaga

SEQ ID NO: 337 - DNA, 75 bp, Zea Mays
atgtttttactgtaatagacgtaaatataaacacacatgtggtatagtggtagctacgagcatatttgcttgagg

SEQ ID NO: 338 - DNA, 76 bp, Zea Mays
ctctggtggagatttggaagggattgaagaaggtgctgtgctcttgcagcaaggtcctccgtgtgcctcgctgctc

SEQ ID NO: 339 - DNA, 76 bp, Zea Mays
tgtagtcgctgcgtgtgtttacgtccgagcccgcccggccgcaaccttgctttgctctccgcgtcgctgctcgccg

SEQ ID NO: 340 - DNA, 76 bp, Zea Mays
acatctcgcacgaatagtactcacattcaatcctggcccctcatttctatatcgatggctcactggttctcttccc

SEQ ID NO: 341 - DNA, 76 bp, Zea Mays
ccgcgcgctccacaaccccttcgcagggaggaggaggaagcggccagcacgtaatcaaaagtaggcggccgccaga

SEQ ID NO: 342 - DNA, 76 bp, Zea Mays
ggatcatgacacagaaattcgagatgtcaatgatgggggagttgaagtattttctaggcttccaagtcaagcaact

SEQ ID NO: 343 - DNA, 76 bp, Zea Mays
cccttaggaatgactttggagcttcttcaccttttatttctgtggcatttaagctctgcatccccttaggaacgac

SEQ ID NO: 344 - DNA, 76 bp, Zea Mays
tatcatgttaaatatcgctcatgaggttgtaatagaaaacttaaaatcccaacaacctcactcatgcacatgtatt

SEQ ID NO: 345 - DNA, 76 bp, Zea Mays
aacgcgtgcggaggaagggagtttggatggccagtgggggctgcatgtcagcgcaacgcggaggcgcatgaccgag

SEQ ID NO: 346 - DNA, 76 bp, Zea Mays
aggcaatgtttggtcgcgtgaacataaagtatcatgttcttccgatggtgctgggcgagggacccaagatgctcga

SEQ ID NO: 347 - DNA, 76 bp, Zea Mays
ctccatggcgcgtggctcagctgcttctccctcccatggccagcggtgctctagcccctgcgtcgcgcgtctgagt

SEQ ID NO: 348 - DNA, 77 bp, Zea Mays
cgcctctacgcgcgctggagagggatggggcgccgtcgccgtcacgcgtggtggagagattggggcgccgccgtgtg

SEQ ID NO: 349 - DNA, 77 bp, Zea Mays
catgatgtgaaggacaagatctggattgatctcaaggtgatgctgatgaatgaacctaaagattggatgatctgatt

SEQ ID NO: 350 - DNA, 77 bp, Zea Mays
gggcattagtcgggggcgtgggttcgtgtatggaagtcggagctgctctttggcttgagctcgtcaacgatagccta

SEQ ID NO: 351 - DNA, 77 bp, Zea Mays
ggcctccatccctgccaccgggatagatggtcaagtgggttattgcttccgcaggagaggaccaggaggagtagcgt

SEQ ID NO: 352 - DNA, 78 bp, Zea Mays
gattagtcgttgatgaacgtggacaccggttaagtctgtgcaggatactgaaataccaaaggaaagactgttataata

SEQ ID NO: 353 - DNA, 78 bp, Zea Mays
ggtcgcgccctcctcgtcccacacctgcggcatcgacgtcacccacatgatggacgctcggatcggatcgggtcggat

SEQ ID NO: 354 - DNA, 79 bp, Zea Mays
aaaagtctgaaatatcagcaccagggtatttccacggtttatcctcaaatgtggtttccacatcaatatcaaatattgt

SEQ ID NO: 355 - DNA, 80 bp, Zea Mays
atgtggctatggggagaatctggctgtgggaaaaatctgagtatcattacgattacgtgtggaggaaaataaagttgttc

SEQ ID NO: 356 - DNA, 81 bp, Zea Mays
caggaggtgatgctggcaacatggaggacttcgaggagttctaggaatacgacgagttttagtttatcttagtggcaaagc

SEQ ID NO: 357 - DNA, 82 bp, Zea Mays
agggtgggcggaacttagctggtgacaaggcacgaagtcatcttaagtcggtatgatacttatacctattgcttgctctctc

SEQ ID NO: 358 - DNA, 83 bp, Zea Mays
atctaggtggcgtttctcagtcgacattggcgccaacgatccttagttcgtgttatatttatcttttatttttgtaagtcttc

SEQ ID NO: 359 - DNA, 84 bp, Zea Mays
gataagttaggcttgtgtataagctttggagggttcctaccttcttgctattgtaataagttatgcactttgtgtatatcagga

SEQ ID NO: 360 - DNA, 88 bp, Zea Mays
ttacttcgtcaagcgcctcaacttcgctttcaatatgctcgaaggtgtttggcaagtcttcaaccgaaggttcaaattttttagagct

SEQ ID NO: 361 - DNA, 89 bp, Zea Mays
aggtggacaggctgcaacgccttgtgctggctgcagttaaacaatgtatggagtttgggtatcacctccgttcttggcctgttaaacaa

SEQ ID NO: 362 - DNA, 89 bp, Zea Mays
aacaaatttgaataaggcggtatctatttgtagtgtggtatcgattacggttagacttaaacaaacatgatctaatgttatcggttacc

SEQ ID NO: 363 - DNA, 89 bp, Zea Mays
gaaaatgtcttcagatgtctcctgtaacctgtgcctcggttaggtgcataccagagttctcaaggcaattgttcagagaatgatcccaa

SEQ ID NO: 364 - DNA, 91 bp, Zea Mays
ctccatccagcctcagatcctgaaccgcaagaacagcaagaatcagcggcgcccgcgatggtgtgcgctaagtgcgagaagaagctcggga

SEQ ID NO: 365 - DNA, 92 bp, Zea Mays
gcgcggtgttcctcttctcgggctggtgtcgtggacgtctccttcggctccagcagcgactctagtatctccgtcaacctcccgccgtgcag

SEQ ID NO: 366 - DNA, 92 bp, Zea Mays
gccttgtgcacaccgcccgtcatactataggagctggccacgtttgaagtcattacccttaacagtaaggaggggatgcctaaggttaggct

SEQ ID NO: 367 - DNA, 93 bp, Zea Mays
ggaggtcctagcaagtatctaaacccttaaaattacccaatagcctatacctcacgttaaattgggtttgatttcaggtatgcacacccttta

SEQ ID NO: 368 - DNA, 93 bp, Zea Mays
aagcttttgaagactacaacttcatcctcttttggttctagaatcacctcctctccagcaaaatgaaccagttcgtcatcattctctccaaag

SEQ ID NO: 369 - DNA, 93 bp, Zea Mays
cagtgctctgcgcacttgatctgatttctatacatgttttctgatcacaaatttgaacccaaaaacgatattggaccttcggacagagcgtgc

SEQ ID NO: 370 - DNA, 94 bp, Zea Mays
atagccctcaaccaccaaaacaaccgttgggggtggctgctgtcgatgggcgcaccggacagttcggtgcgccaccggacagtccggtgcgcca

SEQ ID NO: 371 - DNA, 94 bp, Zea Mays
ctctcattatcacatagaagaggaactttggttaatttgtaaccatagccctaagggtttgcctcatccaaagcaattgcgcgcaacaatggcc

SEQ ID NO: 372 - DNA, 95 bp, Zea Mays
ttaggaccgagaggtggtgatcgtgcaattgacgtggtgccaaccacaagatgcagttggtggacgacctgaagaatggacttaaccagtggatg

SEQ ID NO: 373 - DNA, 96 bp, Zea Mays
tcaaacttacaaaaagttttgcaatatttcaaagtgaaattcttttgtaactactccgattttgtaacttgtatactccttgtaataagattccgt

SEQ ID NO: 374 - DNA, 97 bp, Zea Mays
ataaccttttgccacaagtcgtgccttgttccttgtcaccactccatgcacatcttgtttgttgcggaacacccacttggttcccacaacattttgc

SEQ ID NO: 375 - DNA, 98 bp, Zea Mays
cggaggagcagacggcggttgagggagagagctgaggcttgcagaggacgctgggctcgggcggtggatggaaaccctcgcgaatagccggcttccag

SEQ ID NO: 376 - DNA, 99 bp, Zea Mays
gttttgttttgaagttttgagaaaggttgtgacagagaatgtagctactacaaagcattgaaggataattgattttggacacattgacaagttttccgt

SEQ ID NO: 377 - DNA, 99 bp, Zea Mays
caagctaaacatatgtgatctttgaaagagggtcggttttgaatttgagaaaaacctgatttttcttttatgtctttccctttggtgacctttttgggg

SEQ ID NO: 378 - DNA, 101 bp, Zea Mays
taccaagtgtttcagaggtctgaactggtgagcatctagatctgttgttgctttttattttcttcatctgtgcttcagaggcatctttgtacaccgatgga

SEQ ID NO: 379 - DNA, 101 bp, Zea Mays
ggattttagatgtgattcatatgaagggtaagggtagacatatctaaattatgtgaccgaattaataatacaaattataggactagtgtttctaaggtctg

SEQ ID NO: 380 - DNA, 105 bp, Zea Mays
agccgcccccccacttctcctcctccccttggccgccaccctccctgcccatctccttctctctcaatttttgcagccaccaaaccctagcccctcccccctcaa

SEQ ID NO: 381 - DNA, 106 bp, Zea Mays
tgcgtgcggagttttattcaggtaatgctaaacatctacgtacacgacactgctaatgcgcttactatgtttagtacctatgctacatacaaagtttcaggatcaa

SEQ ID NO: 382 - DNA, 107 bp, Zea Mays
tggaactggcaagtaatatgatgttcatgtctagaaatgatccttattgttcaattcctagcactctgataatcatgtggcacttgaataattcaatgatctcctag

SEQ ID NO: 383 - DNA, 108 bp, Zea Mays
tcgaacccatgttgttgtaggtgatgaggagtactctaggtgttcctgaggctggagggcatttccagttctggaggaggattagttaggcttgtgtataagctttgg

SEQ ID NO: 384 - DNA, 109 bp, Zea Mays
tggacttgttcgaacgcctggttaaaccctgcctctagctactcgagtcatgcaaacactggactttgaaattcatccactgtaatgttatgttgatcagtgtttttct

SEQ ID NO: 385 - DNA, 113 bp, Zea Mays
gcaatgggaagataaccataacgacataaactgaattaactagtgtgcacgactagttaaaaacgaacatccttgacaagaagtttctaattaaatcatggttgtgcctgggc

SEQ ID NO: 386 - DNA, 115 bp, Zea Mays
tttgccaggagggtacgtgccactctcgccatctctccactcacagtgcgcgattgtcttttcatgtatggaacagccgggttcaagcttacccttgtcccatatccagggcatg

SEQ ID NO: 387 - DNA, 116 bp, Zea Mays
gctttaccttgattcccaaaagccagcatatccttgagagtctttttccttagacgggtaagacttgtgaaagtacactctgtactcagggttttcgaacccatgttgttgtaggt

SEQ ID NO: 388 - DNA, 116 bp, Zea Mays
cgtcgaataatttgattatatggacgctcatatatatttttatttctgaatataccaacaatttacgaggagctgagctacgcttaatcatttctaggcttctgactgtattgtcc

SEQ ID NO: 389 - DNA, 116 bp, Zea Mays
tgaaactcagttcatttggtggaccagtagtttataaggtacaattgccaaagaatttgtcaacagtgcacaacatgttccacgtgtcccagttaaagaaatgtcttcgagtcccc

SEQ ID NO: 390 - DNA, 117 bp, Zea Mays
gtgagtccttactttcaatattttaacgccaaattaaatattaatagactctgtttgcatatggtctacattcaccatctcatcaatacaacatcatttttattcatgagattcaca

SEQ ID NO: 391 - DNA, 117 bp, Zea Mays
agcccaggcagacgtgccctccgccagaaggcttcgggcgcaacttgcgttcaaaaactcgaatggttcgcgggattctgcaattcaccccaggtatcgcattttgctacgttcttc

SEQ ID NO: 392 - DNA, 117 bp, Zea Mays
aaagaggagtctactccaatgcctgcttatcaagtggatggagctatctaactaaaggttgggtagaaggattttgggatcttctcctgcaacaaggtgaagttttattcccttatc

SEQ ID NO: 393 - DNA, 117 bp, Zea Mays
ctcgtagtgcccctcgcattctgttctcagcccgctctcctctctgctcggtctccccagtactcgcctcgcctggacacgccgttctgttgttaccacttgtcagtcacgatctct

SEQ ID NO: 394 - DNA, 119 bp, Zea Mays
catgcgtggcacaaatttctttgctctcctaagtgggatttgagatcgagcgaagctaagcttttcatcaagatggcgcttgttgttatctatggatctctctaccccatacttccata

SEQ ID NO: 395 - DNA, 119 bp, Zea Mays
gaagccctacaatgaggaatacgaattgatctaggtggtgtctcccagtcagcttgatggcgccaaggaatagtatttagttcattttatggttatcatttatttttgtaagacttccg

SEQ ID NO: 396 - DNA, 119 bp, Zea Mays
aatagtcaaaggtaaatgaataagagtttgcaaggcattttcaagttttgaaattttctccccctgtttcaaatgtctttcctttgactaaacaaaactccccctaaatgaaatcatcc

SEQ ID NO: 397 - DNA, 120 bp, Zea Mays
aacaactctataccatacccatcactctaatcatttttcactattattttgaatcatatttacatgttttgtgaatggtgtgagattcgaactcgcaacctctctcttgcgcatactctc

SEQ ID NO: 398 - DNA, 120 bp, Zea Mays
atatgggctataactgctatcgaatccttgaagccaaagctaaagagaacgccccatcaccagcttccccctcgcaagccgacctatgcgtccagctgagttgaagacaatgcaaaaaaa

SEQ ID NO: 399 - DNA, 121 bp, Zea Mays
cacggatcctccactacatgaactggtccgcgctacccgggagcacattaccctaacattcagcttcttgctaggagggtaactgctactcccaccatctcccacgcccagtgcgcggttg

SEQ ID NO: 400 - DNA, 121 bp, Zea Mays
tctgaacgatttcctgataacttctgacagttatagcaaaagaaagaaaaaaaaccttcctagcagaactgaagatgccatctcatcaagataaaaagaggaatatatcttcgaatttctc

SEQ ID NO: 401 - DNA, 123 bp, Zea Mays
agcaatatggtgctaatggttccacctatcctctagtcattctcttgtatgggcttttgagattttctggaatttatttgaatttcttaattgggtcaagcccataaatcctaacatgtcgat

SEQ ID NO: 402 - DNA, 123 bp, Zea Mays
tcacaatacaactcaatgagttcaccactcagcaagagctctaattgctatcgcaaagaaacaaaggtgcggaatcgatgtcttggtgcttaggaatgttgtaggaatgcttggtgtgctcct

SEQ ID NO: 403 - DNA, 124 bp, Zea Mays
gcaaagggtagcccacgcgagagccaagcaccacggtcgagtaactccgtagagagctgcgggccttctccacacgcaagtggtgctccgcttgccggcctcctctcgggatgctccccgccgt

SEQ ID NO: 404 - DNA, 124 bp, Zea Mays
cgaagaacctccatttctattatttgcataacagaaatacaaccgtacgtttcggtcgcaaaagcaatcaagcaccgacatacaaggaaagtaaacataatcgacctgattcaggtcatcgaca

SEQ ID NO: 405 - DNA, 125 bp, Zea Mays
ggggggcatcaggggcgccttcgacggtttctgggggcggcgccgggacgacctcggacacagccgccaccgggttcgactccgaatcaggctgcgcgctgttcaaagccccgaagtcctccacc

SEQ ID NO: 406 - DNA, 126 bp, Zea Mays
tagatgtcaatgacctgaatcaggtcggttatgtttactttccttgtatgtcggtgcttggttgctttagcaactggtacatacgtttgtatttctgttatgcaagtaatagaaatggaggttctc

SEQ ID NO: 407 - DNA, 127 bp, Zea Mays
tgttcatcttcgcttcgcgtgcgattagatcgcgattcgtttatgagcttcgaggaatcgatgatcaagcatggcgacaaagtgatcgaactcttcgagttctacgagatcgaagaccctgagcatc

SEQ ID NO: 408 - DNA, 127 bp, Zea Mays
gcgacaatcacgacaacgtgggggagtgtgccccgttgccgtgcgcgaaagtcactgcacctcccttttatgcaggcatggcgttgagggaggggatgggcggctgtcgcagcgagcatcgcgcgag

SEQ ID NO: 409 - DNA, 128 bp, Zea Mays
agaaaagaacggcggctgctggttgctggtaaagaggagacagagagaagggaaacgagacgtagacgccgtgagattcactgctttaatcagagaagttaccaagtaatgaagtgttcttgttcgtt

SEQ ID NO: 410 - DNA, 128 bp, Zea Mays
gtgtgtttggttgaatgtacatggagggatggaagagggtagccacagtttcaatagtgtttggatgagagtcgcgtaggggcgaggtgaacaccggagtagtttttggtggcggcgtgatccaaaaa

SEQ ID NO: 411 - DNA, 131 bp, Zea Mays
ctggatttctatgaaatttagttgtttgcctcttcaattttgtgcttggcattgttggttttatactctgatcactgcattgacactctgtgttttggtttggtgttttcagtctgcatgcttgatagaaa

SEQ ID NO: 412 - DNA, 132 bp, Zea Mays
gcagaggtacatcttttccgatgttgaacccatcaaggcctttgacagattcaccatcaggttttatttttgaaaacattcccacccactgaagcatcacctttgttttaaaacaaaacatttttgtttttt

SEQ ID NO: 413 - DNA, 133 bp, Zea Mays
tccggacgggaaggcgcgatccggccaaagggacggcagatcaagccgagaaggttgcagcaatattgaatccgaccggaaggctgcggcagcgacggatccaacgaaggcgatgaaggggtggctggcagag

SEQ ID NO: 414 - DNA, 133 bp, Zea Mays
ccaccgctaacctactcatctctggcctgccccgctcctcctcgtcctcaaccccggcttgtccccgctcctcgatcccagatcccgcatcgtcgtccccttaggtcgtccgaccccatccggcaacggcaac

SEQ ID NO: 415 - DNA, 133 bp, Zea Mays
tagtggcgatgtgagagtgttcacgattgtaaaatagatgtagcttatatgtatggcgaggtttaggtggtgatgcatatatctagtattttgaattggtttgatgtttgcgaggtgctggtgtttgtgattg

SEQ ID NO: 416 - DNA, 133 bp, Zea Mays
gtgaagaacctatggacctttgctacttttgtgcaaaggtggttcccaagcaggaggaagaaccgaaaatcgcagtttgttgctgtggatggtgctaagtgccggtgggctcggccttcttataagtctaagt

SEQ ID NO: 417 - DNA, 136 bp, Zea Mays
accaaaaccgacggcgacgtcgctctcctccaccggtgcttggcgctctccctccaccagcgacggtccaccgacgctcggcgagctccactggcgggcgctggtcagatccgcttggcagtcatccacctggcac

SEQ ID NO: 418 - DNA, 136 bp, Zea Mays
tttccctcccttgatacccttttatgaaaaagatttttgatgcttagccttgctttagaaaacaaaaaatgttttgtttttacaaaagatgatgtggcaaaagtgggtgggaatgttttcaaaaataaaacttgat

SEQ ID NO: 419 - DNA, 137 bp, Zea Mays
atagtaattctgaagctaaatgaaatactactattcgttattttaaatcttggatgttctataataataagtctgagtttagatgttatgctctagtcaagagagatagggtgcttataaatggttcgttatggctt

SEQ ID NO: 420 - DNA, 137 bp, Zea Mays
ctcgtcatgggtaagttttgcctcgggcagactaaggccagaataagataacacgaaatgggcgtggagcggtggcgagagtagcgtgtaccctctgtagcaagaggctggacgctggtgtatctgtgctctcggtt

SEQ ID NO: 421 - DNA, 140 bp, Zea Mays
tcaaaatgcagcacatcaatgacactgtggattattgtcgttgaacgtttcaaacatattatgttcatcctagatcacaaaatttgtcactgaacaagggattaggtttgttgtgctcctggttttgactccataaaaac

SEQ ID NO: 422 - DNA, 143 bp, Zea Mays
cacaaacccctaccccaggatggggcttacaaatggtccagaatagccagcgaggcgtcgcgtgggcccatttcacagaccacgcgggtagggagcggcgatcttcgctcgagggcaccgggtcttcgaaccttgccaagact

SEQ ID NO: 423 - DNA, 144 bp, Zea Mays
tcattagtaaagcattgggacaaaaaaatttgggactatcaacttatgagaaggaatgccttgctattttgtttgcaatagaacactggagaccttatctgcaacatgctgcccttgtcatcaaaacagaccagcagagcctca

SEQ ID NO: 424 - DNA, 144 bp, Zea Mays
ccaagtgggccatttttggtaagcagaactggcgatgcgggatgaaccggaagccgggttacggtgccaaactacgcgctaacctagaacccacaaagggtgttggtcgattaagacagcaggacggtggtcatggaagtcgaa

SEQ ID NO: 425 - DNA, 144 bp, Zea Mays
tgcatgtatgaaatttgtagcacaagcaaggagggatcgggtacacgaacgaaccaactcaccagatttcttttctcggcgaagtaatccgtctcgggtttgggctagggcggtgccttgacgtgctccccccggccatgagtt

SEQ ID NO: 426 - DNA, 145 bp, Zea Mays
tggggtcgccgatataattgccaccggacagtccggtgccttcctctggcgctgacggcttctctggtgcttctcgggttggactcggatcctctgacgtccgacgtcagtgactttgagtcactgcgcgtgggccctgtagcac

SEQ ID NO: 427 - DNA, 145 bp, Zea Mays
gccatgaatagggcttgtacccaggcacaagaacgacttgaggaaacaaaggttcaagcggaacagattattggactagagcatcaggtgacagaacttcagacgcaacaccaagctgatcagaatcgcattaaggagcttgagc

SEQ ID NO: 428 - DNA, 146 bp, Zea Mays
gacagttcgctacaatcaatttcttggaaaccttggtttcagaattctcgtttcaactgcttctgctatgagcctgcctaaggaatttcacgaacaatgtgaatactcacttgaagtgcagtttttgaaggatttttactactggg

SEQ ID NO: 429 - DNA, 146 bp, Zea Mays
tgggtcccatcaaaattaaacctatgcatgaatagtgataataaagaatataattgtgtaacaaaagtggatcaagggcaaaacttgcctggcacttgagattccagttacctgggtgattctttagatcctcgaaacctcgcgct

SEQ ID NO: 430 - DNA, 147 bp, Zea Mays
aggactactacgatgagtttgacaagatctaggtgtcgtctcccagtcagcttgatggtgccgagaaaataatattagtttgatttatttattatcagttattttgtaagacatttttgttatgttataaaattggtgacatttttc

SEQ ID NO: 431 - DNA, 147 bp, Zea Mays
tttagtaatctaggttgtctatagataaatgttgagggtcatgaatgtaatttcacctgggctacgtcccatgcctataaatagatgaacagtaacaccgtactgttcatgctggattgtaatcactctctcacgtcttcaccttcg

SEQ ID NO: 432 - DNA, 151 bp, Zea Mays
gccgcctcaccccgcgcgtctccctcgagctctccctctagggttttccgtcggcaccctcagtcgccgctgtcgagctctccctctcgtgtctccactcgccctcgagctctccctctccgtctccaatcgccgtgagctagggtttggc

SEQ ID NO: 433 - DNA, 154 bp, Zea Mays
tgaatttttcttaccttcggcatacatttgcataatgcattacatcataatttgcattcatacaagcattcattatagacatattagcttcattgcatcatggcattatgcacaaggaattaatgacaagtttacgatgcttcgttgtgaacaa

SEQ ID NO: 434 - DNA, 154 bp, Zea Mays
cttcctccctccaaactccaattgagctcgccacacgacggagaaccacgcggaaggacttcaccttggagagagggggggggggcggctagggttttgggtggtgtggctgcaatggtttgagggaggaggaaatgggaggaggggggcggcg

SEQ ID NO: 435 - DNA, 154 bp, Zea Mays
aagacccatttgcatgtaataggaacaacatgcgagggtaaaggaacgatatcccatgtacaagtgcgttcaagaacagccaattcatcaatcatagctagctgccactcaagaatcctagaagcttcctgataagtagtgggttcaacaattg

SEQ ID NO: 436 - DNA, 154 bp, Zea Mays
atttacgcgtgttgctctctatttcagggtataaaagggttacatgatgaaattgctgcccgtgatgggtttcatgcaagcgcagataacatcttcctaacagatggagcaagcccggcagtacacatgattctgcagttattgataaggtttg

SEQ ID NO: 437 - DNA, 154 bp, Zea Mays
gaaggtaaagcggattgggtcttgtggttatacctgagtgaggcggcgactgatccggttcacggtgctacccttcgccaccagcgagcacgcgaggtccctctacagtgatggtcacgaggagaagcaaggagtagggagggaaggatctggg

SEQ ID NO: 438 - DNA, 155 bp, Zea Mays
ttatagatacttctggtgaagtatcaaatatgatttacaaaattgcttagccctacatagaggtaaatcttgtggatagagtttgtcctttgcactaatgcctagctcaggtttatcctaaggaaggatggcttctacctgcaagaatattttca

SEQ ID NO: 439 - DNA, 156 bp, Zea Mays
acatctccttgatcctctcttcctcttcaatccatcttgctcctcctcttctcgatccttgctgcgtggggggagatctagagggcggaggaagcagtggagggcggctgcaaggggaagggagaggggcagccaagggtggggaaaggggggttg

SEQ ID NO: 440 - DNA, 156 bp, Zea Mays
ggtaattgtcgtcaaaagctagacatagttcgcaaaaatctaattgtcggcatatatattaattgtcagtaaaggcttacgattcggccacatgttaactatcgacataggtaaaaactgtcgggaaagcctaagccgacaaattcttacgtgttt

SEQ ID NO: 441 - DNA, 156 bp, Zea Mays
aattatctataattcgagttttagcacatatcaaacaagatgacaccacttggaaaatagatacacttgtagaatataaactttgaagcaaagaattagtgtcatctacttaggaatattaaataagctatgttccttgtttaattaaacatttta

SEQ ID NO: 442 - DNA, 156 bp, Zea Mays
gcatagtcgaaaacggtggctaaagtcgaaaacaaggatcgtgtggaggtggagctgagccagtgcggcggtcggcgtcggagtgcgaccacccctccatgattggttggtgtcgtcatggatcagacaacgaattagaaaaaggagccatcgggc

SEQ ID NO: 443 - DNA, 157 bp, Zea Mays
acataatggatcttgattatgaagatgaagaggagctaaacattccaataatcaaggaaaatggcaaatgtgatgggaaggaggaccagagaagtgaagaaaggaagttgttgcagcttcaaaatcaagtcttgggcttgaaaaaagtaaggatgag

SEQ ID NO: 444 - DNA, 157 bp, Zea Mays
gtgacgcggaagatgagccaagtcgaccccaagcgcgggctaattcgcatggtgatgctgatggacaaaccggaagatggataacctaatcaagtgctaggacaaaggatggtcgtcaagtggacgtcacctaacaacactaacctagtgttattca

SEQ ID NO: 445 - DNA, 158 bp, Zea Mays
tggctcattgccaactgctgcgccgagggctgaggatcctgtgaagatggcggcggagtctgcagcggaggatcccacgacggctgggtcttcgcaggtggcttagtgggtgtgggtagttagggaattttgcatatgttgctgaaccttggttgctg

SEQ ID NO: 446 - DNA, 158 bp, Zea Mays
ctttattatataataggggttctgtgcaaaatagctaaataattacatcatatgacgacaacgatcctccgcaaccaaagttgactggagacgacgacctagatctctccgaacttatcgcatcatccttcacgctcctcatcttgcggtacctgttc

SEQ ID NO: 447 - DNA, 159 bp, Zea Mays
aacagttgtgcaaatgcatctagagcatgttggtctaaacctctattgtcaacaatgatatccagcgatcgcatcaccctcttgcggattcacgtcgactccttgagaaaggaccggtcaggcctgataccagcaataatttttattttaaagaagatg

SEQ ID NO: 448 - DNA, 159 bp, Zea Mays
cctagacctgcttttactatcttttggatggaactatgaaaatatgtatggaagaacttttagcggtttttagtagtttccaccaattgctttttagctttttaataggtcacatcaacttttttcataattgacaacccataacatcttttttcacag

SEQ ID NO: 449 - DNA, 162 bp, Zea Mays
ggttcgacgaggtcgagcacggaaggacgaggttcgacgggcttgacgacgatacgggagggtgacatatatagagctgcatagatccggggctgctgcacacacgacgcgacgacgaacgatgacaaccggcgaggtcgacgacgcgatggggattaaggc

SEQ ID NO: 450 - DNA, 162 bp, Zea Mays
acataaaatagattttaaaaatatttttattagggagacctcgcggccccccacccacctgttcgtctccgtcaggtcgcggaatttttcgtgcactacacaattgctaggaatcgaacccctaaccttagcctcacgcgtaccctcctctaccactccgac

SEQ ID NO: 451 - DNA, 163 bp, Zea Mays
catgatctggagtgtagccacctagggttttccccaagaaaatcttcaagagataggggagatcatctccttgatcctctcttcctcttcaattcaacgtgctcttcctcttctcgatccttgctgcgtgggggggatctagagggaggagggagccatggag

SEQ ID NO: 452 - DNA, 163 bp, Zea Mays
ccgcccctcccctctctcttccactcttgcagccgccccaatccctctccttcttccccaagtgattgcagcgccacccctcaaccctagccccccccccacctcttcctctccaaggtggagcctccccacttggtgtccgtcgtgtgggtgcaagtcttcc

SEQ ID NO: 453 - DNA, 163 bp, Zea Mays
tgattaagggaaaggctcactcggtctaagtgaccgtttgggagagggaaatagttgaaatagacccggtctttgtgacctcctcaacgaggactaggttctttggaaccaaacctcagtaaaacaaatcacagtgttctttcgctggttttccatttgattt

SEQ ID NO: 454 - DNA, 164 bp, Zea Mays
tcgaccatggctgctggaggtgctcggctaggtagggagcatggagagggagccgacttccatggggaagaaggcccctgcgctggtggcttgacgaaggaagctgcagggagagtttcctgcgcaagaacagggaaagagatgagtggcgtgtgagagaggag

SEQ ID NO: 455 - DNA, 164 bp, Zea Mays
tatcaatgctaatggtgttcaatgcacgtaggctgaagtcgatgtcctgcgctagtagttagtatcgtctaggtttgtgatcgataatgttgaagtaggagatgatcgacggttttcttatccagtgattggtgtgatgatatgttgtttaaaatatgcttggt

SEQ ID NO: 456 - DNA, 166 bp, Zea Mays
ctagaaatgaggtatggcatttagttccacgtcctaatcaaaatattgtaggaaccaagtgggtttttcgcaacaagcaagacgagcatggtatggtgacaaggaacaaagcccgacttgtggcgaagggatattcacaagtcgaaggtttggattttggtgaaac

SEQ ID NO: 457 - DNA, 167 bp, Zea Mays
ctcctatcacctaatgcatcaaacaaggtgataaagattttaaaacacaaggaaggggataatgcactggggcttgcctggaataaacactacgttagtgtttgttagatgatgtccacttggcgaccagcttttgttttgatacttgcttcgtctgtccatcttta

SEQ ID NO: 458 - DNA, 167 bp, Zea Mays
aataatctgctagcaatgggaagacaaccataacagcatgaactaaattaaccagtgcgcacaactagttagaaacaaacatcctttgacaagaaccttttaattaatcatgaccgcgcctaagcagcgttattatgagagtgaaggtggacgtgctgctacttccc

SEQ ID NO: 459 - DNA, 168 bp, Zea Mays
gaactatattttagaacggagggagtataaacttttagtaattagtctcggttcaatcattattcggtagtccctttgttagccgcaccttgttaggaatctaataaataaatcgatgagtctaacatagtcataaaggaaacaaatcgccgtagacttataacgtga

SEQ ID NO: 460 - DNA, 168 bp, Zea Mays
caaggtctaggtgtcgtctcccagtcaacttaatggcaccaagggataataatattagttcgatttatttattataatttattttgtaagacattttcgttatgtaataaagtttgtgacattcgtctctatacactgagtcattatatgtgttgatcttgtttggcg

SEQ ID NO: 461 - DNA, 169 bp, Zea Mays
catgcatccatgcatgcatgtcgttgttcgcaggaaagcagtgtggtcgagtacagtgctggttccaattaagttttcagcctttgatttgatctatatatatatatctcatggcgggacggaatcagcaaccatccatcggaccaaccaactaatgctacagcaaaaa

SEQ ID NO: 462 - DNA, 169 bp, Zea Mays
cggactagtatatataggggtccggtgtcttcctgcggggtccggtcctagtgacgaacaccggcatgtacaccctttccttgccacgcggcgctcctggacctgcccattgggcaccattctccacgtggtcttgaggcattgcacgggtgcggcgcctttatgcagt

SEQ ID NO: 463 - DNA, 170 bp, Zea Mays
gtcgagttgctggtctaaagtttcttgctgctagagtttcgagttcgcgccaccttgtttagatcaccatttttagttctctagctgttgttcaaaaaaacaagggaaaggaaataggcaagtgcacaaaaaaagccgcgctgatcataaaaaaagcacgtacaaaaaag

SEQ ID NO: 464 - DNA, 171 bp, Zea Mays
gtcgtcctctcctcccatggcaacccctctccacggcttcctcctccctctagatctccccccacgcagcaaggatcgagaagaggaggaacatgttgaattgaagagggagagaggatcaaggagatgttcttccccatctcttcttgaagatcttcttggggaaaccct

SEQ ID NO: 465 - DNA, 171 bp, Zea Mays
ggcgagagtaacgtgtaccaaccaggccaatggctggacggtggagtactgtgctctcgggtcgcgtgaacccgttctggtcttgagaaacctgtgggtgagttgacatatgcaagggttaagtgctacatatgtcgtgtggttggagatcctcagctgagtattaatcga

SEQ ID NO: 466 - DNA, 172 bp, Zea Mays
caaaagttcgggctaatccgatgcactgagacacaaaagcccctatttgccggtcaacagttgagaggccctaccagcacctggtgggcaaacttttccgccattcaacctgtgggacatcaggtcacgtgggaagagttcaaactgacatttagggaaaattatgttccgg

SEQ ID NO: 467 - DNA, 172 bp, Zea Mays
gaccccgccccctccgactgggtgatcgactccggcgcctcgtaccacaccactcccacggcaggcacgctctctcgctctcatccccccctcccctctcacccatcctcgatcgtcgttggaaacggttccactctgccagtcacctcagtaggtgcctcggttctccctg

SEQ ID NO: 468 - DNA, 172 bp, Zea Mays
ttgcaggacactgtatgttcagtcttacaggcagtttcatcaatcccatcttgtaaactgcttgaagaagtatgcaagaggaattttgctacgcattttgattattgcacaactgcttgcacggactttgtgtcattagatgaggcaacatttaaggatattcttgaggcaa

SEQ ID NO: 469 - DNA, 173 bp, Zea Mays
cgcccctgccccttccccttgcagccgccctccactacttcctcctccctctagatctcccccccacgcagcaaggatcgagaagaggaggagcaagatggattgaagaggaagagaggatcaaggagatgttctacacccatctcttgcagattttcttggggaaaccctag

SEQ ID NO: 470 - DNA, 173 bp, Zea Mays
taaacatccatgatcatgtcatttcatatagaactcctaccagaaggagtgaagattcaacctgaagtggtgactgaagaggaatctactccagtggctactgatcaagtggaggagccatctaactgggtttaatagagggatctagaacctcttcactgcaataaggcaag

SEQ ID NO: 471 - DNA, 174 bp, Zea Mays
gactagccgttggagattcccgaagctggcgagtttctgaggccgctcttccttggcgcaccggacactccggtgtacatcggacagtccggtgaattatagcgcgagtgcctctggaaattcccgaaggtggcgagttcgagttggagtcctctggtgcaccggacatgtccg

SEQ ID NO: 472 - DNA, 174 bp, Zea Mays
gtgttgttctcatgcgtttgcatctattattcacggtggtctactggtcttctagctggtacaattgttgatgtgcagggatccatgtttaaccctatgaaatgaaatgtatagttttattaatctgaccaatcattaggcaatggagtagaaagaaaatgcaaactgtaattt

SEQ ID NO: 473 - DNA, 174 bp, Zea Mays
cgggggcatcctgtgcactggatctgggcgtggatgttggcgtggatctggtgcgcggaggtagtagctgggcgagggatttcgcagaggtagcagctgggcatgcggcgggcggctcgcggcggttgaaacggtcacggcgcgtgggcgtagaggaggcgggggcggtctaca

SEQ ID NO: 474 - DNA, 175 bp, Zea Mays
agaacagatggttcaagtggagccacacatcgaggagttcgattcgatctaggtgttgtctcccagttgactttctggcgccaaggatggattctagatcctgttatatttatcttttattttgtaagacttccgctatgtaataaatactctgattattgtgacatttatcact

SEQ ID NO: 475 - DNA, 177 bp, Zea Mays
ccgacctaggctagagggtatacatggcttgtgggtaaagttgtatcacctttgcagagtgtaaaactgatatatcaaccgtgctcacggttaagagcagcctggacccttacatgataattaaacttgaagatggaaataaatcgtgatcggttttgtttaagcggtatgcttaag

SEQ ID NO: 476 - DNA, 177 bp, Zea Mays
cttctctgtcccagcgcctacttcctttgcttctccctcacggcgctcctgctccatctccagcgctcctccagctcgcccatggtggtgtacgctactcccctgcaatcttcagccttcccagaacgatccggtcgaagagcccgaggaacccgcaggagaaggccctgagcagca

SEQ ID NO: 477 - DNA, 179 bp, Zea Mays
ggaagttctagcagtttctaggtttttttcgtgaaaatttaatggggatcaatttggggatcatgtagaactttgttttacctttccaacgagtatttatgcgctcaatttggagttataaattaaaagttatcatcgtttgaatccgagtatgtggctgtccaaaaaacagattttca

SEQ ID NO: 478 - DNA, 179 bp, Zea Mays
caatcccttcatttgtgttaacatatagattctcggaattcagatacgacacgaaatttaagataaatctgtttatctcagctcgtggagagacgggcgcggatcacctgacttagacgtttttactgtaaccgttccttgcatccaacggttgagctgtctaccacaccaaaacaata

SEQ ID NO: 479 - DNA, 179 bp, Zea Mays
cgtgctccctcccctccgatccgtgcattactccactataaggactaggtctggcatgaccttggctagctaatacgccagacaccagggtcttcagtgaggttggccgccgcgtgagggagcgatccaccgtgacgaattgacgccgcatccatgctccgctctgcctccctcgccgg

SEQ ID NO: 480 - DNA, 179 bp, Zea Mays
caccagggcttgcctggaataaacactacattagtgtttgttaggtggcgaccacttaacgaccatccttttgtcttggcatttgttcaggcaggttcgtccattagcatcaccatgcaggagtagctcgcgcttggggtcgacttggttcgtcttccgcatcgcgcgatcaactagcg

SEQ ID NO: 481 - DNA, 179 bp, Zea Mays
gcacgaggtgggcgagggcgcgtgggggttcgcgtgcgggcgtcctctgggcgcgctctcgagtgtcagcccacgtcgaacacgtgggggtttacttctgccaaggttcaacggccgatttggtcgacttagcatgcagatcttagcaaaacccccgtgtacggtctcttctctgcacc

SEQ ID NO: 482 - DNA, 180 bp, Zea Mays
agagaaccgagcggtgccatcaccctgtgggctcgtcaccgggtgtgtgtcgccgcgggtgaatcacgtgatcaccagtgctgggatcctcctggccttcatcggtgtgcgagtgcgtttggcgggcatcaccggtgggctccctcacggatcgacatcgccgtggggcgcgcgtcgtca

SEQ ID NO: 483 - DNA, 180 bp, Zea Mays
cttgttggccccccttgcgagtgagagcaagttccaacaataagataacacgcaatgggagtggagcggtggcgagagtagcgtgtaccctccgtggcaagaggctggacggtggtgtatctgagctctcggttgacatgaacctgatctggtcttaagaaccctggtggcgggttgaca

SEQ ID NO: 484 - DNA, 180 bp, Zea Mays
ccgtgccatgcatgcatccaggtcatcagacgacgcaacagttcgctgctgcatgcctgcatttgccgccgagcacgagctgcctgccaggctttctcccccctccctgctgtcgtttgttcggttgttccccgtcaccgggccaatggaaaccccaacccaaacccacccgcccacaga

SEQ ID NO: 485 - DNA, 181 bp, Zea Mays
ccggatttccccctcctcgaccgtcgtcaatatcgcacggttcaccggccacgctctctcgctttccaaggaccgccgggtccgctccgtcccccgtctggcagtggcctcctcgccgccctcggcgccgcctggccacgccttatccagatccagctttcaacatccaggaaaaaaaaaa

SEQ ID NO: 486 - DNA, 181 bp, Zea Mays
aagtgtgtaaaaattatttaaaacacaaggaaagcagttgcatgcaccggggcttgcctggaataaacactatgttagtgtttgttagatggcatccacttggcgatcagcttttgttccgatacttgctccgtctgtccatcttcagattagttcatcaacttcatcttctggagaagct

SEQ ID NO: 487 - DNA, 181 bp, Zea Mays
cactttcccaccctttggccgtcgccccccttccatctcctcctctctcaatccttgcagccacaccaccaagccctagccgcccccccatctcctcctcccaaggtgtcattccttgccgctcggatcgtcgtcgcgtggtgcgaatcttcaatcgttttggtggagggaagaagggagg

SEQ ID NO: 488 - DNA, 182 bp, Zea Mays
cctccatcttcaaaaaattgtgtaactccttttttatcaaaaaataaaaaataaaaaaaatattgttagcttcgatgactcttgaatacacacaatgcttaggcaacacggacaatcaatcaatgcagtgtacctttgttaaaaccgtttactacatcatcttgctcctcaagcaacagccc

SEQ ID NO: 489 - DNA, 186 bp, Zea Mays
gtggattcacgccggtgagcaattcctcgaggcccaaccatgcacgctcccacaagcctcctcgcacaccctctactaacccagtcttccgtcctgcataggttccccgggtcagaccggaggtcgaggcgcggttcaaccgcggcgaccactagcgccccctctcctcacacagtttcaaggaag

SEQ ID NO: 490 - DNA, 186 bp, Zea Mays
atggagacctggtttatatctcacacaagtgttcatacacaatctagagtgaagtttttttgttgttgttattatcatgtcaggtatgagcacaaggttgaattaatggttaatgcgattgatatactgtaagtggcacttgcattggtaggccaagatgtattccttttccttgttgattttgtt

SEQ ID NO: 491 - DNA, 187 bp, Zea Mays
tggccagaacgtagtcgcgccaccgcaaatcgtcgtcgtgtttagtttcatcgtcggccggccaacgtacgacttccccgagcagtttcatgcacccaccaagaacttggactgtcagaattcctagaagaagaagatgatgaaattcaagaagtggtttctgaagaggagtctgcttcagtgcttg

SEQ ID NO: 492 - DNA, 187 bp, Zea Mays
attccgtactcagggttttattccctgttgtttttcaggttttaactttgtgctgctgttgatggtgttaagtgccggtgggctcggccttcttataagtcttagtaactcttctatacttcttattgaggatggtcatttgagctagtatatatttcaaacttatacttttgtaatcactccgata

SEQ ID NO: 493 - DNA, 188 bp, Zea Mays
taaaaggcaaactttgtaccgtgtttggattaaaatgtataaccgaccaaggccttacaagtgctgattgctaactaacagtctagcccatccagacagcacgctaatatatgggttactattttagccaaaccttgaactagctattaaccaactagatagcctaatttagactaaattgaacccag

SEQ ID NO: 494 - DNA, 188 bp, Zea Mays
cttcccttcctccttccttcttcctccctccaaactccaattgagatcgccacacgacgaagaaccacgcgggagggcttcaccttggagagagggggggggctagggtttagggtggtgtggctgcaatggtttgagggaggaggaaatgggaggggggctgcggccaagggtgtggggggaaatgg

SEQ ID NO: 495 - DNA, 189 bp, Zea Mays
gaacgatgaagcgcagccgtccgaccatagctggaggtgaatccgcggcgcctcccaacaccagcgagaaatccggttggcgcaggtggtgctcacaccaaatagcacactcccacacgacccgcacgcgccagtgaatagccaagtggtttgttgagggctaggcgatggcgagggtatggattgccc

SEQ ID NO: 496 - DNA, 189 bp, Zea Mays
aaataagcagaaatgaaagtcagatttagtgctactgctatttttggattccatgaaaaaataagtttgaacgaagtgtctgtaatcaagaaaattgttgtagataattccattcttattataatcaagaaaaaaaggcaaagcggcggcagaaagatcagctgatgcgggctagagagagcagggatt

SEQ ID NO: 497 - DNA, 190 bp, Zea Mays
gttgagtgctcgacgaaatgccgcagcgagcagcggtcatgagatcccctctgtgttgcttgcatcggcccgatctgcgcagtcccgacccaaggcgtcgcgtgggtgtttggacagccccacactacgtcgtcgatctgcgcggttcgaccgtctacgtgtctcacttcgccggatctgcgcagcccca

SEQ ID NO: 498 - DNA, 190 bp, Zea Mays
gttaggtcataaaccctaaccctagacagttatgtgagctctctggtttgaggccgagacactgtgtctcttatcgtggccaaaactaaatcttagggttaggaaaaccctaacccgagagcatcaactatttctttctattctaatctctgttctaggggtgatgaatgttgataaaaaaaatgagttc

SEQ ID NO: 499 - DNA, 191 bp, Zea Mays
cttgcccgtgccggactgcgtcaccacgattgtcgacagcgagcagccgccgccgcccgcatcactggagttgatgctggtgaagagcaccaagcaggccacgaggatcgcggccggctgctgctgctgcttcccgtccatttctttggagtcggtcggtaacgaagagtgctcgctgtgtgtgttttttt

SEQ ID NO: 500 - DNA, 191 bp, Zea Mays
attattcttcaaccggtggtaccatattcaagtcaaggaaatgtatatcatccattgtttgctcagcaactgaaagaacagacgtttgtagtactcactggaccgagcaggcggtacagaaatgactgcgtactcctctcactagaaccatctataaatagacgatgcaaaaatggcaaaagcaaaaaaaa

SEQ ID NO: 501 - DNA, 192 bp, Zea Mays
cgacggcggtagcgctcccctggcggcggccggattagcccctggcggcggcggctacagtagctgggcggttagggtttcaaaaccctaaccgccccacttataatgggcctgccgagcgcatgggccgcccctgcatgttggctgcacgcctgggccactccggcctggatggcgcacctgggccgcccc

SEQ ID NO: 502 - DNA, 192 bp, Zea Mays
ctcaacacatataggatgaaagaatcgttagccgagaatattagacaatagatacaaacgttgtaacacactctctcgctcgcattcctgtaacctgcaaaattctgattacccttatctaaaataaaatactgtagaaatctcttacagtaagttttacccctaaaaaatggggttccttttcaaaaaaaa

SEQ ID NO: 503 - DNA, 194 bp, Zea Mays
gcactttttgcacgcgcgcctgtgccagggtccccggcggaagaggagcagagccccactgccactggtgtggtggtgcggtgcagatgacgctctcctgttggattcactgatttttcatttgtcctcgaaggcatgtgtctcgatgtaataaagagtgttagcctggtcctctaaatttcatactctaaacg

SEQ ID NO: 504 - DNA, 194 bp, Zea Mays
gcttagggaccccccggtctcgaaacgccgacaagactaataccagaaaggccaacacgaaatgggagtgcagagattgcgagagtagggtgtactctccgtggcaagaggctggacggtggtgtatctgtgctcttggttggcgtgaacccggtctggtcttaagaaacctggtggcgagttgacatatgcaa

SEQ ID NO: 505 - DNA, 196 bp, Zea Mays
cttgtacgcgtcgttggactgtatggagggaaataaatttcagagaaaaaaaggtatattccgtcgggaattttaaagtttgggaaaaaatatattacaataagaaaaacagtattattaaaaaaactacatttttcctgagtatgatggcatagaccccgttaaaattgaagtgtatttgataggtaaaaaaaat

SEQ ID NO: 506 - DNA, 196 bp, Zea Mays
cttgttctcattcatgtgcattatgcatatcatttaggtacgttaattgatcacgtgatgcggaggatcagagccaagttattcccaagatgatgccgagagtgggcatctctgcaagacgatgtcgttaatcgggccaacttgaagatggataaatcaagcaagtgctcggctgagagatgatcgacaagcaagt

SEQ ID NO: 507 - DNA, 197 bp, Zea Mays
atgtaggcctcccaaaaggtaacggaggcgtgcaaaagtttcctagggccagacagacattggttctcgagtgcaaatgtagaagggagcttgactgcaagactcacccgttgagcagagacgaaagtgggccttaatgattcgacggtgccgagtggaagggtcgtcgctcaacggataaaagttactctagagat

SEQ ID NO: 508 - DNA, 197 bp, Zea Mays
tatcgaacgggcaactcacaggtgggaagtaatgtctgaatccgtgcccgtccgacttcgggtatgacatggaactaccccatgagtcaaaaaaatatatccatgcccatatccgtcaggttggataacagatggatatcgaaatccataaatcaaattgccatccctactcagacaaggacgtgtatggcatctga

SEQ ID NO: 509 - DNA, 198 bp, Zea Mays
gctaggttaggtaggcgccctcaggtcgtcgcgctctcgtgctcgttggctacctagctggttgctgcttgatgagagctgagcaaccaaccagaaaccggctctccaagcgaccaatcaccatgcgactgcgcgcgtgcctgcgtgccgcgtgcgaggaagcggccggattggtgcgcgcgcggtgtgctggtgtgc

SEQ ID NO: 510 - DNA, 198 bp, Zea Mays
ctcacacatatgatgaatagtggtacagaaacgaatgtcacatctttactatataataggagttctgtacaaaataaataaataattacatcataaggatacaacgatccagcaacccaaagttgactgggagacgacagcctagacctctcacgagctcgtcacaacatcttccatgcgcctcatcctgcggtacct

SEQ ID NO: 511 - DNA, 198 bp, Zea Mays
acgataatttgtttaccgaggttcggttccaaagaacctaatccccgttgaggaggccacaaaggtcgggtctattccaaccctttgcctctctcaatttatcacacagaccgatcgaggtttctcattaatcacttgggtcactaagaccccgcaaggatcaccacaagtgcaatccaaacaacaagtgcaacaaaa

SEQ ID NO: 512 - DNA, 198 bp, Zea Mays
tcaaccttgccgcaccccaacctctagttcgtacggccctacacgcagcggaggagacatccagagaaaatactcaccccgccatggcgcacccgaagatactcttgcgacagcagaaccctcgactcaccctctctctctcggcgagatgcacacgaccctcagttcttgcggttcgctcggctccagatgatttct

SEQ ID NO: 513 - DNA, 198 bp, Zea Mays
atcgaattggtttaggtacgctagttggtcatgtgatgcaaaggtcaagagccaagtattccccaagaggatgcaaagagtggacatctccgcaagacgatgtcatcagctgggccaacctgaagatggacagacggagcaagtatcggaacaaaagctgatcgccaagtggtcgtcgtctaacaaacactaacctag

SEQ ID NO: 514 - DNA, 199 bp, Zea Mays
ccggattcaaacagcgatatcttttaaaatataattccaaatcaagcacataagtacttattggaaagataagacaaagccctacattattatcatactggttaacactaattaaccacgaaaaattcctagaaactgctaatactactgctgttcacccacctgaaaaatctgttttttttggacagcaacataaccg

SEQ ID NO: 515 - DNA, 199 bp, Zea Mays
agcagtgcggacacgaggatctgaggaatcatcctggtacctggaatctcaagtcccaggcaagttgtgcccttgatcactttcatttacccaataatgttctttattatcactattcaatgcataagtgtaattttgatgggacccaataggtcatcctagtatgattatcttttaccttgtttacccctaaatcatt

SEQ ID NO: 516 - DNA, 200 bp, Zea Mays
gaaactttagtcatgccattgttctatctcggtgggcggccgtggctagtcgccgttcacctggagcgcgtgcgagttcatcaacgaagatttgttctttccaccgagctctcagcgataccctggacaacatcgccattgccctcgccatagtgaggttacgagtcacctgaagatcatcctggtacctggaatctcaa

SEQ ID NO: 517 - DNA, 203 bp, Zea Mays
atacctagggtttccccaagaaattctgcaataagagatggggaagagcatctccttgatcctctcttccccttcaattcaacgtgctcctcctcttctcgatccttgctgcgcggggggagatctagagagaggaggaagccatggagagaggctgccatgggaggagaggacgaccagcccaaggggaaaggagggagggg

SEQ ID NO: 518 - DNA, 203 bp, Zea Mays
accaaaaacgaggagagagagagagcacatgaatcaataccctcccggaggaggataggatggagggtaggaagggtagtccgggaaaaaagttcgcatcatgtcttcgtcgtatgatgagtcctgccagagggaaacccggatgcggaagacgtaccctgataaggaggaggaggaggatggtggttgtaactggagccaga

SEQ ID NO: 519 - DNA, 204 bp, Zea Mays
acctagttgactggaataatgaatcaacttaccctcattaattccgacttgaaaccacgaaatcgacgacgctttccggtccgcgcataacaccaaatatgtgacgagcaacgtactagacttcattattctatccgatcaaattttattctgggactaattcactactgcgatttacgcgcacgtcaccggcccacgttaata

SEQ ID NO: 520 - DNA, 204 bp, Zea Mays
attatatatcttcttttcattatcgtaacattagggcaaaatattacagactcagatagatgatgagaggaggcaacgtgaggaaatgaagaagaggatggcggagatgtttcagtacatgcagagccttggcgtcacattcgatttttctcctccaccttcgttgttccctatagctgaccctgcttagttccatactcctgt

SEQ ID NO: 521 - DNA, 205 bp, Zea Mays
tccaccacaacaggcttacattgaacggtatttaatcgacacagacgggtgaactttcctgctcaacgtctggtctacatttcatattatttcccaaaacttgatacctgagagaggtaccctaattgaatgatgaaatcatcgcggccgcaatggcttcatcatcacaagcccttttatttcacaaactctcatatcccgtgtt

SEQ ID NO: 522 - DNA, 205 bp, Zea Mays
gccgcagtgactggttggagaaagaagagacaagggtgaccgtcgatcgtggaacggacgattaggatttgatcggagacattctcttcagtgttaagatcgtggccgtcgaatctcgtggtgacagctaggattatatcccgtgctcataaaatctaggccacataccttgaatcctagggttcatattatgtaccgtatcggg

SEQ ID NO: 523 - DNA, 206 bp, Zea Mays
taggggatataattgttaatgtgacgagtagtttagacaatgctaatttgcgtggaggatgaattattaatacatgagtgtcggagttcattagtggtcgcgccacattgattgaagtgtctcgggtgcacgccaccatatggttgtatgcgagacgaggctatgtgcatgatgagtttagtaaaaatccatcggtgccactagtg

SEQ ID NO: 524 - DNA, 206 bp, Zea Mays
ccggcacagggaggcgcggactggacagccgggcgcggaacagcagaggcgactgagtgctcggcgtcgggcgtgcacggcacgggacagcaggggcgcagcgtgacgcggaacagcaggggcgcgggaccaccgggcgggtgctcctggtcgggtgaagcagggagaaggctgccgagcagtggagaaggaccggcgtccggagg

SEQ ID NO: 525 - DNA, 207 bp, Zea Mays
gctgttgtacctgccgcatcgcctgcattgatgctgaccttcctgcttctctcaaggcgctcatgctctcgaatctagacgcacagttgaaggtttgcaacgggaagcttctacacgttatcacttcagtaaatggtttctacttgccagtgaagccacacaacgttaggcgctccctggtgggcttgctgcaacaactcagcaatg

SEQ ID NO: 526 - DNA, 207 bp, Zea Mays
tcgaattacaataaagagtaagtaatactacagactagagtcatttacataatataaatcaaagtgcacataatagaaacgtagccaacgtaaataaaactcaccataggcagctcactaggggaggtcgctagcctaatcctcgaactcgttgatgtcctggaactcctggagatccgcctcgtcgccttcttcttctttacctga

SEQ ID NO: 527 - DNA, 208 bp, Zea Mays
acatgtggtccaagaggagtcgtacaatgaggagtacgagttgatctaggtggcgtctcccaatcagctttatggcgccaaggatggatgtttagttcgctttattattatcatttattttagtaagacttctgctatgtagtaatgacatctatggtatttgtgacatttatctctatacactttgtcattatatgtgatgttcttc

SEQ ID NO: 528 - DNA, 209 bp, Zea Mays
cggctcatcgatggcacatagagtacgtccttcagcacgagcgtctttcctgaagttaacttcaggtagacctgtccagtacctcgaaccgctgccggaacaccatttcccatcaagactggtgcgctgctgtatccctggaatgaagagaacatggatcgatcagcacaaatatgaacagtagcaccggaatccatccactagtcatc

SEQ ID NO: 529 - DNA, 209 bp, Zea Mays
ttgctcatgatccagtgaagcatgaacttactaaacacataggtgttgatgcatcttttactcgatctcattgtcagcagaaaactattgatctttaatatgtgccctcagaatctcaattggcagatttcttcaccaaagcacaaacaagagcacaacatcagtttcacttgatcaaactcaaagcttcagatcctccttttccacct

SEQ ID NO: 530 - DNA, 209 bp, Zea Mays
cggcgcgaaggggctgtgcgtcgacgaacaacgtgcagcgacaacaagtgtgtagctacttgaggggaggcattttgttgagcgtggcgagtgcgggatggaggggagtgtcgcggctgctatgttggcgctgctgcgagggggtgtacacgaaggcgaggtcgatggcgaacgcgacactactgctgtcctaccgcgacaccacgcgg

SEQ ID NO: 531 - DNA, 209 bp, Zea Mays
ccttgatagcttgcataaataatttttctgaaatctggttgacagtaaataaactgaccatcgatagtagataagaacacactacatggggacatttgttgtacaataggacttctctattaacatgtgaacatttaatctattgactggtttgagtttgtttgataccttcaattttgctattatatttatgcacaacagcataagtg

SEQ ID NO: 532 - DNA, 209 bp, Zea Mays
gcggccggaggcatgcgtggagtaggagggaggccaccagaggcacgcacggcataggtgggcgacggtcggggacggtgtgatgtaggcggcgctggcggcttggagcagccaggggtgtggccagacgtgctccgaccatgcttcagccattctcctttagcttttgctcgatccgtccatccatccatccaccaacaaccatttcc

SEQ ID NO: 533 - DNA, 210 bp, Zea Mays
cccagtctccccacctttggccgccccccctctcatctcctccttttccaaactcttgcagccacacaccaaaccctagccgccgccccccccccccatctcctcctcccaaggtgcttttcgttgccgctcggatctacgtcgcgtggtgcaaatcttcgattgttttaggtggagggaagaagggaggaaggaaagggggagaaccca

SEQ ID NO: 534 - DNA, 211 bp, Zea Mays
cccatatccaaatcgtgcagagcagtcatcccatctaggcgattatcggtcttctcgtgtgcgcagattgtgatatgttcctgagcttcgaggaatcgaagatcaagcgttggcgaccaagtgatctggctcttcgagttctacaaagttgaataccctgagcatctgtttggtgaaggcaagtgttctctgacccattatgtcctatcta

SEQ ID NO: 535 - DNA, 211 bp, Zea Mays
cccagtcagacgtgccctccgccataaggcttcgggcgcaacttgcgttcaaaaaactcgatggtttcgcgggattctgcaattcacaccaggtatcgcattttgctactttcttcatcgatgcgagagctcgagatatccgttgccgagagtcgtgtcgattaaggtgtaaccgctgccctgggagcggaaggcgggccgaccgctccgc

SEQ ID NO: 536 - DNA, 211 bp, Zea Mays
cagcgatgaacgtcgacgaggggtttcgacgggcaggtaacgacgaggtttggacggggttcggggacgtctccggcgagcaggggaacgggtgcgatcgtcggtggacagcgaggtacaactccgacgcgtctccacggactccagcgacgacggtgacgatcggtttggtcgacggcggaactccggcgatgaggctccacgaacggcg

SEQ ID NO: 537 - DNA, 212 bp, Zea Mays
atcccgttggccggatgctccttgcatctgggtataagtatcaagccttgccatgccctaaaccttgaccgagccgttcaacgccccatacgcagagctcggccagtgggcacgaaaatagagacgccgagcatcgccaccatatttacccagctcgagcaccgtggcatgcaggaggcagccgtcggggatcagcgccaccaaaatcacgg

SEQ ID NO: 538 - DNA, 213 bp, Zea Mays
tgggaatgaggagagtagcagcacgtccactttcactctcataatagcgctgcccaggcgtagccatgatttaattagaaacttgttgtcaaaagaagtttatttttttgctagtcgtgcgcactggttaattcagttcatgtcgtatgtttaacttccctttgctagccgattaataatacttggtatgtttttgtcatgatatatgtttat

SEQ ID NO: 539 - DNA, 214 bp, Zea Mays
ggtggtgatgtcgcggaacgcaaagcaaggttgctgttagacgcaggcgctcgcttaacggtgaatgcattagcgtttattccacagttcaccgcatgggcagatgcaggcatgttaaccctcgtcgaagggccatttgatgaaagccttctcgacacctgctggctggcgattgcagcgacggatgatgacgcgcttaaccagcgcgtcagcg

SEQ ID NO: 540 - DNA, 214 bp, Zea Mays
cagatctcctgcagtcgattgtcaacaaggcttgtgactgtggcatcctccggctccctctaccgaacacttgtggtcctgatttccctattattcaatatgcagatgacactatcctcataatggaagcttgtcctagatagcttttcttcctaaaggcgatgctcaattcttttgctgaatccacagggctacatgtcaactaccacaaatc

SEQ ID NO: 541 - DNA, 214 bp, Zea Mays
ttttcttttagttttttttacagggccacaggtttttctggctcggccctgttcctaaactagtcctaaaatgggtacccgtgtttcgtgttgtatgatatgatatgatatccgctcgacaatgatcaggtgataaatgagattttctaggattcacacaaattctcctggagcaaatcgcgcgctcggggtttcaatggacgtctaaagtaag

SEQ ID NO: 542 - DNA, 215 bp, Zea Mays
cacaactgtagtcgctcccagcgatgccatccgcaccaccggccaggatgctgagcagcaccaacagcaaggtgcctacggggcggttacttggcaccggggaacgggcggtgcacgatgttgactcgaggcttcccggggaagggcaaccaccgcagctgaaggtgacaccgattacagcccattggaagttttcttctcatctctgttatcag

SEQ ID NO: 543 - DNA, 215 bp, Zea Mays
gctctttgccgagtgtccaaactggcactcggcaaagaaggcggctttgccgagtgctgccaggaagacactcggcaaagatatcttcgttgccgagtgtcatcgttgacactcggtaaagccgctgtctccgtcaaccgacgccgtaacggtcgcttttctttgccgagtgctccctgacattcggcaaagatatttgccgagtgtccgagaaa

SEQ ID NO: 544 - DNA, 216 bp, Zea Mays
cctctgcacccgcagaacgtaaaagatcgacctgcgtggcgtcgccgtaataaactttgtagccgtatttacgcatcaggttaacggcgctgatatcccgctccagcacggtaatgcgcattttatttgccatcagcaaacgaccaatcacctgaccaaaacgcccgaagcccacgacaatgacctggggtttatcatcgttgacccacggttttt

SEQ ID NO: 545 - DNA, 216 bp, Zea Mays
atctttttaaaaacacaaggaaggggtaaatgcaccggggcttgtctggaataacactaggttagtgtttgttagacgacgtccacttggcgatcagccttttgtgttggcacttgttcaggcaggttcgtccattagcatcactacgcggagtagcccgcgcttggggtcaacttggttcgccttccgcatcgcgcgatcaattatcgtacctaa

SEQ ID NO: 546 - DNA, 217 bp, Zea Mays
gaagaggtactcgatccctctattaaaccccagttagatggctcctccacttgataagcagctactggagtagattcctcttcagtcaccactttagcttgaatcttcactccttctggtaggagttctatatgaaatgacatgatcatggatgtttatgcttatgcaacttgaaaagaaaatactaagaagcatcgcaaggcttacatcactctaa

SEQ ID NO: 547 - DNA, 217 bp, Zea Mays
atttgcttatcatacgaatcttgtatatataataactcatctacaagagttgaatctagggttaataagaaacaaaaaaaggagcacagcagtctctacctggtcacatgcatgaatgccaccaagtctgtcatgctacactcttgcatgagcacaggagcacatgactgtggttccataaactaaactatgtttcacttgtatctatcttgactta

SEQ ID NO: 548 - DNA, 219 bp, Zea Mays
ttattgatgattctggtgtgctgtatctgggccggtttttgtacctggatatcctcgctggtacgaatagaaaactcgtatgcgtgggggctggccggttataccgcgctgatcattgtgatcaccattcagccggaaccattgcttacgccgcagtttgccgtcgaacgttgtagcgagatcgttatcggtattgtgtgtgcgattatggcggatttg

SEQ ID NO: 549 - DNA, 219 bp, Zea Mays
atgatgcaatgagtccggagaggtctaggtcatcgtctcccaatcaactttgatggcggaggatcgttgttgccatatggtgtaatttatttagttattttgtatagaacttgtattaagtaataaaaatttgacattgttttctgtacactaagtcatcatatgtgtgagacttgatcttaacacacatttgatatacatatggatttgtccttaaat

SEQ ID NO: 550 - DNA, 220 bp, Zea Mays
catatatgcgccaaagaagacaacacatataataacatagtgtatagagataaatgtcacaatatcatcagagtacttattacatagcggaaggcttacaaaataaaagataaatataaaatgaactaaagtccatccttggcgccataaagtcaactaggagacgccacctagatcaagtcgaactcctcgttgtgtggctcctcttgaaccacctgtt

SEQ ID NO: 551 - DNA, 220 bp, Zea Mays
cgaggagaaggttgcacgcacgagagttgcgtgacaagatgacgcgaggtgagattgatggagggtagacttagacgaagggtagacagagggaatagacgaaagatcgacgaggtagtcggggatagcatatgcaagcgacttgctgttcgcgagaagaagcggttcggtgatctcgtgaataagaacacgagatccggaataggctcgatgagaggaa

SEQ ID NO: 552 - DNA, 221 bp, Zea Mays
aaactagatgctaaaattgccgagcacaacttagaaaatgagaaatttaaatttgctcgtagcatgctttataatgggagacgccctggcatcaaggatggcattggtttccaaaggagagacaatgtcaaacttaatgcccctcctaagaacctgtctaactttgttaagggcaaagctcccatgcctcaggataacgagggttacattttataccctgc

SEQ ID NO: 553 - DNA, 221 bp, Zea Mays
cccctctctctagccttggacaccatcccctctcactcctccacccatttgcagctgccacccacctccccccatcaaaccctagccgcccctcctcaagcccttctctccaaggtgccattcctttcccgctcggatctacgtcacgttggtgcaagtctcccattggtttttggtggagggaagaagaagggaggaaagggggaggattcaaggtgatt

SEQ ID NO: 554 - DNA, 221 bp, Zea Mays
attgacgtatagaggtcggatcctcgtgtagaagctaggagagcttaaaacacgagtaaaggtctttggcggaccctcatgctgcacgggagccagctcaagatagactggtctataaagagtggatcctcgtgactgatctatgaatgacaaatcctcatgtgacgtgtttcgtgatctttctcggttgagctttctaggatgctacttctatttttttg

SEQ ID NO: 555 - DNA, 221 bp, Zea Mays
gcggtgggtggcaaaaccgatatgaatgatggtgcaggtgcgcaacccaaccgtttgtgtactactactggtgtatacgattgacaccaacaaacaaacaaacaaatacttcgagcgttggagataacagttggaactagctaagctacaaatccagtggatgatcttacaaattatatatggctcttgtaatccatttcttcataaactccaatatatac

SEQ ID NO: 556 - DNA, 222 bp, Zea Mays
ccccctggcacccgaaaaagcacatatgtctctgcggctatttaaaatttcctcaaaggcctcagcttcgtgattaatccattcgatgagaccttcagggttgcctcttgtaaagttttctacgctcgagaatgcgccaacgctggcgaagctagctttcattttcttaacacactccatagatttgacatagcatattttcttggacgaacgaagctcttc

SEQ ID NO: 557 - DNA, 222 bp, Zea Mays
aaattaaagctcacgcaccacacagtcacaaagtaagctgcgatggaattattttccgcgcccataaagcgtccaaaactctaacaggctcctcaccaacatcaagctaggctccacgttttcccttcccacgactacacgatgcgttccattttacacaatatatgaaattatggagagtagaaatggcaaaagaacaatcttggacaaggcaaaaaaaaa

SEQ ID NO: 558 - DNA, 223 bp, Zea Mays
gccaaagaagaacaacacatataataatagaatgcatagagataaatgtcacaatatcataaaagtatttattacatagcggaagtcttacaaaacaaaagataaatataaagcgaactaaagtccatccttggcgccataaagtcgactgggagaagcccccaagaccaagtcgaactcctcgttgtgcggctcctcctgggccacctgttcttcttctatg

SEQ ID NO: 559 - DNA, 223 bp, Zea Mays
acacaatataaagtttaaaacacatattcataatcacttgctcacatctggatcacttagcatgcatagactattacaaccaaggctcatctgtcaacaaacataagacacattgctcatggagaggagccacttgctacatcttcattattcttagaaaattctagtgcgtcttcatcctgttaatacacaaaaataagtcagttttggataaataaataca

SEQ ID NO: 560 - DNA, 223 bp, Zea Mays
tcacgaacttaagatgtagtgtttacacaaatatttcagatacgagttaagatcaagtgtttacacaaacataacgtccacgagttaaaaaacataacgagcacgagttcaagtgtttagagataaccaccacttgggtggttagagctttgatcggtgccgccaccaccactaggaggagggaagcgaagagggagtcaacaaatccagtccctgctgcggg

SEQ ID NO: 561 - DNA, 224 bp, Zea Mays
gtaggaagcgccccgccagaaatagaaagagggagaacggagaacctccaccgtcgaaccaggggaagtgtagcgccgccgtgggtggaaccttggcgtaccatcgctcggtctcttgggtagagaacttcgctgaaccccagtgatttgctcggaggacagacacatcatcgcggcctcgtacatcggcgcggtcacccgtatctgcttcacgaaacctggta

SEQ ID NO: 562 - DNA, 224 bp, Zea Mays
tccatggagactggcggcacgccgaatctcttgacaccgacgacgcagcacccgacttctagcttagcgaccctgtggacgagacctcgcgcagtacagggacgcgccaccttctggcaccgcgtgaatattgcggaagagttcgacttcacccgcgatcaaaccctctccctcggtttctctctcttaatggctgcaatctaggcggcgcacacaggttcttg

SEQ ID NO: 563 - DNA, 225 bp, Zea Mays
gataaaggcgggtgcaactcatatatgcaccaaagaagacaacacatataataacaaagtgtatagagataaatgtcataatataattagtgtacttattacatagcggaagtcttacaaaataaaagataatataaaacgaactaaagtccatccttggcgccataaagtcaactgggagacgccacatagatcaagtcgaactcctcattgtgtggctcctct

SEQ ID NO: 564 - DNA, 225 bp, Zea Mays
gtcgacagaaggcaagatctgccttccagaattgctctcaacggctcctagctgccttggggctataaaagggacccctaggcgcatggaggagtataccaagcattccttgagcaatcttgatcactcacacttcattcttgcgcacttgttcgacattctagtgatttgagctctgttctagtgtgctagtctttcgagcttaagtctgggtcttgtgtgtgc

SEQ ID NO: 565 - DNA, 225 bp, Zea Mays
cccccataggtcaagagcaggtaccgctggatgaggcgcatgaaggatgctgtgatgagttcgtgagtggtctaggttgtcgtctcccagtcaactttgtgttgctagatcattgtcttcgcatgatgtaattatttaactattttgtacagaactccattatatatagatgatgtgacattcgtttttgtaccatgagttatcatatgtgagacttggtcccag

SEQ ID NO: 566 - DNA, 226 bp, Zea Mays
tttttttgctgattctggccaacatcaaatgtctaactttttagtccgtttctataaaaatcgctttggtgaaaactatccaaaatcaacgtgaacacaccattggctgagccatctcggtaagagaaatccatcactatctagattctaaaccttatagacttctttgtcttcttctacgggtaatctccatacttcgattttcatacagctaggctaaaaaaaa

SEQ ID NO: 567 - DNA, 226 bp, Zea Mays
tataaacccccccagaggagaagaacaggtggtctaggaggaggcctataatgaagagtacgagcttatctatgtggcgtctcctagtcagctttatggcgccaaggaataatatttagttcgctttattgttatcatttatttttgtaagacttccgctatgtaataatgatacttgtgacatttatctctatacactttgtcattatatgtgatgtccttcttt

SEQ ID NO: 568 - DNA, 226 bp, Zea Mays
cggaggcgcctagggcccccgggctttggccgccggcgcgggcgacaacggtccacgccccgagccgatcggcggaccaacaggagccgttccgcatacggccggtgcgcgtcgccagcccccatccgcttccctcctggcaatttcaagcactctttgactctcttttcaaagtccttttcatctttccctcgctgtacttgttcgctatcggtctctcgcctgt

SEQ ID NO: 569 - DNA, 227 bp, Zea Mays
ctgtagggtgtgtgggtgcccattcttctgaccctcatcttgctcaccgtcatgttcgtgtggaaccacaccactatctagaagtatgagtatgacgcatacaataaggtgaccctggagtggttggtggcgctggacgacaagctgggcatagcacaacacaatgtgcgaaaacttgtttacaattttttacatttgaagcggtgataatgtaaaatttcttaata

SEQ ID NO: 570 - DNA, 227 bp, Zea Mays
ctagtagtaacgtgcatggaatgcgatggcatgttcaaagctgttgaataacgataacgtaacgtgtgccctgctggaagcttccagagctgtatccgacgtgtacagtacagcccgatttcaacgcatacggccatacaaagggagtaaaagtaaagtacagcaccggccctattggctattgcaacaccatgacctcaatgaataggcccagttctctctcaaaa

SEQ ID NO: 571 - DNA, 227 bp, Zea Mays
catttttcaaggacatctgtaatgtttcatcctcaattgtcctagagacgatgaggcagtatggatcatggcagctgatcacataacaccgataaacattcagaaaaaaatttatcgaagctaatctcacaacaccgataacattcagaaaaaaacttatcggtcaaacatctgcccaaagatctcaagaatttgaagtaatgtgtgtcgtagccagtatctgtaag

SEQ ID NO: 572 - DNA, 227 bp, Zea Mays
ttagtttcctatttaattcagcaatctgaatacccaattggattaaaattatgattttagttaggcgattgtaaatatgtgataatgtgattttaacaacttagatgtagtatttaatgcctatttagtgtttagtataaacacgatgtctgttagcgactctcgtgagtcgtgcgcgtcatcgcactgtctacgcgttgttcgcacgtgtggcggtcgtcgtcgtc

SEQ ID NO: 573 - DNA, 228 bp, Zea Mays
atgattgtgtgttgtcgctattagtgatggcaacggggaatttcccgtctgggacatccccgtccccatggggagaaaaattccccattctcgcccctccgaacgttcacggagtgatttttactcccatccttatccccatcgaggaatttatccccgcggggaatctgtccctgttagtagatacaatatttagaagcaaattaaaattgattatattaaattaat

SEQ ID NO: 574 - DNA, 228 bp, Zea Mays
cttcttctttttgccgtcctttgtcatgaagcacttgtgaccgacgtttgggaagaggaggcccttgttgacggcgatgttgacggcatccttgccggaggaggagtcagtggagctctctaggaagttagcggcttgtttgaccacacccgcggatcagcaactgaaaactaacttcctagaggaggcagtaggaagttaactgcccatgctaacttcctagaggca

SEQ ID NO: 575 - DNA, 228 bp, Zea Mays
ggaccagcaagtgaaccaaagggtcaagaagctcaccgaagttcctgccgaagcgaccttcgaccatggagggtgcgtcttgacaattcctcgccgccccggccccagaaccgcatggtgagggcatgataaccatctgcgtgcctttgcgaagatcaccaggccacgacccgcaatcagacgctagcgaatcgcgactaccatggtgccacggtggcggtggatctc

SEQ ID NO: 576 - DNA, 228 bp, Zea Mays
caaactcgtttatgtgaccaaaatacaggattatcatgcaacgagcagatgaccctagaaaccaaatcagaacatgttcaggcaagcaaaacatcacacacttacacttacagccagaggcggacctggtaaagggcatgggtgtacacatatacattcaataatgtttgcaagagagactgtaggttagtaggaataatacatgtatacacttgtaattataaatca

SEQ ID NO: 577 - DNA, 228 bp, Zea Mays
cttaaactagctctaatagaggaatttcccacgaggaatcgaggatcggtcccattgccaatgtctacctaccattcctattccttggtgtgtccagggtacgtgtacactgggctaaaatatttgcggggtggcagcccatcctctacttgagcttgcgcaggccaattttttatttatatatgggccgaaaccctctctgggctgagagaagcattgatcattcga

SEQ ID NO: 578 - DNA, 229 bp, Zea Mays
ggcacggcgagctgcagctggggcacgacgagcagcacagcaagggaaaggggcgagctgccgcagggaagccgcgcgccggaagctccacggctgggcatggcggccatgggcagggaactcgtggaagagggagcagcggcgtgcagaagctcggcgcgcaggggatccgagctgaagctgagcacgcgccatggggaactcgccggcagggcagagagagctggag

SEQ ID NO: 579 - DNA, 230 bp, Zea Mays
catgatgcaagagaagagtaaacattcagaacatgattaattcagctaaccaaaaatacgaccaccataatgaccagaacatattagactacttgcacacactatttaaaaaatgaccaacatccctgacccgaagcccctgattaaagacattactaagtagtgtaaagttgtttagaagtgtagtgatcgtgctgctacttccctcctttccccaagccaggttcaag

SEQ ID NO: 580 - DNA, 230 bp, Zea Mays
cattgccaggtcggacctctcccggaccatctctcggccgtgaggaccccacatcctgtcgaacagcgcccccgccgaccgcttaagcaccgagtcctcgacctggaagatttcacgttcgaagccttcgtccgactggtcgaagacctcaaagtgcccgcacccctcgcgggacaaagcattcacgaccccctcgcaggtgatgagggaggcaaaggacatgaggcccg

SEQ ID NO: 581 - DNA, 230 bp, Zea Mays
aaatagtcaatttacacttagttagttataatatgtcggcaacaaaactgtggtttaagcacaaggcacgtcataggcggagtggtagagatggcttcgggcgaggctaaggtacatgttcgattcccagccgtcacgtccttgcgcgaaaaataccgcaacttgcgactttgacggagtcggacgggcgctagtggaaatcgatttccactggcggttctcaattaaca

SEQ ID NO: 582 - DNA, 230 bp, Zea Mays
cttatcgccaatcacggccaccaagggcaccacgtgcttcagcggtcatcgaagaggtactccatttccatacgtagtccaaacgaccgtgcagtcgagcatgactcaacggcggccgcgcgagcacccccatggcgtccgacgagaaattgtctaggttccggccaccgagttggcttgttgacagtgtgggccccttccatgtgtcccagggagagcccatggacggc

SEQ ID NO: 583 - DNA, 230 bp, Zea Mays
catatatcatgggaaagagggaacatattatccttccattgactatgtgccattagctattcctgatacaagaggactaatataggatgtttagtggacctctaaaaaggatgtcccataattatctagttaaccaagtactcatatatccactactagaggaaggggtttcaaacctttagcattagtaccggttctaattgttaggacctagtaccagttggtgactc

SEQ ID NO: 584 - DNA, 230 bp, Zea Mays
ggtggctggaacccgttatcctacacttagaaagatagcacgtgacatattggctattccggtcagcacagttgcatcagagtcagcttttagcactagtgggcggattcttagtgagcatcgcagcaggcttactcctgaaattttggaggctttaatgtgttcacaggactggataagaaacagttacaaagatggtgctgagattaatcaacaaagtttttgggact

SEQ ID NO: 585 - DNA, 230 bp, Zea Mays
tgtagacagatgctcgagcacccaattggccacacctccatcgctctccactcttccctcttccacagctcgacgcagaaaaaataccgtcataagttaaaattaggctcaccgcctagataaccttcacacaaggcaacaaaagtggcaatatgttgaatcctgtttaggttcaggtaatggagttgcacctgcagataatcaaaaagaaccatgacaaggaaatgaag

SEQ ID NO: 586 - DNA, 230 bp, Zea Mays
gcaacacattcagccgagtctgcgtgactttcgcgcgagatggggaagacgcacccgaccagcgggtcccacacgcacgtggctatgcgcaaaaggaagggctggcacggtggggcctggggcagcgaccaggtgaacgcccgagcaacgtgcatggctggcatcgttatcacgtcaaagcgacaagcaggaaatgatagactcgttttttttgcttgcttgatgttagt

SEQ ID NO: 587 - DNA, 231 bp, Zea Mays
acctgatggggtggtggcagattggctaaccatggcgggaggcggacccgcggcggcgagaaattcgatcggtgcccccaagtttccccccactgccaaccacgcgcacaatccatgcgacatggccaacctgccagacccccaacgcacgcgaggcacgcggtgagtttgtctctctctctccaacctgctccgcatgcactgctacaatggtggtgcgaccgccctcgc

SEQ ID NO: 588 - DNA, 231 bp, Zea Mays
ccaaagtttacaccaccgctgattaccatcgtcgtgagcgagagctatgagtagggtcaccgctcgagggccttgattacaccggtgatttgagggacctagactgtcggagtgatcaccaaggattagtggagctgtttgtgggagcggcaggcgggttgtggtctcaagcggcaagtaattctccgccgatgaagaaactctatcactgatctgcccccacaccatcgc

SEQ ID NO: 589 - DNA, 231 bp, Zea Mays
aggtccgcctcgcactcgactggctcacagctcctgcgtctgtcgcccagcttcataaactgcaccaccgcagctgggtgggccgtgggcgcggcaccggtggcggcgtcatccttggcagcaccaacgaggccaagctcgtcacgctcgtcgccgtgcgtgacgttgccatccattcaccggagtgcctccttggcagcacttgaaggcgtgccgcctcgccgagcccgg

SEQ ID NO: 590 - DNA, 231 bp, Zea Mays
gatacaccaccatccagcctcttgccacggagggtacacactaatctcaccatctctccactcctattgcgtgttatcttattctggtattagtcggcccaaggcaaagcttacccatgatgaggcatgtgaccagttaaaaggtcctcgatcatcaagcctacattcagtataatccttaatcaacatgggtagaacatcacctattcctagcccaagtctcgatttaag

SEQ ID NO: 591 - DNA, 231 bp, Zea Mays
aaatatcacaaatatcataatgtcattattacatagaggaagtcttacaaaaataaaggataaatttaaagcgaactaaatgtccatccatggcgccaataatctgactagcataagccacctagatcaacttgtactcctcattgtacggcttctcctaaaccacctgttcttctcttgtggggggttatatatcgcaagtgtgagctcacaaaagatcatagctcaaca

SEQ ID NO: 592 - DNA, 231 bp, Zea Mays
tcctgttttctatttctttcttttctatttttttacatgcaaattttaaattacattctgtgttgagatttcaagaaatacatccacactcatagttatgtatttttatactaattgtttaatccatttgcaccaaacatgcagtacgtaaattatttatgttaacaaaatattgttttaaatgtgttgttaaattaagggttcatccaaattttattattttattttgta

SEQ ID NO: 593 - DNA, 231 bp, Zea Mays
ggctcctgagggtacacagctcgacgtgaagatacgattgagggatggggctcctggtgctggtggcatgctgtgtaaatcgcagaacggaggaggatcaaaggaggtgctgtggagaaggactgttacctgttcgaagcgcgcaacaaaaaaaagcctacgcagacgggcgatatccagcttctagcgtcgctgccatcgtggtcactaacctttccccgtggacggcgt

SEQ ID NO: 594 - DNA, 232 bp, Zea Mays
ggattcctcaatgacggtagggatttgcggaagttctgccaggaatcgtggaggaaatccctacgtatactatccatggaaattgcccccacttgattcgtggggcttgtaatgtggtgtagcacagatcagtcgtggatttggggcgttgggtcaccgggatgccgcacgtcggtgagcatcgtcgtcgcctaggtgaaaaccattgaggtctggcgtcaagaggtaggag

SEQ ID NO: 595 - DNA, 232 bp, Zea Mays
tttgtgccgatgagaagaaaaaaaaagaaagaaagggtacaacttcagcggtggaaatggaaatgttctttattcaccaacggtgacatatattccaagtgttggcagcaggttaaccgcagagcgagggtacctcaaaagcaaggaacaatacacgtagcaagcccttcttgtcgtgatcaactcaggcgggaaagagcaaacgccaacggcacgataagacgcgggagac

SEQ ID NO: 596 - DNA, 232 bp, Zea Mays
gtgagctcacccttcctgtactcatatcccccaggtcaaggacaggtaccacaggatgaggcgcatggaggatgctatgatgagttcgtgagaggtctaggccgtcgtctcccagtcaactttggttgatggatcgttgtcttcgtatgatgtaattatttaatgattttgtacagaactccattatatattaatgttgtgacattcgtttctgtaccatgaatcatcatat

SEQ ID NO: 597 - DNA, 232 bp, Zea Mays
cgacggctaagcgaactacaccccagatcctctaattattcagctaagggcatcccattccaccctcatggttgcactgttttctctggcggtcatccatagaacaggtccttacggagaggcactcgagaaaccgctcgagcccccttaaagcccacaagtacaacatcataataagagaagggaaaacaacgtattatagataatctcatcatgttcattgattagagtt

SEQ ID NO: 598 - DNA, 233 bp, Zea Mays
gtgctctgtaacatcccaatttttgatcccaaggttagaaaccctaaactcctaccccctctttaattctcttaagacctcatgtcatgagcatttcattcaccatacatacatcacgacttctagtagcacttcacatataatatttcattttggcacctagaaagcataaatgaatatttgtataaaagagaaaaggaattaaggaaaaaggaaaagagaaaaaaaagaaa

SEQ ID NO: 599 - DNA, 234 bp, Zea Mays
ccgagacaaggtagaggctgggcgcaggtgatgcttcacgaaagatcgccgccgaggaccctcctgcatagatggtttcgccccgtccgaagaactccaccggcagtcttctaatcccgcgagcaatggaggcgcgcccatgttagtcaccagggacccagcgacggtagtccaagcaccacaccggtgggttcgggacgtcgatctcgcccacgccgagcggaatttgagagg

SEQ ID NO: 600 - DNA, 234 bp, Zea Mays
gaaaatctaaaagaaaagaaaaagattttctcttcatctctatctctcacgctactctctccttcaaatttatcttcagccgctcaagctgaaaatatccagccgagtcttctcctgtatcttctccacgcgctggaattctcctgaagtcgttcatctcccttatctctcccggtcggcctggcgcttgtaagatttttcttgctgcccagcttgctccagctcggtgccaag

SEQ ID NO: 601 - DNA, 234 bp, Zea Mays
tggtactcgcaaatatttctttagctaagatacgtggaaaacatcatgcaccgctgccaggttttctggtaggctgagctggtaggcaacttctccacgtcttgcctgaatttggtacgacccgatatatcgagatgctaactttcccttgactccgaacctgctaactcctcttattcgcaacagatgagaatcaatcccacaaccctcacatgaagcatcctctacaactcc

SEQ ID NO: 602 - DNA, 235 bp, Zea Mays
caaagaatgatttaatgttgcatatgatctggaattactgaaaaaaacagaaatgactgaaaacacagagaatgacttataaacaaaaaatgacttaacatttattagaatgacttaatgttgatggaaatgacttaatattgtctgattggttgaatgactttgcttggactctgaaatgacttaatattgtctggacgctagaatgacttaaatattggctagaatgattgaa

SEQ ID NO: 603 - DNA, 235 bp, Zea Mays
cggtcgacggtttaccggtctcggcacgcgactggtcgaggtcgcgaggatgaagtggtcgaagtcgaatggtcagaggcttgccatgcctagcgcgctggctcttatccgaaacttcggacgatgagatgaaatgagatggggccatgggggcgggcgtgatcggctgatggccgccacaatcttgcctccgtatctatcgacgtcgacccgtctggacgcgcgacgattcctc

SEQ ID NO: 604 - DNA, 236 bp, Zea Mays
ccgatgagaaggcagccgtcggaggagatcgacgccggagagaggaatctcgtgtcatatacaccgtcgtcgtcgcctactcttcacatctgatgtttcgcgggcgccgttccacccctaagagaccgggcgtcgttccagaccaggggcaatgaaaaaatcatgaacttgaccgggcacagtttcagaacggggataaaaggggcttaaccgaacacctttcttttttgggccgg

SEQ ID NO: 605 - DNA, 236 bp, Zea Mays
cgttgcaacaactgctcaggtgaagatgaagttgtggaggaggacttctaggagtttcaagagtacgatgagttctaggcgtgggttagcggcaaacccctagtcggcttcctgtgtaggctgtgtgtatctacgtttcttttccgcactttgattattgttaaagactatgtggatgtctcggacatcatgatgtaatcgactattataccctcttttatgtcattatttgagca

SEQ ID NO: 606 - DNA, 237 bp, Zea Mays
cggggtttacagaaagccttctccaagtcaatgaaaaccatatgtaattccttctgctctctataccgctccatcacctgtcttattgagaaagcttccatggttgaccttatgggcatgaaaccaaattggtttatacttcatagagattctcgttattcctctcggacgatgctcgattatctcccatagcttcatagtgaaaggatcaagttgcccaagaggagggtgaattgg

SEQ ID NO: 607 - DNA, 238 bp, Zea Mays
actcattttacatcttgccataaggcacttgcgtgatgaccatgatgatcgtgatgaggatcagcggttgcgcgtctttggaggttcatcttcgcttgaagagtcatcccaagttttaacacttgtaagcgccttgcctttgctcctccccattgtgggttcagccatatttggacaactgtccctgaagtggcccttctccctacatgcgaagcatcctctctttctttgctttttc

SEQ ID NO: 608 - DNA, 238 bp, Zea Mays
tcagtcagtggcgctagctactcaagctaactagatggtatctgaagctggagatcctgatacggctgatctcgacgggctccagaagaacattgtacatgcttgcttgtgtgtttgttccgacagaaaagagcagcagcaaaggtttaaagtgtgatcatcccgacgacgagatcactatagcaggccggctatctactttcacaaactatcagggtactttaaagtggcagtaggc

SEQ ID NO: 609 - DNA, 238 bp, Zea Mays
cgaccgggcgtggacggtattcagtcctccggattttcaagggccgccgggggcgcaccggacaccgcgcgatgtgcggtgctcttcctgccgctggaccctacctccggctgaatcgattccagggttggcgggccgttaagcagaaaagataactcttcccgaggcccccgccggcgtctccggacttcctaacgtcgccatctgccgccacgtcccggctcgggaaatcttaacc

SEQ ID NO: 610 - DNA, 239 bp, Zea Mays
tgcaccggggcttgcctggaataaacactaggttagtgttgttagacgatgaccctttggcgaggagcttttgttctgccactcgctcagtctatccatcttcaggttggcccgactgatgacatcgtcttgcggagatgtccactctttgcatcctcttggggaatacttggctcttgacctttgcatcacgtgaccaactagcgtacctaatgagatgcataatgcacatgaatgaa

SEQ ID NO: 611 - DNA, 239 bp, Zea Mays
cccgtgcattgctacaggagctaaaattagtataagacataaatacggaacaaccatatattcgtagaagcagctctttatggtggactaccatgatttgttcatgtcgtacatgcgcaggatccgaagcaggcgcacaccaccatgtatagctcgtgcaccatcttcctatgcaacgacgacacgttgtggctgcgagccatcgagctgacgcgactgatgtctctgacgcaaccgca

SEQ ID NO: 612 - DNA, 239 bp, Zea Mays
tgcccctttcgggtaaggtagtcctccaatagctttcctaattagtcagccaagggcgtcccatactacccttgtggtagcactgtttttccgggtggtcactccatgttccagttaacataataatcttatcatgaacagtaaataacaaactgataataaaagtatgattatgaataatgtgtatctccatacccaaaaccacatatagcaatagcaggtactgcccaaaaattcag

SEQ ID NO: 613 - DNA, 239 bp, Zea Mays
tgaagttctgtttgaagactattgcaactctatgctaaaggatgggacttgggctggccacatggagttgcaacctgcttctctgctgacaagaagaaacatatgcactcacatgatgaatattgagttagattcatacaataattagtagacaccactacatgagagagggaaaggagtgccgtggaggaggatatggaggtcaccgaacaggaagaaaggggagtcgtggactctga

SEQ ID NO: 614 - DNA, 239 bp, Zea Mays
cgatattgtttcaccgcttctgactactactgttgttggttcgttgagcctgaggaatcaggtggaggagagggatcgaggcgtaggaaggagaaaccctaatcgtcaccgtcgattcctgtacttctgtagacatcaaaaactcaggccacagggaagtcaagtgctcgaaactcgaaagggaaggaaattcacacaatgacaaaaacaatagcctaatctgctgccatttactatca

SEQ ID NO: 615 - DNA, 240 bp, Zea Mays
agggcgaagaggttagtttgcagtggtcgaaggcgtcgcaacgacggagagctcccttgaatgcggtagttgatgacgttggtcactgttgcgcaccgaggttcggctgatgaagtccagtagcctgcgccaaatctccacgggtccagcaaccctctctccctctcggcacaacacacggttcatctctccctacggtgtgacgatgatggcgacagaagtcacaaggttctcggtcta

SEQ ID NO: 616 - DNA, 240 bp, Zea Mays
taaatgtcacattaacatcagagtagttattacattgcgaaagtcttacaaaataaaatataaatataaaacgaactaagatccatctttggtgccaataagtcaactaggtgacgccacctagatgagatcaaacttcttgttgtgtggctcctcctgaaccacatgttcttctcctatgggggtgtgaggcagcaagggtgagctcacacatgttcatcgttcaacaagttatggtga

SEQ ID NO: 617 - DNA, 242 bp, Zea Mays
ttaagctccagccatagtccactatgggggcgtggggatcctggtgttttgctggtgttaaccttccccacagcgacctagtttgcttcagccagtgcatcatgtgaccatggtgaccatgcaacccgagtgctcttctcaccgtggccagaaaacggagaagagggtgaaatgactgaagaaaagacatcaccacctttggaatctcaggcagagacttggctctacttcgacatctgcga

SEQ ID NO: 618 - DNA, 242 bp, Zea Mays
cctccacccgtgcgtagagccacagacgcacgcagtgccgctcatcttccagccaccatgtgtcttcagctgcaagcaccggccaataggactagagtagcagctcagcagcacaagttccccttcccaacccctcttctccatggcacggtgagctcggttccagcaacccctctcaaccatgccaggccaagctcatccatggcgctcggctatctctccgcgcgctcagccttcgaccg

SEQ ID NO: 619 - DNA, 242 bp, Zea Mays
cctgatatagccacccaaacgatccgaggacccgggcggaaccttctggtcgcacgcagtgctccaattcggcgctgagcgcgatggacagcatggggacgatgacccgcctgatccgtcaccacggattccggcagtatctctctctctctcaacccctctacttggtggtcgtgcgccaggttaagggatggaagggacgcggcgcagcccaatttatgtgcaggggatttggtcagcac

SEQ ID NO: 620 - DNA, 242 bp, Zea Mays
tggaaattacaggtaggctaccaatcgccatcgtctcttctcaataatcctgctcgtcaaattaaaggaaaaaagcagtcttttaaaatttccggctaccaatcgccatcgtctcttctcaataatcctgctcgtcaaattataggtaggctgtaaaaacaaatagggttaaggttacattaccagctgatacgaggtccagaggccagagaagaagataaaatggtgacatggccctcgac

SEQ ID NO: 621 - DNA, 243 bp, Zea Mays
cgtactagacttatcatctaaaaaacaattcagttcacacagacatttcagttcacatgcaacaatcgtgcggggtgggacaggagaagccgtactggatctcgggatgaaacgatatgggtctcaataagagtttcacacgatttcacatgccttggaaatgggttggcagggtttcatgtggatgaaactggttccttctcttctctcattaaatcagtgacatgtcatcaaaaatgttga

SEQ ID NO: 622 - DNA, 243 bp, Zea Mays
caagcaaaggttttagtttcatacttcgataattgtgaatcttgttctaaccactaatcaagggatctagtttgtatttagagctataattttcaggtttcgcctatccaccccctctagtcgactttcagccatctatacctatccccgtcaaaactaccggtacacgggctcaacaatcctacgaacaggcctcccaaacacgcatacaaagagctcgtgttgtctgtgaccgtgggctgc

SEQ ID NO: 623 - DNA, 243 bp, Zea Mays
cacaacttgttgagctatgatcttctgtgagcttacccttgcgatatatataaccccccacaggagaagaacatgtggtctaggaggagctgtacaatgaggagtatgagttgctctaggtggcgtctcccagccagctttgtgacgccaaggaataatacttagttcgcttattattatcatttatttttgtaagacttccgctatgtaataatgacatttatgttatttgtgacatttatc

SEQ ID NO: 624 - DNA, 244 bp, Zea Mays
tgcaatcgtcctctcggctattccgcacatcccaaactgttcttgtgtgtacattatactccaataagatcttgtttgggtgtaatcggatccacatcaatccacgtgttaagcaaaaacagcacgtgtgaattccgacagtgtccaaacaagtcctaactaactcattcccttgccctgtccgtagcgtagtacatgtaggcccgctttctaggcccacttctgctgcccaagccccaatgtg

SEQ ID NO: 625 - DNA, 244 bp, Zea Mays
ggaagcagttacaataacttacttttattgaaaagtgagacagagttatatagttacagaccagaacataatatatgagtgctgagtattattattacaaaccatggttggcaaaaacccctcccgaataagtagtaaaatgtttttaacggagggccttccctcccgcagctttagtcttggttctcttctttgggtaccacctttgaacagaagcaacaaaagtttgtcgcttcttcaccta

SEQ ID NO: 626 - DNA, 244 bp, Zea Mays
ccgggcacgaaatcaaatgtgtgctaggatcaagtctcacacatatgagactcatggtacagaaaataatgtcacatcattaatatataacagagttctgtacaaaatacataaataattacatcatacgaagacaacgttccagcaaccatagttgactgggaggcgacgacctagaccgctcacgaacccatcacaacatccttcatgcgcctcatcctgtggtacctgtccttgacctggg

SEQ ID NO: 627 - DNA, 245 bp, Zea Mays
cgctcgtgctcgaagaccgggctgggggagctaggggacctctcgtactctacgcacggatcggagtcatgactgcggacagggcccaatcggaatcgctcaccggtgttcgtcatcgccgcgtttcagccccgcgctatggaccgactccatcaccacaaattcatgggtacgaccgcttccgttgatgtcactagttaatccttgtggtgtagcgtcacgcgggggaggaagttactcctcga

SEQ ID NO: 628 - DNA, 245 bp, Zea Mays
atatagtggaccctgcatgtgttgttgtgacatgcatgtgggctcaatccacatgcttcgtccacgctcaaaaaaaaaacccccactactatacaaattcatgtattgtacacacaacacgtgccccatgcagatatgtatatataaaaagcacagattatttggggcgtctaacattttcaattcaggaatttgtggcgaacatctttttcgcgttcgtacaaatatcatgtaatgcttcttgt

SEQ ID NO: 629 - DNA, 245 bp, Zea Mays
ggacaacataaagaagtataagtagaaaaagataacaaagtgtggggggcaaatgatacaatgtacatggatctttaccaatgttaaaaaaagttacaaggatattgttgtactttcatattgtattgctggtcagttggtaattaaattatcatggtaaaatgcactcatcgatgatgccctcgcatgatgcatctagtagtgcggcggcgggccgaagcagccgtggtcgtcgcagtgcaccg

SEQ ID NO: 630 - DNA, 246 bp, Zea Mays
cagacgtcgaaggcaaattaggagggtgtttcatccgtggcgcctatcaatggatcatcaccagatcatgctcaacctgtacgtttctatggtgggtcgagaaactagtcgagttggccagagttcattgccagggttggatacggcagctgggctatagtacgtcgtgggcagatgcagagatgctaccatcgctccgatcgccggtaaggatactatccatcacatcgcttttcttcccccaat

SEQ ID NO: 631 - DNA, 246 bp, Zea Mays
ctctcttcctcatacgcgcgcccctgctcactgctgctcgccgagtactttcccggtgtgctacgccatcgccctttggccgccagagctgttcgtcgactgtcgccagaacccggtgccccgacgacctccctattggtgctcgatttcgccctctcggtcgtcagcccaccagccgtgccctcacccagcgcaagttacaacaagaagctgattgtgtggtagaggatccgattttgtttgagg

SEQ ID NO: 632 - DNA, 247 bp, Zea Mays
ctaatcttttgcatatgtttggtaattgtcacacttttttaccaaatctactacacccgaggctgcctttggctagtagaaacagtgatgaaacactttgcccaataatacccactactatcaactctacttatttttcgagtgtcccagaacactcaacaaatattttatcggtaaaagattctttgccgagtgttttttttcaaagaaaagcactcgataaattaagaatcgcaaaaaaccaaaa

SEQ ID NO: 633 - DNA, 247 bp, Zea Mays
atcgacattaataatctgctagcaatgggaagaaaaccataacagcatgaactaaattaaccagtgcgcacaactagttagaaataaacatcctttgacaagaagcttctaattaaatcatgactgcgcctaagcagcgttattatgagagtgaaggtggatgtgctgctacttcccacttccctggatgagcaacaagcacctgctttgagtaatgcaagagtgagatgaaacatctcagcaagcg

SEQ ID NO: 634 - DNA, 248 bp, Zea Mays
cggacatataataatagtatagtagcatactatatatatcgagatagacaaggacaacatatatcgaggtaggcaaggacagcatgagagcatgtttcacatgtgctattttataatgttactgtattaatatcatttatgtatgtgcgggcactggcaatagtttaagtatatcacttttaactatatcaagctttcgtattagttggcatctttaatctatactaacgtgaatgttttaatacaac

SEQ ID NO: 635 - DNA, 248 bp, Zea Mays
aagagaattcttcgttatgttcaaggaacattgagcttggggttaagatttggtaaatccaagtccatggtagtaagtgctttctctgatgcagactgggcagggtgtgtagatgacagaagatcaactggaggttttgcagtattcctagggagtaatttaatttcctggagctctaggaaacaggcaactgtgtcaaggtccagcactgaggcagaatataagtcactggcaaatgcaacagcaga

SEQ ID NO: 636 - DNA, 249 bp, Zea Mays
aaggatccactcatagtaagttttttgcaaaatagagtctttgattcttgataagccataccttgaatctctctagccagcatacccttgagagtcttttctttagtcgggtaagtcttgctgagtaatttcgtactcatggttttattccctgttgtttttcaggttatagttttgtgctgctgctgatggtgttaagtagccagtgggctcggccttcttataagtctaagagcaaagagttgttca

SEQ ID NO: 637 - DNA, 249 bp, Zea Mays
gttagacgacgtccacttgacgaccatcctttgtattagcactctttcagattatccatcttcaggttcgtccatcatcatcatcttgtggagaggctcacgcgtagcgacatcttgtggtcgactcagctttggtcctccacatcacgtgattaattaacgtacctgaataaaatgcattatgcacatgaatgcatatagacaagaatatcacaaacctaaatagtggtatgtgatagcgaattaaac

SEQ ID NO: 638 - DNA, 249 bp, Zea Mays
cagacatcattacattggcaagcactcatccatgaaccatgatccattcatccatccatcagaaaagaaataagtacttcgggaccgatataagaaatggagaaatgaagtttgatcaccttccttggtaccatctgagttcgttggcgcctaagaatccatggtcgtcaccgtcacctgggtagggcgtagcatatggctggttattttaggattttgttttttgctagtctgctagttgccttgtcg

SEQ ID NO: 639 - DNA, 250 bp, Zea Mays
ggaggttacaagttggtgcaagccgatagattcggggaagttagttgggattcagtctgatccgagcttcaccatggtataaaacggtggtcggggcccttgcctcattagcatagcctgctatagggagccagaagccaacaaaatatgaagccagagcgcgcgagagagaagcatcgagtaaaattgacggattttgtggggcgtgctcgaggtctatcttgggatgagggagtatcagaccacctgg

SEQ ID NO: 640 - DNA, 250 bp, Zea Mays
cacggattcctgcccacgcgcgcagtcgagctcccggcagaacgctatcgcggtgagtatccgccagcgcacgaatggggttggctgcggcaattcggggcggtgctgcccaatcctctgccgagcccggccgcgaatcaccttcgacgaagcaactagattccccacggtccgaagctctcctctctcccctttttctgcccagatgagcttagctccgatgtgcaggtggtaacttcctcgccccggc

SEQ ID NO: 641 - DNA, 250 bp, Zea Mays
cccacataaagctagtccacttcagccaaacaggacatttgctgagtacgttgatgtgtactcacccttgctttcacaaaacaccaggttgcctttggtgcaatctatactcaagtaaagaagaaggcgtcgaggcggatctccaggagttccaggacttcgacgagttcgaggattaggctagcgaccacccccaagttagctgcctgtggtgggttttatttacgttggctacgtttctattctgtgt

SEQ ID NO: 642 - DNA, 250 bp, Zea Mays
tgaggccatcgcctcgctcgccccttgggagctcctgctgcgcttgcctcgagaaccgttgcctccgcgtgcctaggggagccactgccaccgcgtggccctcagggagccgtcgcgcgccttggaaccacctccatcacgtgcttaggggagccaccgccacaacgcgcccctcgagaaccgcccccatgcaccttgagaactgccaccatcgcgcacctcttgggaaccgtctccgcttgtgcatcag

SEQ ID NO: 643 - DNA, 250 bp, Zea Mays
agggccaaccctgggcacaaatcaaatgtgtgctaggatcaagtctcacacatatgatgactcatggtacagaaacgaatgtcacatcattactatataataagagttctgtacaaaatagctatataattacatcataagaagacaacgacccaccaaccatagttgactaggagacgacggcctagaccctctcacgaactcatcgcgacatccttcatgctcctcatcttgtcggtacctgctcttg

SEQ ID NO: 644 - DNA, 250 bp, Zea Mays
gcaagtaatgatggtgataaaatgttgacacatctctcgctcgctcgtgcgacaacctttcgagaagaaacaatttctttaccaaaaaactttatggatgcttcgtatttcctaggagcgagctcacgcagttaggagaaacctatgctatatgaggaaaaaaaggaagggaaaggcatgaatatgcagcctccaagccgtagctagctagctaggtagctaggggggcataagcagaacacaatcatag

SEQ ID NO: 645 - DNA, 250 bp, Zea Mays
ttttttttttgctgctagttgtttatctcgagcatcgacaagtggcctagaaaacttaggactacatggtggtttgctatacaattggcgatggttagactagtcttgatggaggaattagtgtgtttggtcgataggcagcattattagaggacaggttaagcttattttaactggtgtttaattcagaggttgctggcaaaagtctatctctaaaagagtatattctctgagcgaacggattcatgat

SEQ ID NO: 646 - DNA, 250 bp, Zea Mays
ccggcacatccgtagccagtgcacccgtcgccgatcgttccgccgccgccacagacgatcaacgccggcagcgaccacgtgcctacaaggaccgacgctggtgattcgactacatgctaggagtctgtttgttgcgatcgatgtgggcgtggtgtctagggtcacgacgaattgctcgtcgtgcttctctgttcgtcgcaaagccgctcctcgtcgtgggcaactcaatgggcatcaaatccatcgctgg

SEQ ID NO: 647 - DNA, 250 bp, Zea Mays
gccatggttggagcagaggtacccgcgcccatggagaagcctctgcgcgcaagggaacagcagtggaaaagggaagctcggccatggatgctggaggtgctcggctagggagggagcagggagagggagccggcttccatggggaagaagggaggccgaccatgggagggagatgacgttggctgtgctccctgcttgcttcgtggggaagaagagggtggcgtgggggagatggccgatggcggctagg

SEQ ID NO: 648 - DNA, 251 bp, Zea Mays
ggctgtcgcttgtgcaatgtgtaggtattgctgttcgtgtgctctgccctgttttaaggtaccgatgtgatgagtcgtcttgtgttcagttgtgcctggcagtcgatgctctcttactcgtcgcattagtatttgaccataaatagtatcatccctagaatgagaatgttttggcagctgccacttcgttctctgggagctggagtgttgtttacccgttcatagtttaatctcaagtatttttaccatcg

SEQ ID NO: 649 - DNA, 251 bp, Zea Mays
tttttacctcggattatggaacttccgggttccacccacgataccgcgcggcacggcggcggatttcctgacaccgacgatgaattagggaggattcggttggtctccagttcctacgactccgtgcctaggttcaccacggcctcgtcaacaaccatagccccactctggccatagaccggcagcacgggcagcacacatcgacggtggtttcttttctactagactgctctccattggctctactcggg

SEQ ID NO: 650 - DNA, 253 bp, Zea Mays
tccaagagtgcttgatattgccgggagggaagcggatgggggatggagaggcgcaccggccgtatgcggaacggctcctgctggtccgccgatcggctcggggcgtggaccgttgtcgcccgcgccggcggccaaagcccgggggccctaggcgcccccggcagccgtcgtcggcgcggacggtatccgcgcgcctctggcgcgcccctcggggcgctgcgctgcaacggcctgcgagctccccatccgaccc

SEQ ID NO: 651 - DNA, 254 bp, Zea Mays
tgctgtggtctcaactatctgaagagcaagagaaaactttgataagatttttattcaacaacaaagatgtttttgcttgttcggccaatgatctctgtggtgtcaacagagacgtcattgaacattcactcaatgtcaatccatccttcaggccaagaaagcaaagacttcgaaaaatatctgatgataaagccgaaggtgctcggaatgaagtaaaaaagcttttcagtgctggtgtcatcagagaggtaaaa

SEQ ID NO: 652 - DNA, 254 bp, Zea Mays
tcgcacaacaaaattccgccacccacgatgaaggtcggttctgcggcggcagagaaacaccatcgagaaatcacgggtcctccagtcgcaatctccccaaggcacagatacacgaacgaccccagggcttgatgaagctacgcgaccagtctttgtgttccaagcgtctacggaggtcaagatccacggcggagctcccatgccacacccacgcggcgacgagtcagcaatagtatttacagggagggttctag

SEQ ID NO: 653 - DNA, 254 bp, Zea Mays
gtaatagtatggtattgcggaggatgctactcaccgagattcgaagaggtgacctaggcttcccacggcacacggcggaaacagaagtccggcgacaaattccggacaccaccgtggtcgccatctccccgtacggccacaaaatcttcaccagacaccctaaaagctcccggacacgacctatgtgcccggtctttaggcgaagaagacaatggcgctggcggatgatttctggccgcagtccaagcctaagc

SEQ ID NO: 654 - DNA, 254 bp, Zea Mays
ttgggtagctgttttacagctgcggatgatggcaactaatgctacacgccggttcggtcaggagcaaggaaggaacggtacataactacatacgtcaggtcaggtgaatttacaaaacagatatatggagggcgacgcgttcacgtttacggaacagtgatgagttgattagtcgccggagatacgtagggtagtagggtgtatccagctggtcgccctgattgcatggtcgattcctgcgcatgtgcagggac

SEQ ID NO: 655 - DNA, 255 bp, Zea Mays
tgtttataacaatgcaaacaattatccctaaaaattgtaatgaccttttgtacaccatacttgccatgatctgcagttagatttaaaagacttgaatgaataaaaacgacgtgtctgaggatttgtacttctcaagacgaatcattctcaattatcattcagctatgatgcccatttgtggtttgctttataggtcaatatatgttctgcttgtaatcgacttttcctgatatatagccgtgttagcctattttt

SEQ ID NO: 656 - DNA, 255 bp, Zea Mays
ttttattcttaatttgccgagtgcttttcggtagggttggagagttgttcctatactttaaaaaaatgttttgctgtttttttattttttcgattattaatttgccgagtgcttttcgacactcggcaaagactttgccgagtgtccgaaaaaagtactcggcaaagaaccctttggcgataaaatatttgccgagtgtcttagacactcggcaaagaacgcgattccggtagtgcatggaccaaaagaaaaaaa

SEQ ID NO: 657 - DNA, 255 bp, Zea Mays
atctcgctcctatccctagaagcctaggagttgaaagccataacacctcgaccccttttgcctcctcggccaacactgctccttacacaaaactcagtgaggggagaagaatcgagggagagccacccacgacgaacgcacggtacaccatcgcctgggctttggcacgatgctcatgatcttcgccagggcgcaaacagaaacgtcggtagcgtttgttgaattggggatcatctctgcatcagggaatttctc

SEQ ID NO: 658 - DNA, 255 bp, Zea Mays
cggcgacggttccctcggacgtgcgagcggcggtgatcctaggggccagcagcggtgccgccccgaggcaggtgaccgacggtggcgctccactaggaacgagcgacgacgacgctcccgaggcgggtgggcaagaggtgacggcgctctcgaagcgaacggatggcgacagctaggcccggtggcaacgatggttgtcctgtccgtctctgcgatggccaccactgctccagcgtctgtggcgccgtcccctgc

SEQ ID NO: 659 - DNA, 255 bp, Zea Mays
ctcacctagaactcgtcccacacagccacctgacaagtccttcgtctttgtttcgaacttccccctccgctactgctttcccctggctcccctggctggacatagtccttcagacccagtcggcccactgcatagcagcgaacctctcgccattgagctccaccatgccagggtagtagaagcgacagaggctacccaacaccgcgttcaccttgggacgtctgcatgtaccatcccaagtcaagtcttcccatg

SEQ ID NO: 660 - DNA, 255 bp, Zea Mays
ctctgttcatctgttgactgttgtgcttgtgccattgtgcctttgagccgttgtgcggtactgccgttgtgcctgagcagctgagctagtgccacactgcctttgagccgttgaggcgttcagctatggactatttggactgaagcggtgaagcctgagctagtggctactggctagtgcggacgtgcggtgcctggctgcctgcgcctgatggctgatgcctgatgccgttcagcagttcagctgttgtgcact

SEQ ID NO: 661 - DNA, 256 bp, Zea Mays
gagtccaattatgaaagaatctgatacttctgaatattagagtgtaggcgatagaaataacaggtcagaacggaagcaaccaccgctacattcacttgccttcatcgaagaagaagaaatgtactagacatgatcttgagtgtagccacctgctagtgggcataaaacttagtacaaatatttcacaaacatttgccatcaatcaacaaaacactcctacacttgaaaccaagacccagtggaaagactcccaccc

SEQ ID NO: 662 - DNA, 256 bp, Zea Mays
ctaaaagcaactgcttgagcctaaccccacataaagctagtccatctcagccaaacgggacatttgttgagtacgttgatgtgtactcacccttgctttcacaaaacaccaggttgcctttggtgcaatctatgctcaggtaaagaagaaggtgtcgaggtggaccttcaggagttccaggacgttgacgagttcgaggattaggctagcgacctcccccagtcagctgcctgtggtgggttgtttacattggcta

SEQ ID NO: 663 - DNA, 257 bp, Zea Mays
tctcaccgccgatggagtgaacacgccgacgacattgctagtgaagtgtgcagttcaatggcggcgtgtggtgatgccccgaccgaattctcccctgtgcggtaccaaaggtcaccgagacccgtccagccctgcccgcgtgcacctctgctctagtgtccgctccggactactgcggcctctccctttcttctctctcccctacaccgtcgagcgctaatggcgatgagggtttctcttctccttctagacgcaac

SEQ ID NO: 664 - DNA, 257 bp, Zea Mays
ccaaccctagtcgccccctctttttcccctagtgtgcagccgcccccttcccctctcttctcccttgtgttggccgccgctccccctccccatctccatttccctcaagttcttgcagcccccacaacaaccctagccccccccctcttcccctcccaaggtgcagcccctttcccgcatggatccacgttgcgttggtgcaagtctccaattggattttggtggaaggaaggagggagaaaagggggagaattcaa

SEQ ID NO: 665 - DNA, 257 bp, Zea Mays
gttcgggatactaattttcagaagcccggtgttggcgatatcacggttccaaataactcctccatgatgtccaaatgttctcttaagcaatcatattcttttttttaggcaatagcaatcatattcatgtagatgaaacatcttaaaagctgctttgtatatagaaaaagaatgaaatgtcagatcatgcaaatcctagaaacaatggtttgcaccatctgttttaaattctaatccaattctatattaatttcata

SEQ ID NO: 666 - DNA, 258 bp, Zea Mays
atatcaaattcatgaatgaagatggcgagctgtgaagaaatcttgcaaatagctaaaagccatggcgaaccggtgtttgaatcatttgcgaatgcttgatgtcatgaagatattgaaaaaaacttttattacgtctgtatgtgtgtgtcagtatgactattactctaaactgaattcatatgggctaggtgtaagaaatttggacatttatactacgtggtcatgtactcatacagacttattttcctgctgtttagt

SEQ ID NO: 667 - DNA, 258 bp, Zea Mays
ttcaggttatagttttgtgttgttgatgatggtgttaagtgccggtgggctcgaccttcttataagtctaagagaagaataggtggttcaagaggagccacccaacgaggagtacgactttatctaggtggcgtctcccaatcagctttgtggcgccaagaaaataagatttagttcgttttatatttatcatttattttgtaagacttccgctatgtaataaatacatttatgatatttatgacatttatctctatg

SEQ ID NO: 668 - DNA, 258 bp, Zea Mays
gcggagcctgcgctcggagctccgcctgcaccaagctcatcccgccgtcgccgatcatcgtgagcaggcgagtatttccttctccctccctccacccgacgcccaaccgcctccttggtccctgcccactcggccaagcggcaaggtcggccagaggccatggtgagggtgaggccccgacgcagcggccagggcagagccccctgcgcgtcggacctagtgtgcctagccagcccagcccccttgccggtgagccgc

SEQ ID NO: 669 - DNA, 258 bp, Zea Mays
tttatgtgttgcatgtggcagatcctcagaatgcggaatataaatcaagaagaggttgatgatgatctattttccttggcttgtggttctgatttcagagttcgaaaatactcctcatgcatagtgaatggtgtgcggtttaagactagtgccacgacaagcatcgaaagacaataaatagtggagtaatgacacaaggtactcataacggtcaagaaattaattttttggaaccttaagagagatcattgagttaga

SEQ ID NO: 670 - DNA, 258 bp, Zea Mays
gacctcgattgttgcttactgatcaatggcacccatgcgactctcctctcccccatcaccggagactctttgaccggcaccccaaagtacaaaaccaaaatattctacaagctacccaacgcagtgagcaggcgaactagatgggggagatccttaccagtatccgtgcggtggcgagggctggtcacggtgcagtggcccggcggcgaactcccacactctctcacacaggtaatggcgaggcttaaactcctgggc

SEQ ID NO: 671 - DNA, 258 bp, Zea Mays
gctcttgagtgctagccgccgcgcgtgattgtgtccagtgagggagaaagcgccgctgccgtcgaccccctcgctacaccgtcgccgtgtccttggagtactgtcccggtgactcgccctatcgcgccgctggtgtgtgaccacttcagaaaggcgggaaccagccgttcactcctcaattgctcgccggaggagggtcatcaccctggtcccgcgcctcgccgtggacaaagggtcctggcatcacgactagctggt

SEQ ID NO: 672 - DNA, 258 bp, Zea Mays
ccaagattgtcgtcagacttggtgtgttagcctgctcgccagtggtcgtctctgcgtgggtgatggattggctccgggggtgcgggggagttatctgcgcccgcggtgtgcgttccctgcaagctgcgggtctcggtagctacagattggtggcaattcctcgccagagtcgggcttcgcctcagatccgccttgcctcgtcgtacgaccgcctcatagtctaaaatctcggtgagatttcccctacgattatcgtca

SEQ ID NO: 673 - DNA, 259 bp, Zea Mays
caccacatatctcacaaggccacaaatctcacaagtttcttcacaaaaatcacaaaagtcacatgtaccacaaaatagttcacaaaactcacatgtactcacagaaataagtccacaaacatccaatgtatgccataaacatgtctcataaccaagttcagaagaacatcagtgaggtggtcggttggactggtttgatgatgtgttgggcgaaccatgggggttgtttgatgtcgtcgattgattctgcacagagaag

SEQ ID NO: 674 - DNA, 259 bp, Zea Mays
cttgacacagtgattatttatttttaccattaactattatatgaaaacatcgtcacatgtaagtgtaatgggtccccgcagaaactgggatggggaatgcttcctcggccacgtttacccgtcgggggagaaattttcccgtttacattctcgtgggggaagaaacttccccatcaccatcccctaatagaggaattcgccacggtaaatcggggatcggcttcccattgccatctctagcaaggatgcaaccctcctt

SEQ ID NO: 675 - DNA, 261 bp, Zea Mays
ggttcaagaggagccgcatatcgaggagttcgattcgatctaggtggtgtctcccagtcgactttctggcgccaatgatagattttagatcctgttatatttatcttgtatttcgtaagacttccgctatgtaataagtactctgattattgtgatatttatctctatacactctgttattatatatgttgtcttctttggcgcatgtatgagatgcacccggctttgtcccttaaagcctggggtgttacaacccttttg

SEQ ID NO: 676 - DNA, 261 bp, Zea Mays
tgaggatggtcacttgagctagcatatatttcaaacttatacttttgtaatcacttcgataaaataatgtaaaatttttgtaacttgtaaaatttggtaataagatttccgctgcaaaaatattggtgtgtgtgatttgtgttacttaatctcgcggttctggttgtaagtggtttatccgatgtccatgggcaatcggacggatcctgttaagttatctggtgcacatgcatagctgtctgaggtctttgagacaaggac

SEQ ID NO: 677 - DNA, 262 bp, Zea Mays
ggctcgcgcccatgggaggagaagggcaggggacgccatggctgtggaggtgctcgtctgctgcagagatggagctcgtccatgcaggaaggagccgagggggagaagggaggccagccatgggagaaaaagctcctcctcttgcgcgctggggagaagggcgccatggctggggcgcgtggagcagggctcgctggtggctgctgccgccctgagcaaggaggaagaaggtgcatgggagagaaaggagaagagagtggcg

SEQ ID NO: 678 - DNA, 262 bp, Zea Mays
cagggacagtgggattctcgttaatccattcatgcgcgtcactaattagatgacgaggcattgggataccttaagagagtcatagttactcccaccggttacccgcgctgggtgaatttattcacttgacattcagagcactgggcaagaaatcacattgcgtcagcatcctcgaggaccgtcgcaatgctttgttttaattaaacagtcggattcccctagtccgtaccagttctgagtcggttgttcgacacccggggaa

SEQ ID NO: 679 - DNA, 262 bp, Zea Mays
cagggattccgttcgacgaggactatgcaaagaaaagaaagacacattaaagttgcaaatggagtgcaagcaaatgttgaagctgttggcgaccttcctctagagcttgctaatggcttcatacttgtacttagagatgttctttatgttccctctttacagaggaatttgattagtgtctcatgtttggacaataatggttttgattgtcattttggagatggcaaatgtgagatatttcataataaagaaagtgttggtc

SEQ ID NO: 680 - DNA, 262 bp, Zea Mays
tcgtttgttcatgtatggtaatcatttgttcaacatgtgcagcagcatctacatgtggggcgttggcagcattaagtgaaatcaaatcaataggtgccctagggatgtaaccataaacaatctggaaagggcacatctttgtagaagaatgcgtggcatgattgtaagcaaattcaacatgaggcaagcaatcttcccaacgtctcaaattcttgtctaaaacagccctaagcatggtagataaagttctatttactacctc

SEQ ID NO: 681 - DNA, 262 bp, Zea Mays
ttggacatcatcacacattgctaaaaataaatagcggaaatagtactttattacatcaagatgtccatgacatccacagagtcattaacttaacatagtcattaacataatcaaagtacggatacgaaacataaaatataaggctttcacaggcagctgactaggggttgccactaaacacaactagaactcatcgtagtcctgaaactcctcaaagtccttcgtgttgccttcatctcttcatgagcactgattacagtgg

SEQ ID NO: 682 - DNA, 263 bp, Zea Mays
ccaacactcacaataccaagtctggatcatcaacgaggtgggcatctggactggttcgacgaagggctggacgaagcatgagggttgttcgacgccgccgattgactctgcacagagaagagattgtatgtgtgagaacatatgaatatatatcatgcagtactaaaattttgatactcacaggagtagtgaactcagcagggtcagttgcagggaacaacagaggtggagcatgaccctgtgcggcgccaaggctctgcatg

SEQ ID NO: 683 - DNA, 263 bp, Zea Mays
atgcctagcaccatagcctgccagcgctaggccattgccgctaaattcggccaacaggtgaaggccgataggcctaatctttgccggccatgcctataaagcgaagtcgttcagctacgccagcggggaaaagaatctgtaagaatctgcaagagcacgccgccaacagagaggaggatctgcatgagcgttgtcaaccgggagatcgccatcatcgtcgccaacccagcattgtggtcacccaaatctacggtcaagaacag

SEQ ID NO: 684 - DNA, 264 bp, Zea Mays
gccgtcgccaacgaaccgcgagcagcagtgctaaatggacctcggcatggggtcgaggagggtctcctatgctcgtggatcgcgtgcaagctagtatgtgggcgcaatgttcctcggagtattcagaattgctaaccgaagcaaggccgccgccatggtgccgctgctcaacggaggcaggtagcgaccactaccacataaacccccggtatgtaaccttcatatgctttgctacagtcacagctacgtacatataattgatcg

SEQ ID NO: 685 - DNA, 264 bp, Zea Mays
cacacagtgccgctcaccgctctcgcttgctctgttgccttcggcttttataggccgtgtagcgttaggcctctgtctcgtctcgtcccgtccctccctgtgctgtttcgtttctggtcctacaaggttcagggcttcaggctggtcatgcagcaggtcaactttgtgtgtttctgccgctggtttaggcttgttgactattgaacattgtcaacggacaaccccaataacaaaaaaaaaatggacaagaggtggttcacgaac

SEQ ID NO: 686 - DNA, 265 bp, Zea Mays
gccccactcactcaggtatcgcttccaaatattaccaccgttgggtctagacttatgggcccaagcattcaggaataggtaagtgagagaaagggtgtatgacaaaataagaagttgagttgctagatattttgtcaagcatgtctcgtctaggattcagacgggtcatgggcttaaaatacacttataccatggttacctactatattcctaaaatatattgtacaacgggtaactacaatacagtgccaccctatttcctatt

SEQ ID NO: 687 - DNA, 265 bp, Zea Mays
ctccgacgaggttctccaatcacacactcgcgtggcatggatcacacagcgtgggtggaagccacggtgacgatgcaacaagggcggaacggttcatgggaatgatgataggaaggagcttggtttgccaggcttggtgcaagagaacaagtcaacacgctgagaggggaaaatctcagggtgcatgcaagggagatggccgacggagtctacaaccggatggacattatgtcaagcacaaagcgcacattgcggcgaaacaacg

SEQ ID NO: 688 - DNA, 266 bp, Zea Mays
ggggccccgaggcggcgacacttccaaggccggcgagcaagcgacgcccctcgatgtgcgagtagcgacggcaacacacgaggcgcgaggttcgagcggcgttacggaaggtgcgaggtgcgcgcagcgacgatcgcgcatgatatcctccgatccggcgcagttcgggcggcccgaatgacgacatacatctgtgcttatgtcgtcgacgacgtcctccagagactacctccttcgatttgtatgtttttcgattattgtgtttt

SEQ ID NO: 689 - DNA, 266 bp, Zea Mays
gcgagagccatcgagcctagccactggattgcggcatgcggagagggttagaatcgggtgtcgctatcactgccgacggaatcacttctccattgccgctcagcaccggtgacccgatcccgggcgttcgagtgtgggtgcggggcattctgggggaaaatctaggtgtgtgagtccttagggcgatagaaatttctcaccatcgttgaacaccaccatgaagccgcaccgtcgcgtggaccgaagaacctacaccccaacccgag

SEQ ID NO: 690 - DNA, 266 bp, Zea Mays
gcatcgtaaagaattacaaacaatttatatattacattcaaaactataaaatattacacactttgttcagcaaatattacatcaatattccaaatgtttttacaacaatagttattcttcttttaaaactgcttccgcagcttcgtttagtagttgagtcacagcttcgtccataatagcttcggccatcttagtaacttcatcttccttttttgcttcggggtcggccaatgactcgaagggctccgggggaggagacagttcag

SEQ ID NO: 691 - DNA, 266 bp, Zea Mays
gctaaggagtttgatgactccttccagtatgctcctgctgccgcccctggacctattcttggtgaccctaggccttcaggctctggtcaccctcctcctcctcctctattccagggtccttcatcttcctcagctttccttcatctgacgagcctgggattcgacatatgatgaagagttgatgcattcattcttttcgggctatcctccctatcctcctccatcgggtcactatggtggtattgaccctgggattattgagtctt

SEQ ID NO: 692 - DNA, 266 bp, Zea Mays
attcttggcatttgtgcacgcatcatgcacttggtgagggacaaataaaacaaacaaggtagaccttgaggtaggtgttaagcaaacaagaaggtacacacaaaagagtattgctttggtatgatggcatttattttactggcccaaaaaatgcaggattacagagtttgccgcttagctagtgagttgacatagatagtggaaacattttctaagacaacacaaatgctattgatgaccttaatctttttgcatccttactttag

SEQ ID NO: 693 - DNA, 267 bp, Zea Mays
tgcactatatattcctatactttttcaggatctaagggtctgtaaaaagcagtgcaatgaatgtttatacccttgcaacttggttattagtgttgatccaaagtggatactaataagtaaacttactagctaagcaaagcacacaaggatacctaacaaccaatgttcaattaagcgcagataatcgcccgcctaatcgcgattaggcaatgtctggagatgtatctatagtgtgctgtgcatgattctcctagtatgtggaagtgt

SEQ ID NO: 694 - DNA, 267 bp, Zea Mays
tcatcactagactcatcctcacttgaagaagcataagtagtattccaagcacataccttcttctccttcgccatgaggcatgtgtgacgctcgttggggaagaggaccgatttgttgaaggcggtggcggcgagtccttcgttgtcggggtcggacgacgaacaatccgagtcccactccttgccgaggtgtgcctcgcccttagccttcttgtaagctttcttcttttccctcttgttcccttgttcctggtcactatcattgtcg

SEQ ID NO: 695 - DNA, 267 bp, Zea Mays
atcgcgacgggcctcgggaaccgggaaagcgtcaaaagcggtggcacgtgcgcggtggcaggaaacggcgccgcgggttcactgcttgtgtttgagtaatcgagacgtcgtcgtcgtcgtcatcacccttcgatacggtcgcgtggtttggaaagtctcgctgctgcagatctgtgcatccgttcggccggcgttgcgcgacgggatcgtagggacggacaacgcccgatgccgacgggtccgctcggaaggagcgagcgaaattgc

SEQ ID NO: 696 - DNA, 267 bp, Zea Mays
acgaatgcggcaaggagtatcttaccagtgactacgtgatgtgggatctaaaacacggatccgcccggaccgcggtgaatcacaagctccgacgagcaatgccggcctccacacaacaccacagatccacagtgatccgcgcgctgatcccctcttccccgacgatcacccagccctgcgcctgagctctagaccatgcctaggatgcggacccgtcgtagtgccctcttcttccccttctctctctcgtcttacggcggtgctagg

SEQ ID NO: 697 - DNA, 267 bp, Zea Mays
aaccgtgccgactagacagtgattaccatttcaccgtcttcgacaaaaaccctgccgtctgggcaaaatcatcactccctttctgccacgccacgctgccgcgcagggacactccctgactgatattgcccgtgactcccacttttatttcaccccgttgcttcaccgcatcgtcactgatagcgctgccatcctcttcaatttccgtccaatggggatcgtgataatagttcagatctaatgttggtatgacatgaaacagcggta

SEQ ID NO: 698 - DNA, 267 bp, Zea Mays
ccgagatgttctaaatttttttcacatgcaacgaaaacagtactactctgcataataaagtactacgttgggtgtgcttcggcttgacttccaagttcctgcgccttgcagccagccagccagccagctatccttttgaagagtgcacagaaagccagctttcgaggtatactcaccatgtggggtgaaacagatgacgtacagctaattaagtttcagcaggtacacagtagcactgtagcagtactcctacactgtttccctgcg

SEQ ID NO: 699 - DNA, 267 bp, Zea Mays
cctgcccacgcccccacctacattagataaccgcaggtctcaatccgatagcttcctgaccgaattcacgacaaagctgaccacgaaaaccatcgcaccctgccagtcaggcggtcactctcatatctcatcatcattggccatcgcctcctcctcgcccgtctccacacctctgcgatgaggtcgtcacggcgaacgatgccgtcgtccatgcttctgtgaccgacatggtgcacaatatagaagggaaagggatattggttttcc

SEQ ID NO: 700 - DNA, 268 bp, Zea Mays
ctaacgtagcttctccaccacactatcagactcatcgcagcggagttcctcctcctcctcaatgcctaacccccgcccctgcgatgccgtcgtcgcgtggtatctaatcggtgtttcatctgcagaggcagcctaacgcggcgatgcgctagccgtggggcggctgcttctcaggcggtggcgtccgcgtaggcgggcgcgtcatcccccaggagccagagccggaggtcttctccttcgtcgagcccttccgtgttgtggtgcccag

SEQ ID NO: 701 - DNA, 268 bp, Zea Mays
tgccaagccatctcgctgccgttgatagagagggagggagcagacgagggccaagagagagatttcgccgccgctggcattccacgcctacgcagtggcgcggaagccaaggaggaggtaaggatgtgcgtcagggattgtagaacgtgtacgaagaggtttcgaggcgcaagagatggtgcttgatcgacgatgtctcgccggagtcgggaaaacaccggggagctacccttcgatgaggacaggacccctgcgtcgccaatttcag

SEQ ID NO: 702 - DNA, 268 bp, Zea Mays
ggatgctgattttcagtcacgtcggaagatcccagtttgctacattccaaatcttccaatgttgaaaactgcagctgaaacatatacaaggagaatgtattcagagtttgaggaagagtttaaaaaacaatttacattgtcttgtgaattgttggaaggtaatgggacaaactcaacattctttgttaagtatatgcaatctgagcgtggagcaacggtagtattgaacactgaagattcgactattacatgctcttgccggatgttt

SEQ ID NO: 703 - DNA, 268 bp, Zea Mays
atacctgagcttgacaggacgagcgaccatgcgtgggcaggttgaagccgctgtgtgcaggcggcggctgctgctgctgccgcgtgccaagctcggttgcatggctgcgtgacgacgcaggcgacggcggaagggcctgaaatgtgacgatggaggtagagcaggagcctggcctgagatgtgacgatggagatagagcaggagcatgtgcagtgtacgcgcgcgtactgcgttatggctctggttttggtcccttaaatggccgtcg

SEQ ID NO: 704 - DNA, 268 bp, Zea Mays
ctcgtcgctgtgggatattgacacagacactgtgcgtttctgcgttgttacagcgtgtggcgaggagaggttgcacggcccactaccccgcctccgatttttggtcttgacgattcttgtttacaaagtcaccgcagtcccgaggtaaatgcgtacatacagggaaaaaaaacaacccaaagatttcacagcctggacatggaaatctagcacctgtcgctgctacatacctttcgtctatttggaaatcggaacacgtcgcgctcgc

SEQ ID NO: 705 - DNA, 269 bp, Zea Mays
cccaggttgtccacactgtaatcagtgcttaggaggagatgttggcaacatggaggactttgaggagttttaggactacgacgagttctagttatcttagtggcaaacccccagttagctgcatgtgaaggccttatctactatgtttcgtattccgcactttgataatgttaaatgactatgttatagactctatggatgtcttagacatcttgatgtaataaagtacctttccgctatttactttgagcaatgtatgatgatgtcca

SEQ ID NO: 706 - DNA, 269 bp, Zea Mays
tttttttttgcatccaattttattttctcacttttctttctttctttactagtgtgcccatagtttttctatgtactatgaacaaattttcatattgagaaatttgattagaacaagttatattgaaaaaaatgtactagataagtagtgtgtgaatattttgaaagacgttgaacaaccataacttatgtactcaggttatgcgaaaaattcgggtcaggtaattctcgtgttaaaaattgctactcggtggtattattcaaaatttc

SEQ ID NO: 707 - DNA, 269 bp, Zea Mays
cgcgcgtctggcccctgcctcgctcccttccgcgagcacgcaggcccctcccatggtcgtttggccacggctgcagtgggcagctcgccctgcgcgggggcattgcccctcgttctggcaccagtgcggccagcctagggcgcgactccgtccaacccccttggccgacagggtctccacgaccgagcagcccatggccacgccccctcctttcccttccccttgctgctattttttccatggagagagatggtccaagaaagaagaac

SEQ ID NO: 708 - DNA, 269 bp, Zea Mays
aagaggacaagctgatgtgaattcttctagtgacgttaacctgattcaggtttacccaccgaaagggggattcacccacaagcatacaaagtttccatctggaggaccaaaataacagtttgctaaatgtctgacatgaagttcaaaccggaactagatcaacatatcccgagatcagaagactactaactaaacatcttccacacgctcatcacatgtaaattgccagaattgggccacacgctcaattgacttgggatggattttca

SEQ ID NO: 709 - DNA, 270 bp, Zea Mays
ttgtgaggcatgagaccgaacgacgcatacgacgtttcgttggaaaggcggcttttccatcgttgaagggtcagatttaaggatctatatacatatatagctaagctagctagtattaggatccaaatcgaattattgttcctggacctgacctgattaaatcattgacgatgattgttccatgcagctgcatgcattggccatgtggattcgtttgctcttgccccccacggccttcgttggcattttctcttacggtgtgcccaagaa

SEQ ID NO: 710 - DNA, 270 bp, Zea Mays
tttttttgctgacgatagctatatagagctcgcggatgaatgaaatgtggtgtacagagagaaaaccgaagcaatcaaacaaataaacataagaaaatgtccaacaacttatccctccctgtatatataattaaactccactctacaaataatacagtatacagtgaaaaaacagtctatagtagattcctggatacggtctaacaacttacaaaactttttcatgtagaacttttctatgtaaaagaactattctctgcgaggaataag

SEQ ID NO: 711 - DNA, 271 bp, Zea Mays
ttggggatccctcggccgccaccttatagcccatggccgaagctgagtgtcgccccgtgtgctcgtcatggattgcagagagagagaaaatcgagagcgctgacgcgtggctatgctgctcgcgtggccttccagttctccatgggtcacctgggggatcgccatgacatggggatcagttgcgggtgatctggggagtggatgaaggtgtgcgtcgctcggaatttgtcgccggagcattgtaccttccgccgtgctgccctgtgcctgg

SEQ ID NO: 712 - DNA, 271 bp, Zea Mays
gaggaacaaggatctcatccatacctagggtttccccaagaaattttgcaagaaaagatggggaagaacatctcttgatcctctcttcgccttcaattcaatgtgctcctcctcttctcgatccttgctgcgcggggggagatctagagagaggaggaagccgtggagaggggctgccatgggaggagaggacagccagcccaagggaaaaggagagaggggcggccaagtgtgggagggggggaaaggggtggcggccaagtaggggcaa

SEQ ID NO: 713 - DNA, 271 bp, Zea Mays
ttttttggttgcacggattggatgtctttgtccttatggtgttttgtccgttacagttggccaaattatgcatccgttgtaagccagctttatgtatgctactaatgaaatcagttaccgaatttacatgatgtgcatctatctttttgtttctgttttgaagataatctgtgcatctttcatgtgttctgtgtactaaatgctacctttcaggtttcgtatttagatataataattctatagactcgaaggatctttcttttgtttcagt

SEQ ID NO: 714 - DNA, 271 bp, Zea Mays
tccatctcgcccatacaccacgaaattgcgtgaggggggatggaattcttgcggcggcaactggcggactgcacgcgattctctgccatcgtcaggaattggagcgccaaaccgagctgggtgatcgccgtctcttgctgtaggtgttgaacgactcctcgggcaaggcggtcaaccagggtcgtggtaattcatcgccgatgtccgaattgccgtcgtggatccgcatggcgtgtgggcggcatccgttgcgcctagaactccattaagg

SEQ ID NO: 715 - DNA, 273 bp, Zea Mays
ctgatggcgtcgcggtcggagcgcggctgctcgcagaggtaaagtcgtcctagacgccgggccagggggtagacgacggacaccatggtcgccgggctcttgctcctcctgctgctgcgtggcgctgggaatgaggaggcgtggggaagttgggtgagagaggagcacttgagtggggcatggatcagaggagtagttttttgcggagaagaagaatagtggggcgattttagctgtggccgagcggctaggggcgggcgcgctcgcgcgctg

SEQ ID NO: 716 - DNA, 273 bp, Zea Mays
gacaacgtcagcgccatgtacctctccatcggagcgtgcgaagcatgtcgagatcgacctccactttgtccacgatcgtgtcgccgttggggatatgcgagttcttcatgtcctgactatttcttagtttgccgacgtcttcaccaaggacctccctacgacggtgtttgaggagtttcggtccagtgtcaacatttgtcatggctagaatttcgactgtgttagaggtactgtgtactaattagtgttatggtttgtgttgggtacattatg

SEQ ID NO: 717 - DNA, 273 bp, Zea Mays
ctcccttgtgcagccgcccccctctctagcccttggctgcccccccttctcccatcttctccttcctcaaacacttgcagccaccacctcacaaccctagcccccccatcccctcctctcctaggtgcagccctcccacttgatctatgtcgcgttggtgcaaatctccaattggaatttggtggaaggaagaaggagggaggaaagagggagaattcaaggtggtggactcccggatcaaacttaggactttgtccaaactccccggtgaag

SEQ ID NO: 718 - DNA, 273 bp, Zea Mays
ctcaagggtatgctggttaaataggaatcaaggaaaaggctttagcaaggatcaacttatatatttttgcagaaatagcttactaaagtgagtccttactttcaacattttaatgctagattaagtattaatagaccttgtttgcatctagtctaatttcaccatcacattaatcagtccaacatgatttttgctcattaagatttcatccatgacttagattgcagggcagtgaccaagtcttcatatccgagaagtaacggcgattctgaa

SEQ ID NO: 719 - DNA, 273 bp, Zea Mays
aacacggccgaccccaggcattggcttctggaggttgaagatgggcgcatgtccgagcgatcggatgtgaatggctgtggatagttgcgtggtagtggtggatggccaatcactggcgtagccatcgccctgggtgcagaacgtggtccgtatggggtcagctatggcgccgccgcgccggaccctgttcacctccgtggttgcggccagtgtgggaagatgggcgagcgccgttggtatggcctggagcggctaggattaggtgagcacctg

SEQ ID NO: 720 - DNA, 273 bp, Zea Mays
ccgagctgcacggccggcgagcgccatggcggggcggagcttggggcacgccatgggaaagcagctgaaggtagaggaaggagacggggaggagctcggctggagaggggcaagcaccagggagctcagcgcggcagggaggagggaggagcagggaggtaggcgtgagcagggagctccggggagagagatggaaggagctaggatgaccgccgtgcgggagaagaatacgcgcgcgcagggggctccatgtctctggagcgagcaagaaaa

SEQ ID NO: 721 - DNA, 274 bp, Zea Mays
agatttcagccattcctaagggaatgaggagttttgatgtggtttcgtatgtgtgtctttgggcattcatttgcacgatacattacatcatacattgcattcataaacattcatttagacatatgtaggatcaccatcatcatatcatacaggtacagacagttgcttcggctctaatgacaaggcttcgtcgagaggaaaaagaaggcgaagaactggagcgaaggttatcagtactctgtcgaagagtattggtttcccgaaggttgaggcc

SEQ ID NO: 722 - DNA, 274 bp, Zea Mays
tcagggttctgtgcttgctcaggtgacgaggtagtaacacggcgcaggcaccatggtgggcgtgacgcgaacaagcacacagcagcacccattctctctccatcacgtcgctcggcggtggtgcccttggtgagctgcctactgttacgggttgagggcggagcacgggtggtcagctatttaagcccctcggctagtctaatgaggatgaggccggaaatcttggggggttttgttacggagatcccgtttcccccgcgcgtacgttactgtg

SEQ ID NO: 723 - DNA, 274 bp, Zea Mays
tgtaccgcaagatgaggagcatgaatgaggtcgcgatgagttcgtgagaggtctagactgtcgtctcccagtcaactatggttgtaggggatcgttgtcttcatatgatgtaattatttagttattttgttcagaactcctattatatagtaaagatgtgacattcatttctgtaccatgagtcgtcatatgtgtgagacttgatcctagcacacatttgattggcgcctggatttgccccttaaatccaagattgacaaaatcgtagcgggtt

SEQ ID NO: 724 - DNA, 274 bp, Zea Mays
gcccggcacgaagcccgttttttgggcccggtccgagcccggcacggtagaataagcgggcgggcttggacaggaaactaggcacggcgggctagcccggcacgacccgtttacctctaagcccgttaagcccgtttttttttacactaaaacgtgcttaccggcccgtttagcccgctttttggcccgttttttcgtgataaacgggccggcccggcccgtttaggcccgctgcgggccgggcttggacagaaacttaagcccgctggctcag

SEQ ID NO: 725 - DNA, 275 bp, Zea Mays
ctaaaaccaagaagctactcattcctcccattcgcatctagcctcacaggcggcggcggctcccgccgagcgctgagcgtcgagcacatcggcccaggaacaccaacgctgcgtgcagcagccccgctaggatcgccaccgacgccgccgtgttgtacaggacgaaccccatcgggctgtccttgggcacaggttttaattctctctttacacatatcttggtctttaattctctcatcaccagcgtaaggattttttataccctctccacactc

SEQ ID NO: 726 - DNA, 275 bp, Zea Mays
ggcaaatcttgcggagaggggctcaccggcagaggtgtcgcgtggaggtcggaccgtggtggggagcttcacggcgcgaactcctggctctggtgagcaattcccgccgcgctatggcctcggaggcaccaatcctgcccccgcttggatccacacacccggccaaaagtgccagagcacccgccagaggacgtacggtggaggaaattccccccggcgtgcaccccgcaacttccccctctcttccaatggcgagcgcggagtggagcattcag

SEQ ID NO: 727 - DNA, 276 bp, Zea Mays
ttcacgaatctcttgagcgtcatcatcggagtcagactcaactactgacggattcctacgacgcaccatccttaagataaaaaagagaacatatggtgagcgaggaaatcgatgttcaaggattttatcgaacacgtttgagtaaagacaagtatgatattgagtatgcactttaaccattcaagtgagcggtttaactacaacgaacaataccaaactacttaactcaagcaatgttcgagacaaatgaaaatagtttaagtgtgccaagcacct

SEQ ID NO: 728 - DNA, 277 bp, Zea Mays
cctactgcgaagtacttcatgaagacgttgtttagtactgaataaattaaaatgttgttaaggagacactgacacattggtaaatcaggcgctaaatcagtgccgcttagcaccggggaagtggcgagggagcttcatggcagctcagtgaagctggtcgtgcgtttggccagggcgatgggttggtttggcttggccatgagcaccgaggggtggtggcaatggcggacgatgacgcgtgctttttggcgagggtgaatggcagcgtgggtgtggg

SEQ ID NO: 729 - DNA, 278 bp, Zea Mays
cggccctcgaccacagtaaaggatcaggcgcaggcaggaaaatagagagagagcgaagagaggagaagatttggccgccgcggttgcaaccctgcgcatgcgccgctcgggcttcagtcgcatggtctgggcgacccgctggggtacatagatgacgtctgtggcacttgagcgaggagaagactctcggtggaggccgaattgctcaccggttcgtggacatcaccgtcgggccgcatctcaccatgggggcaggttctccattgctccaccgtcgg

SEQ ID NO: 730 - DNA, 278 bp, Zea Mays
caagggtatgctggataaataggaatcaaggagaggctttagcaaaaatcaacttagataattttgcagaaatagcttactaaagtgagtccttattttcaacattttaacgtcgaattaagtattaatagactctgtttgcccctagtctaatttcatcatctcaacaatacaacatcatttttatccataatgttcacatcctgacttaggttgtagggaagtgaccaagtcttcataaccacgaaggtatggcgatccgaatcgattatactcag

SEQ ID NO: 731 - DNA, 279 bp, Zea Mays
gcgtcgacgtctcgccgtgcctgctgtggcgcatgcatgctttcgtcggcccgggcgggcggcattgaaatccaccgtactgtacgtgcgtggctgcgattccctgctgctgcaactgtgtgcgatgcgaggctgctgcatgcatggtagtagtagctagtaggtagcctgcttgtagcctccagctgctgcctggacacagagtctgtctagggtactgtgtccagtggcgtacgttgtagccatgcagtgcaggtaaggtagagtggtgcaggacgg

SEQ ID NO: 732 - DNA, 279 bp, Zea Mays
actggaatctgttttcttaaacgaagtaactaactgatacttgaaagtttattggtttcgtctgttagtttgtctaattctataagttttcggttgctgaatttctatttctatatatatgttagactggatatatgagtgttgatagtcgcctagagggggggtgaatagggcgaaactgaaatttacaaatataaacacaactacaagccggggttagcgttagtaacaataaatgagtccgcaagagagggcgcaaaacaaatcccaagcgaataa

SEQ ID NO: 733 - DNA, 279 bp, Zea Mays
catcccatggatgccctccacctcacggttttcacgtccgcggccgccgtcgggtggtggtcgcgacgagccagatctcctgcctggcagcttccctcccatggatcgccgtcgccccatggtgttcgtgcccgcgtttgtcgcctatggcctctggcatcgatccgcacctacgaccaggagcgaacaacaccttcctcctttccagcagtgagaccatcatcgctgatgtgggacttggtagagtccgccgcccccacccttctttgtcaggtgcgg

SEQ ID NO: 734 - DNA, 279 bp, Zea Mays
ttgcaacccctgctcaggagaagatgaaggcataacagaggatttccaggagtttcaagactatgatgagttctaggtgtgggttagtggcaaacccccagtcagttgcctgtgaaggtcgtatcttactaagttttgtattcgcactttggtctatgtataagactatgtggatgtctagaacatcatgatgtaatcaaattaatatctttttacgttattatttgagcattgtgtgatgatgtccagttatgtaaacgttgtgtacgtgaatttctg

SEQ ID NO: 735 - DNA, 279 bp, Zea Mays
cttgatgatgttgaagaaggctgctagatgctgaatagcttacctataaggttggtttggaacagaggattttccagccaggtccatccttatcaaacgacagccttttttccccctctagatgactattatgtcagctgtaaatgttcatattttttttccagagttcccaggttagcccccagtctatagcattgcaataggaccaaacgttcatacttccacagtacgctgtatccacgtctttgtaaattatcttcaatgcatggttgctctagt

SEQ ID NO: 736 - DNA, 280 bp, Zea Mays
tttttttttttgaaaggaagcagcaaaagactcgcctcttcgatgtattaaaagagaaatgaataaaaatctccataagaccgagcaaaaagaaaacaaaaggaaaaacaaaaaaaccactcgctgatctatctaacacacactaaaactaccaatttgatctttcaccaattgcataacttggaccgcagatctttaaaatccctgaaagattctgttatttctttccaaccatatattccacccgaaacaaatgaggagtccatcgaaaatcttattt

SEQ ID NO: 737 - DNA, 280 bp, Zea Mays
acgatgcatactgggtcgacacgctacgcgaatacacatttcattctctgaagttagcgagccaacttttttaccaattacttatatccaaaaatttggatccgggcgagacacgacatcccgaaaaagactgattttgtcttcgataatctgctctgcgtgattcgaccgaaattagccgaaaccatatctgcgaatgtatacgcgatttcatcgatgaaacaacgtgctgaagaataaattaggtcattatggccctggcttagcccgaccacgacga

SEQ ID NO: 738 - DNA, 280 bp, Zea Mays
gcttaacttccgtgctaccacaatggtggaatgggactcccttggctgactaattaggaaagctagtggaggactaccttacctggcaagggcgatagaggagctgcgtatagggaggttctcgggtcgatcatgctgtgatggcttttcggatgagggattcctatattcaaggtttaaaataccttgtgaatttgatgaaacaacaatttatgacatttaaagaggcacaatgcttgtcgggctcattgaagcaacttctttaataatttgggatgag

SEQ ID NO: 739 - DNA, 280 bp, Zea Mays
ttcaggtggacgatgagttggacgacgtgatggcgtcgtcgtcgaatgcgatgcccagaacaacccgagagtcgccgacgttggcgacgaccatgaggtccccctgcttgacgatggacagcgcgaagcaaccgctctgcaccgcgtccaagcggcggctgcgctggagcttgtcgtacatagtgcacatgcgaccacgtaggactgttttctagaggtcgaactggcagtcgccaagtttcttctcgtcgtcgatgagcgaccccaacgcgagtgcctc

SEQ ID NO: 740 - DNA, 281 bp, Zea Mays
cgccattcaacatggacagccctatagacaccgtccctatctttggtaagtccttagacatccctgcaatgttcgcaggaccatgtagcactgattggattggagggtaatggacggtggcgccagcttgaccaactctagccgcgttccaccatggagtctgttgagcaccattttgagtgcgtggacggtccggccctgggccgaacggttcgtggtccggacagtccgcgcctatgggccggacggtccgtgcaggcgcagaacagattagggttccg

SEQ ID NO: 741 - DNA, 281 bp, Zea Mays
ggccggggagggaaagaccgtcctctcggtattatattaagaagagaccgaaacaatggtcccgccgagaaaatccccgaactctggtcccccatcactaatgggtcggcgtcaactgtccactctgcaacggcccaaccgaagggtggcgcacaggacatcgtagcccgagagcggacggggcacagcgaggggatttttttaaccaagcctgaaaattcactcccgaggagaatcgaacctaggacttagaggtgctactcggaaatccttaaccatta

SEQ ID NO: 742 - DNA, 281 bp, Zea Mays
aaacaattggattgcagcacaaatactaaaaagaatgatcttaaaatcaccttgggttcctcctttcctccttccattcttccttcttcctccctccaaactccaatggaagactcgcacccacacgacggggtaccaagcggggaggatgcaccatggagaggaggaggggggggcggctagggttgaggggtggtgctgcaatcacttgggggagaaagagagggagagagagggggggtggcggccacaaaggggaatagggaagggggggcggctgc

SEQ ID NO: 743 - DNA, 281 bp, Zea Mays
cgggctacgacgagcggacgcgcaacctcacgactcacgagagtcacgaggcgtgcgacggcacgtgtcgtggtgggcctgtcctcgtccggaaaccggcggaatctctttgggatgccactgcgccacttcatgaccacgcaggtgaggcaggctgagcgccggtgcggtacggcctttttgcagtggacgtacgacgagaatctgtactagtcacgagcggtcgctgtgcctgcccctactgcacggaacattgcagtttcgacagaggcccattccct

SEQ ID NO: 744 - DNA, 282 bp, Zea Mays
agaaattacaaaccctaacactagggaagcccaagacccactagataataagtttggggtggtaagctagactaccaccaattgatgcttatttgactggattgaattgatttcccttattggtgtcagtttagagatgaagtccatgttgaactctcgttaaatgatactctagcctcatttttatagttcaagggagtggctaatcttatatgtatgcactacttgtgggctctaactatcatgggccagttgcccctatcctatgatagctttgtacaa

SEQ ID NO: 745 - DNA, 282 bp, Zea Mays
caggaactaaaatcagacacggataagtgatacacaaagcgtagaccacgacgaatctataagactgatactcacaaagttttgcagcgtggaaccccttctgcccgcgagaagtcatggctatgtggttgtgctcgtcttcggcgagaaatctctggcttcacgattgactctgtgctccaggaagctacgcacaaccccctatggtcccggtgatcatcgctccacccctcgatcactaggctgctctcctgctcaacaccggcagcgacgcgatgcttc

SEQ ID NO: 746 - DNA, 282 bp, Zea Mays
aaagaacacagggactcttttagaaaattcccatagcgaaggggtacgagtgaagatcgaccgtgcgatcagaggtgtatggtgcggattaaattcgtccacaaccgaattggtatgcaacatggagccttggattcggatccaacggcccacaatcgatccgagggttggagcacgacatccgatcccacccgtctgtcccgagatcgacggttacgaacacatcaaccgaatcgttatcttatgaatccatcacgaccgtcaatatctagatctattgtc

SEQ ID NO: 747 - DNA, 282 bp, Zea Mays
gcacggtggttttgaggctcaaccaccaaaccgtcgtgaatatcgcaccacgtgctcattctccacaactaggctcgtgtcccgctagtcctcgatcacgccgacaactcgatccactccaccatgtcctcgcgtgagtgtgtgtcctaggtgtcagccaccatggctggtcacctagttgctccggttcattagccaagacccagcactcgtccttcaccgctcccgatccattagcatgagcccgtatgaccttcacctcaaccgtcgaccatcgtctct

SEQ ID NO: 748 - DNA, 282 bp, Zea Mays
ctactgtaaaaaaatagtttgtacgtgtaatgcttgtagagaagaagaaaaaataaaggcagaaaattaacctaaaaggatcgagcgaattagatgctaagctttacttattaaccatatatatgtatcaatgtccaaataagatgcggcgtgaagaaagaagccatatatacaataaaacactggttcatttgcggctttctaagatatgtgtgtgacgacgacagattagaacaagatacccgcgatgctacttacagataaacaatatataccattgta

SEQ ID NO: 749 - DNA, 283 bp, Zea Mays
ttaatttggtgcccaaaacagccggccacggccgaccacaaatccgccgcgtgaattactccggcgacgaattaactgtattctgaagaccgacactcatggcggctagactactgaagacccgcgtgcttccgcgaaccccaattgtgacttccccgaaccaggacggcggcgttccgaggaaatgacgcggcagctaccctctttctctctctctctctctctcttcgctgtctctctactgatgcggatagcagtgacctaggggtctcatgggtctagg

SEQ ID NO: 750 - DNA, 283 bp, Zea Mays
gtttttttttctttggttctccacaacgatcctcatgggcaccacagctgcaagcgcagcccaagcatatgcataaagatagcaaaaccacagcctactctgcaatgtgttcagaagaagcataccagcgacagcgacaaacaaatatttgatcactaaaaaatatacctgcggtctccatgcgcctggtgatcatcgagttcagcacgcctctttcaccatgcctggcgatgatgataagcgcagcaaggaatggagcaaatacatcatctgattctgaaaa

SEQ ID NO: 751 - DNA, 283 bp, Zea Mays
atagattgtaacctcgctgacagagagtacgtcctcattccggagcaaggagttgctcaggaaggagtccaggagccagcaccagagcctgctatcgaggatctctctgccccagcttttgaaggcaagccccggttttatgcataaccgttatatatgctattttactgcacttaatgattgtaggcttgtactgtgcacttaagtgtaggagttgttcgataccctagttgcatgaactcaggattcctttgagatgtggatactagtatgctaggtcgag

SEQ ID NO: 752 - DNA, 284 bp, Zea Mays
ggggggtagatgagttagccacggtgccccaatgttcggcggtggaagatttctccgatgagaaattgccccatgcttggccggcttcccaagcccagtaactccccgcatgcacttcacacccgacgatgaagtcacggggtccaaacacccagtggagagtcgacgcggacggaggtcaccagcagtgggtgatcgatcctgcggcggcggcagatctccctccacccttctgctttctctccacggcacaacgttctcaatggtgtagatgagggatgttg

SEQ ID NO: 753 - DNA, 284 bp, Zea Mays
tttttgttttgttttgtatcatctactattcgagaacacatgggggccgaatggccaatgcgagctgtcagtccgtattgcccttggcaccaacatcaggagaatgactcaaaaaccatactaccacacagctagcaggtagcttttgactcgcttaaacaattgcgccatgcataataactgcatggacttgcaataatcgtctcactactcgccacgcctgctttggatttgccagccagccggtacaaaaaatgctcggatcttgtcgccgaaacatagtc

SEQ ID NO: 754 - DNA, 285 bp, Zea Mays
gcaatcaagaggcgctgcctgccgcagaccaagggagagggaggagggactgcacgtactggagagatgaagctgagctctgcattgcatggggaaggagcagcgagattgctgctgccatggcactgcagacgaccactgcactcgacggcaccaagagggagacgacgacgagagagaaaaacaagggaggaaagcgaggcgaggatgatgggtcacctcagcggagagccgccgtgaacagtgcagcctctgaccgtctttcccccctcctcgcgcggccgc

SEQ ID NO: 755 - DNA, 285 bp, Zea Mays
ccgggagtcatgcaaatagataggcgaggacctcctcgtcgcgaagagccatctagatggccgagcatcttagtgctgcacaggaagggcatgagttgggcacgccaaagtggatatttggtggtggtaaggcgtattatgagttgtgaccgcttgatgaagggagatagcggccatggttgtggagcaagacagatgtgccatagaggaggaaatggtggaaggggaggaggaggagatttcagcggcggcgatggacacgaagaacctttgagtctggtacca

SEQ ID NO: 756 - DNA, 286 bp, Zea Mays
ctgctcatcccggtcccggccccgggcatgaccgtctgctaccaccatttcggcgggccgcctgtacgagaggatatgcgcagaggaggaataactgcatccacgcacggccatcactccatcggctccaccaccacccttgccggccggccatgcatgattctccatccatctccacatacttcagcttcattcaattcacacatgcatgcatgcatggtggattggtggcctggttagcactagcagcctccatggtccatgctaggactgggcatttttaacc

SEQ ID NO: 757 - DNA, 287 bp, Zea Mays
cacgaccacacacggtccgccgccaacccacgaagtccggcgagaaatctaccgagctttggtcgccaaacccgcacggaagagcgccaaccacacacgacgcaacaatgcgaacacccgaggccgattgatgggttctgagcgccggtctggagtaatgcgtggcacgtggtgcttgtgtaattcgcggatgagataatgatatgcggaggcagggaagggtgcgaggcgatttatatgcgcccggatcaagaaatctgcgcaagccgtggatctgtaccggattg

SEQ ID NO: 758 - DNA, 287 bp, Zea Mays
ccaatatctacaaaactgaacacaccctatcatctgcaccaacaagcagcctagcagcagtcctcacccatcagcaattcagcatgcatctggaagactacgtgtgtctacgtctgctactgctgccgaggtgtctactctcttgggatcaggggaaatgattgaaagaatggaaggatctatgaattgtcaatgtcctcagaagaatggataactcatgtgtttcagtgtggacctcatccttttcggttccaccagctacctgaatttgaccaactaaaggagag

SEQ ID NO: 759 - DNA, 288 bp, Zea Mays
caccaacagagattcaaagccctgccgtcgaccttctccacgtcgcggccgacgagcgaatctgcagcagagaacttccgcgcgtactccccggccgagatccacatcaccgccgccgcagccgacgagcgaatctgcagcactgcagcagagcgcctccgcgcgtactccccgaccgagatccacactgccgccgtcgtcgagcgagtctgcgccaccgcaacaaagcgcctatctctggtggtcgtcctctccagcggagctcctctacgtagctgagcttctctg

SEQ ID NO: 760 - DNA, 288 bp, Zea Mays
gaaatggaatggtcaggtgatatagcaattttacctaaacctttgaccaaaccttgatttccatcctcgaatgtgatagttcgttggggatcttcgtttttcttataggaggagaacatcttcttctcccctgtcatgtggtttgtgcacccgctatcgatgatccaacttgagcccccggatgcataaacctacaaaacaactttagttcttcactttaggtacccaaatggttttgggtcctttggcattagaaacaagaactttgggtacccaaacacaagtctt

SEQ ID NO: 761 - DNA, 288 bp, Zea Mays
tttttttctttttttgaatcaatggaggcagacagatagagtaatcaaatcaatggttgtccatctactactactatagttactgttgatctgtattaggacccaagtccaacatatagcagtaaggtcattaaaaatgcaacaaaaataagtattcagggtagcctgttaaattagaaacaacctggctggatatgacattacctctcgtttgatcaagctaatccaaagtccaacatatacctagtgaatgtagcacaacaattcccccatggagtgcctttgttg

SEQ ID NO: 762 - DNA, 288 bp, Zea Mays
gccagaaagggcaaaccgcacccgccggcgtccctgccttccagcgatccaggtccggcgtcccgcgtccctgccgtccagcgatccacgccaccccacccgccggccgccagaaaggccaaaccgcagaaaccgagcgccctgcgtccggcgtcccgcgtccctgccgtccagagatccaggtccggctgccgtggtgccggtcagccggtcagccggtgccgcctgcgccccgcctgcgccctacctgcgaccctgcgtgactccatctccgccgctgcgatccgg

SEQ ID NO: 763 - DNA, 288 bp, Zea Mays
ctagtattcatctcaatagggtttctgagatcatgcaactagggtttcaaacaactcctacacttaagtgcacattcaatcctacaatcattaagtgtagtaaaatagtataaataacaggttatgcataaaccggggcttgccttaatttaacacttagtgtttgctgggggaggtactcgcttggcgagcatccactggtcaagtccatcattcttcaggtcgtccaccaactgcatcttgtggttggcaccacatcacttgcacgatcgtcatctctcgatccta

SEQ ID NO: 764 - DNA, 289 bp, Zea Mays
caatccaatccagcggagtctgtttagtgagagggaagcggggcataccaggtggagcggaaatgagcggcggcgagatgccaagatccagcaggctgcccactttctccctccatcttgtttctcaacccatcccgtgctctctcttcctcaccttatcgcatttgcctgtggacattgtactctgctgctgggtgcggggactgcgggcgtagcgtagtgcagagaagacagggaaaggctgcttcaacacaggaggaagcggtaccccacccccaaacactgccga

SEQ ID NO: 765 - DNA, 289 bp, Zea Mays
aatttaggttccatatattaatcatgtcagggtccgagccgctcataaccgtgagcacagctagtataccagttttacactctgcaaaggttgcgcatctttacccacaagtcatgttacccatctgccaaggggtcatgaatcacatacacctctaccaaggaagcgaggcagggtaacactatgaggcctttacaaagttccactagcttcaggaaaacccgctatagtttataggaagctccagtgcaggaatccctctcctgaccaccatcgcagcaaaatcaac

SEQ ID NO: 766 - DNA, 290 bp, Zea Mays
tcaccctgggcccttccactgactttgtgcccgcatgcctactagcctgacagtacttgttggtggccttttctgttcggagttcctcaaaacattaatttgacaatagtctctagatctgtttcagatataacaggacaaattagtgagggatatttttatctggaggaatgtgcggccgacaatcatgcaagcacaaagacaaaacatcaagcttcatccgtgcaatatgaacatatcaacaaaggaaggagatgaaatatttaaggcttgctcaacacaactatgat

SEQ ID NO: 767 - DNA, 290 bp, Zea Mays
aacaagacgacgaagacaggaaaaacgaaatcattatcaagggcttagaggataaggtcaaagaactcgagaactctttgaaggagaaagacaaaatgctatgttcagccaaagggtcccttgccgaagcgcaaactcagaacaagaagttaggcaaagacctgtcaagcgcttaagcacttttggaggaaaactttaatcagttcaaacaggaaaatgaagctctgaaggcaagacttaaggttgaatcttagaaaaatacgaagcttggtgaggcgctgaaggctctg

SEQ ID NO: 768 - DNA, 290 bp, Zea Mays
gtcgcgccttgcaccccacgaccgcgtttatcctttgccagccggtcccgaccacccaaccgagcaccattaccgtggagtgaccgtcggtagggtagccgccaaatgtccgccctactgccaactcgccggggcgttgcagtgcactactggggtcgcaccacatgtcgctagggcatcgccgggcaggaagggcccgtaggcgagatgggattgctcgccggactcagactggaccagggagccgcgccatcgcatcgtcggacccgccctcgcgacgaaaagctggt

SEQ ID NO: 769 - DNA, 290 bp, Zea Mays
ctcacgattggcttgatgatgaacttgcccacggagcggggcggctttacggcgggaggtaagggacggcgagcaattcccctcacaccgcgggtccacgcacccgattccccccgacacacgatccacacccccgtcgggctgtccgggagcgcaccacgggtgttaaaacggggacggcggcggcagacggctatggcggcctccggcggcgttcccaaatccaaaggcgagctcatgggtcgtaactactagggcgaaggacaggtggatgaaaccggaggttggcg

SEQ ID NO: 770 - DNA, 290 bp, Zea Mays
ctggactccctcccctccccaacaaactagcaccgaccccaagacaaccatcgccaactccattgccgccgcagtaacaagaacacggtctgtcgtcggtgaatctcttccccatgggttccctgtcctcggtgttggtcaaggggaatcttcttcgcctgggggagctgctggtgccctcaattcaagttgaactccaccgacactcaagcaattgctcgccagacttcccatacgccgcagagccgcactgcgccgaggaccggcttcgactcgcgtcctgagctggt

SEQ ID NO: 771 - DNA, 291 bp, Zea Mays
ctagcctgacgcagttgcctcctattcatcttcttgaaaactgcttcctccagatcgagcgtgcccacgatgctctagaaccagaaaagcccacgcagcacattgccttcgccgtcccgctcgtgtcgacgactgcactgcaccggaacctcctaggtcgccgacgagtctctggcatcccttttcttctccggtgattctctctggtatgtttctttcgtatttactattaagttttgcagtcgtcttctcccttggatctcctctccccttctctctccatgcgcgcgt

SEQ ID NO: 772 - DNA, 291 bp, Zea Mays
cggaatgctactgaactacacttctgacatctatataaaattttggcagcatcccctttgcaaaattacataaatgagggggggacaacagtgtataaacatatatcatgacaaaaacataccaagtattattaatcggctagcaaagggaagttaaacatacgacatgaactgaattaaccagtgcgcacgactagcaaaaaaaataaacttcttttgacaacaagtttctaattaaatcatggctacgcctgggcagcgctattatgagagtgaaagtggacgtgctgc

SEQ ID NO: 773 - DNA, 291 bp, Zea Mays
ggcctaaggccaactgttgacttgtttggggcatgatgcgaatcggtgatcaacctaggcgtgtgattagttgtgtttctttaacactgttatctagcaaactcgaaagcactgcaacaataacacaaccccatgatacatgataacacagattcattatgcataaatcataatagcattaaactcccatgtaaacaatttcctgtgatgaatctgcgactggctctaaagctgtcagtgctccctcctgccctatttgatgatagcagacatatttgaagcaagctgcga

SEQ ID NO: 774 - DNA, 291 bp, Zea Mays
aaaacacctatgtgcagaccgtccggtcccttgcggcagaccgtccacgacaccagggtgagcctcggacaggaacactgcaaaaacacaagttaacactacaggccgtccaaaggagaagcaagcaccgtccgagaccaagagcggatcgtccagcctcaggcgcggatcgtccggtcattgaaaacccagaaaaccccaaaggtggcgggttcggtaaaatgcatttttagcgttctcacgtaccgtccggggtgcacggccggaccgtccgcaactactttatctgac

SEQ ID NO: 775 - DNA, 291 bp, Zea Mays
gtgacacatagccaactggaagcagtgacaggcacaaagatagatattaactaaggatgctcttccgtcagcaacaaccttaatcacattctcaaaacctccatgtccacaacttgaacgtaatcaagcaccacttagttgaaggagcagggaagtggggcctcctactggtcagcttcaaagtcaactgacggtgagtggcctgggaaatggccaaacttccggagaggaaaattatgccaaccactgcccgtgatccacctcattgaacattctacatgcaagatcgac

SEQ ID NO: 776 - DNA, 291 bp, Zea Mays
ccaaggaggaggaggccgccgccgcagcagcaccataaaaaaaacctgaacccgccacctaaacctctctttctgctttgatcttggtcctgaatccgcagcagctcctttctttcaacttgcagagctgctgtgctcaacgagggtgtgtccgtacgtgcgcgcgctgcaaataatatgaggtgcgcaggcgttttcctggcgcttctgctctccctgtccgccgcgctatcgtctgcctccgctgccgaagcacgcaaggttagttggatgggaatccttgcagctgcc

SEQ ID NO: 777 - DNA, 292 bp, Zea Mays
tggagcgcatgcagattcgacaagaggcgactatcacctctccacatcaagcactgcgcatgaggatcggtcttctccacgtgaccatgttgagcactgcgccggacattgccagctcgcccagcaggtctaattttatattgctcgctgtatgccttaatgcatgtgttagatttgatttgctggacaaattttgtatggttgtatgtttttatcatacttaaatttggtggacaattttgctggacaaatatttgaatttggcggatttaaaaatattgtatgtgtagtg

SEQ ID NO: 778 - DNA, 292 bp, Zea Mays
taccaccggcgagtggatccccacgggagggtgcgccgccgtcggtcggggtgccgacatgggctcttctgtgttcggcttgagtgaaaggctaacggtcactacaactgtccatgtgtgcctttgcaccttggttcttcttctacaactcgatcccatcctctgtgaatgaatgcttgtaagaaatgtgacttgatgtaatttgcggggataaagttgagtgtttatgtgatttgttgggtgcaacgttgtctttctgttcggctgttcttttgttctttcactgattttg

SEQ ID NO: 779 - DNA, 293 bp, Zea Mays
cataacaacgtaaccacagcctgaccaacatttgggcatttggcatatttttttttgacacgctatataatcatttttgaattacttggtaatacttttagcaacttggtttcaccatcaggcaaattttacactatccaagttcagcaatataattgtcgaccatgcacttgcaaaaatagaactcgacatattgtcgaaaactgaaggttggtagtcagatttgactagcagaagaactcgacatattggcagttaggtatatagataggatgtacagcggcaaaaaaaaa

SEQ ID NO: 780 - DNA, 293 bp, Zea Mays
acagatcaagatgtaacgacgattgcagaaatgatagaagaacactgcagcaagttcttcttaggaataagatgaaatgatgtggggtcaaagagaggatgacggaaacttgaagtacttggagataagataaatcaattcattgacataatagaaagcttaatttcgtcgcctcaagcaagtgattcaaatgatagacatgacaattgggcttttgaagaggtacttgtggaactgtcatgtatccttagttctataatcatttttctatgtcaattgagttagtgtttttt

SEQ ID NO: 781 - DNA, 293 bp, Zea Mays
gcacgaattaaataaccgaaaggtacttaattacatcaagatgtccaagacatccatagagtctattacataaccattgtctttagcataactatcaaagtgcggagaaatgtaacgtagatgataagcctacacaggcagctgattaggggtttgccactaagtaaactagaactcgtcgtaatcctagaactcctcgaagtcctccatgttgccaacatcacctcctgagcactgagtacactagggacaacctggggtgggggtggtgtgtaaagcaagggtgagtacac

SEQ ID NO: 782 - DNA, 294 bp, Zea Mays
gaggtggaacgtgttgaagaatcccagtcacaacagacttggccgcgatgcttaatcgacgacgaggctggccatcgacacagtgaagttccccacgagacgcgaactctgacgaactttccttcgaactccaagcactaccttcgctctattagcccatggttcgcttcggcgtgcactgcagcccttcctaggagaattccagggccgggtggtggcgtgtcgtagtaccacccgtggtgacgagcttgctccggtgaagcccacacgacgatcgaatttctggtggctatc

SEQ ID NO: 783 - DNA, 294 bp, Zea Mays
tgtgcttaacaagaatcaagagaataagtgggtagaagggggtcggttcaggcaaactttgaagatccagtgcacagaaatatctgagacaaggatctgggcactgttgaatcagatgagctcggatgaatcggtgggggatttgattgcggagaggtaactttggacgtggtaccatcccgcgaactcagtcgtgcgtggccggagatatcccaccggcggtcgccgtgactcggtcacttccgccgcggtgtcacccatgcctcgatttccccttactgtgcctcttctata

SEQ ID NO: 784 - DNA, 295 bp, Zea Mays
cagagcaccaattccagtccactgaatgttactgcctcgatataagaatgacatggagagggcctcaaaattccacaaaattgttccgagagtgcgaagccaatggacacctaatacaatgtcaaatccatccagtggtagggtatagaaggatatcgagaaatcagcttctccaataaccagaggcagttgagtgcacacacccgcagtagttacccgatctccgttggccaccttcaccgtcagacctggacgaggttcaacttgaagctgcagctgactgaccacagaatca

SEQ ID NO: 785 - DNA, 295 bp, Zea Mays
ttttaatggaccgcgccggaatacaaggaaaatgtttcacgtacgatccacctgaagtaacaccaatttcaaacatatggctgttgttgtctcttgttctgaactgtaaattatgagtcattacatgattttagtcgtatcaaagtctatcactggagtagtgtatcagcgctccaaatttatcaagacatcaacccctccccgcttcggcacccgttccaagacgggtctggtgcagccggcaacgttccaatttcgagagaaaaaatgctgcagccgcccgactacaaaccag

SEQ ID NO: 786 - DNA, 296 bp, Zea Mays
aatgttcttatgtggataaacattttgatattattttacttgctgagatgtgtcatctcactcttgcattactcaatgtaggtacttgatacatgttgggaatgaggggagtagcagcatgtccatgttcactctcacaataacgctacccaggcgcagccatgatttaattagaaacttattgtcaaaggaagtttgtttttttatagtcgtgcgcactggttaattcagttcaggtcgtatatttatcttcccttgctagtcgattaataatacttattatgtttttgtcatga

SEQ ID NO: 787 - DNA, 296 bp, Zea Mays
gttggacattgagatacaggcagaccttgggagagtgtgaagccgggagagtgtcaaaccatcacgtccgtcgccgtggttctcgggggttcgcccgcgtgcgtgggtcatgcacgtaggatttgccggaacacgtgaggctgtggtcacgaggtaatttctcgtcggagactcggagtgtatacaacgtcaccaatctgcctagcgacatgagccgactccgcctcaacgtcacagtcggtaaggttccctcctccatggttacgttctgcttcgttacacgtagcgcgttccgg

SEQ ID NO: 788 - DNA, 297 bp, Zea Mays
gagcatgcagcgtatgttccgataaatatgttgcagtagaaatgtttcagactttcaggtcacttgagaacaacgaaaaaagatggacatcagaatataaatatcgtgcataaagtagcgacattttaactacgagaaaaacactacaaataaacaaaatcccgggggcaaatgcttgttacaacttgctgccggccggtcgagtccaaagccctgatccttggagcgagcggttgcagaatctattccattttctgggccaagttgggcacgtaggtactgttgttggtgcctgca

SEQ ID NO: 789 - DNA, 297 bp, Zea Mays
gtgagttaaatttcaagttttacaggatcacctattcgacccccccccctctaggtgctctcagactcacggttggagtaaaacgaattggtgggttttaaataatttaaaccatgtcctattttgatttttaggacttaattgaaggagtctcttggagatggtagttagcggcggtctgcgttgcagcaatgggtcgaacaaacaacacgcgccaataaccatcacacgatatcttgctggtgccggcgtgttactggccctggaggtcataccatcctcgtcatgtttgtgtgt

SEQ ID NO: 790 - DNA, 297 bp, Zea Mays
cttctacatatctggtcagggaaaaaacctgcttcatcaaggccatgggcaacgagaatcacacaccttctaacaggtcctctgaaataatacaacagtcagcatcaactgctatgtttactcctaaaaatatttgcaatgttgtagtatccaagaatgccacacttgcacaccaaaatcgaaagcgggcacttgaacaaaaacgtttgctaaccagaggtaactgagccaaaaaaaaatttgaaaccaagttcatagtattttaacgtcatagtctttgatttaattaattgctgc

SEQ ID NO: 791 - DNA, 298 bp, Zea Mays
gccgtggagcgccaccacaacgtcaaaagagagtcgagcaccgccgcgggagtgctccatctacgtcattgttctggtcgagaaaaagggcatagaagcttcgttattgcatgtggaagctaggtggggcatcgtcaagcgaaggctcggtcgactttggccggaattgctcatcgacgttcctaacccaccgccgaccgctccccatcgtggccggtattctcggctactccaagcgcttggtaagaccctcgaatggtttcacctcttcctcatctccaaatagcactgtttaggc

SEQ ID NO: 792 - DNA, 298 bp, Zea Mays
tcccactatggagacttcggatcgacaccgtacagggctgcgcggctcaacctcacctcggcgctgccgatgcgtcgagtaggggctgcgccagccgtgggtcaagcgaagaagctccaggacgcgacacgggatgcacggagccgccaacagagcagctcgcgcggcgcgggcacgcgcgaatgaccaaggtgcctttttcttagtcgtcaactaaatcgcaaatccaataagaaaattacataccatgtttcttgattcagtaaatggatgacattttttcaatattttagtgcac

SEQ ID NO: 793 - DNA, 299 bp, Zea Mays
acccaaagcatcagagctttattttaacgcacaagttagcatttgacaccgcctgtctgccatttcatcagcacaccagacaacgagacggagacaatcagacatataggcagagcatatgcgtgcgcatgaatgtatttatggccccatgccaccaacattcatggcatcacatcagacctaagccgttcaacgggcatcgaacgtagacagatcgtcgaacagtgctgactgctgagtgctgaccatccctccaaactgataatcgtcgacgatcatttgccaaaccatgtcgcgaa

SEQ ID NO: 794 - DNA, 299 bp, Zea Mays
agaccggcgaaaagcccactacaagccacgggagcactccatcgaaagagtcccgcattaagaggaaggagaagaagaaggactcctccaaagggaaggagaaaagatcttcttcacaccacaaagagaagaaggaaaaatcctcttcccacaagccgcatcggagtggggacaagaaaaagaagatgaggaaggtggtctactacgagaccgactcttcatcggcatccacctctagctccgacgcagcatccgtcacttcaaaacgccaagagcgtaagaagtatagtaagatcccc

SEQ ID NO: 795 - DNA, 299 bp, Zea Mays
tcagtggcatcatgattcatgagcacatttaccaagtctgacatttcaaatatagaaaataccaagtatgaccatggtcagtggctattcataatctctagagaaaaaggagctatatcctaaactgccagggaaaaactggactgtggtttgggataagcattgacaatagctccatgattttcttttgagttggttgttacttagaaaacgcttaaaaagtgttcactctgattcttgtttctggcaccggtcccggctcaactactacgcggcgctattcaacttcctggagtcgg

SEQ ID NO: 796 - DNA, 299 bp, Zea Mays
cgcctccgctcctgcatctccaaacacctgtgcacagcgctccgttcttggccagcagcgctctgatggtccgccgagcctgctgctcctgtctcctggagttcattccccttgcgccaagccgagtcacatttgaaggtgaaggtgaaggtgaaggcgaaggcgagcagaggtgacacctttcggtgcttctgcgggcagggacacggacgcccaaacaagctgccgaacaaatcatcataatcatctcacgctgctgccaggcgatcgaacacgggacgtcctgttcgtatccaaag

SEQ ID NO: 797 - DNA, 300 bp, Zea Mays
cctggcttatcgcttgctgctgccggattccatggcaggggtacacccggtttttcatgtctctatgttgaggaagttcttgcgggatccggaccatcagattgagatggaaccaattgcggtgcagcaggatctgactctggagtgccgtccggtgcgtatattgaaattctcggagcgtgcgttgaggaagagatcaattaagtatgtcaaggtcttatggtctaatcagtcagagcgcgaggctacgtgggaacttgaggagttgatgcggcagaagtacccggaacttttcgttgt

SEQ ID NO: 798 - DNA, 300 bp, Zea Mays
atggcttgcggactaccggctggtagggataaaaacaatttcggttttttcggtttttcaaaaattattttcgatttttttcgaccgaaaccaacggtaccggtatttttcggaaccgacatcggttatcatcattttgtttcgaaatcggtatcgaaaacaatataagatttttctgaccgttttaatcggttcccgttttcaatcggaatttaccgaatttaggtatcggaatttttccgaaaacaaaaaattaagtaggctaattaaagacccacactcaataatggacgctcacgc

SEQ ID NO: 799 - DNA, 301 bp, Zea Mays
atgggagccaaccttcttcctggacgtcgtcttgtccctagtctcacgaacagcacccaacatagggggccgatgtggctgttgggcaccatggcgaggtcgctgctggaggcactcggcagccatgggaagcaggtgcctggccactggaggaaggcctcgccggcgagcagctgggaaggatgacggatgcactctacatttttgtacgaagctgctgcatgcgcaatgaaagaagctggactgtagaggaggaactctagctgtgcatgctactgtaccggagcaggggcgccgtctg

SEQ ID NO: 800 - DNA, 301 bp, Zea Mays
atggggggaaaggagcaggagcagaggagtaatccttgtctcagttcttgatcaccatgtgtagcttcagttagttgtactgtgttcccttcctccaaaatcataacctggacacgccccaaatccattaatcaaggcactgaacacctgcagatcctccacttcaccgtggccagaacgcgaagaagaagtggaagtccctgaagcgaagacaacaccacctttggagtctcaggcagggtctcgtctctactttaacatctgcgggcctgagactaactcatctataaacaaaggcaag

SEQ ID NO: 801 - DNA, 301 bp, Zea Mays
caagaacggatgtagtaaaagataacttgagggtggagatgggttggattagttccttacctctatattaagctcaaagcacggtcacgacggccgttgaaggactcaaagtcggggttcgatggcggtggggcttggcctacgcaggattacggtgctgatgggttagtaaggtgcagagagcaacccaacatgttgatggcgcacggggcatgaggcgggcgagggaaacttgatgacggttcctcgactctggagataggctggtgtcaccaggacagggcgatggactcgaacgatg

SEQ ID NO: 802 - DNA, 301 bp, Zea Mays
atgcacggcggaggtttagcgaacgccgacgcgcgtcccatccggcgatccgcgctctatgtcgtcgtgtggccttcaggcttcagcgcgcgcacgcacgcacactcgacgcaatcgcgaggccggcgggccactggccgtctctatcacgcacgttaattgctgaagacgatcggtcagtgtctgcatacggatacagtgcgctttttccactgcaccccggacactgctctaatcaccaggttgtggacagggcccccggccggccccgatcgatagaaatagacaaatttgttcgtca

SEQ ID NO: 803 - DNA, 301 bp, Zea Mays
ataggctaacggcacgaacagccaagaaacctgggcatggggcgagttcaccggagattacagaggacgcggcgcgagttctgttggcgtgggcgtgatggatctgacggcttggtcccacagggcagtgagcaatccagagcgggccatcggattagtgcggctggtgagtgggtcccacctaacagatcccgacgctagtcgcgcgtgtggagcggctgcccacggggcccaactgtcggcgcgcttaagatgaggagtcgggccgcacggtagtaatttgctaggtgggccagatttg

SEQ ID NO: 804 - DNA, 301 bp, Zea Mays
tcgcttatttttgtctaaagtctgggattctgggttcgacaagattgagcagggaagaacgaggttcgacgggctcgacgacgatacgggagagcgacgtatatggagttgtaggtctggtgagctgacgcaagtgacggagacagccgcgtaaggcagcagtgcgtcgacagtctatagatttgggtggtttattgaataggcgggatgcgaggagccgaacaattacttgaacatggtcgacggcgaagtctgctgggagagaatatcagcacacgacgcggcacgacgaacgcgcata

SEQ ID NO: 805 - DNA, 302 bp, Zea Mays
ctcgtatgccatgccatgtgctgtgccgtggcccatgctgcgattcttgtttggttccaaatgaaaagaaactctacactacgctactatagccatatggcagtgcaatgcatagacatctttaattcgaatgcattcggaagccacagccggcatgcatggtgggatggatggggtggccgatcccgatcgaggagggcctgctacgggtagagtagaggaagcgacgcgcgcataggacagttttgatgtgggtgggcctgtgggctgtggcgtggcaaatgataaagctggaggatttg

SEQ ID NO: 806 - DNA, 302 bp, Zea Mays
cacatacgcatctcaattccttaatctggtcgtccagcatgcatactatgatcgcatggacagaagaagaagaagaagaagaaggaggcagagaattccaaataaattattttaatttagaggactaacaaagatatattactatatggaaatgagtagtggtcagaattatgttcttggaccgggcaataaaattaaatatctagctgacttatttgtaatcatccctaattaatcagtgcctaattaatcaacgtgatcatctatgcaaaaaataaataaaaccacttgcattgattgag

SEQ ID NO: 807 - DNA, 302 bp, Zea Mays
actcaccagcgatagcagggtggccaagctggtccgcggcggaggcctagccacggcgatgtagctgctccggcgagcaattcaccccaccaggttgtctcaaccccgaattcacgagcacgcaccaacgttagaccctaggggcgacaatcccggccggagcgcacgtaagtcgcggattaccggcgacgaccctaaatctctctccctctcgatgtctccctctttctcgccgcttcacaaatggtcgcgcacggccgagtgttcacgtatatataatatactcatgaggcaaggtcccc

SEQ ID NO: 808 - DNA, 302 bp, Zea Mays
ttggtcttggtcttggacagcaacacatacccggattgcagcggcggagatggagtcacgcagggtcgcaggtagggcgcaggcggggcgcaggcggcaccggctgaccggctgaccggctccacggcagccgcacctggatcgctggacggcagggacgcgggacgccggacacagggcactcggtttctgcggtttgccctttctggcggccggcgggtggggtggcgtggatcgctggacggcagggacgcgggacgccggacctggatcgctggacggcagggacgccggcgggtgcg

SEQ ID NO: 809 - DNA, 302 bp, Zea Mays
cggctccccaatccgaaggcgtgacggtggcgactcttcgatccgagccacggcgacagtggctctgatccgacggcacgacagcggcagctccccagcggcgcgacgatggtgatttctcgatccgaaggcgcaacgacgacgactccctgatccggtggcatggcgacgacaattccttgatctggaggcgcagcgacaacgactcttcgatctggaggcgcggcatcgatggcttccagagccgtgcgcacgatgtcggctcctcgaaggcacgtgctccggagtggcgcacgctagcg

SEQ ID NO: 810 - DNA, 302 bp, Zea Mays
cttacaccagcatcagcaaatttcaaggagttggcagcctggacaggcagctctgtggatcatggtttattagatagattatataaacatccaaacatatgcagctttgtgctcacatgatgtgatccctgctaggaggaaaaagtctgctcgaaaggtgaagacaaatcggcacgagatggtaaactaggcatgctcgttcaaggttcacttcctgtttgctccagattcacttccacccttctcggaggatctagctgcaggtaggtatagggctcggttggttcctccctgaaaaccac

SEQ ID NO: 811 - DNA, 302 bp, Zea Mays
gcctaaagtacgactcgcacttcttgatgaagagcatggagtctgtcttgccgtcgtagcgggggaagtcaagcttgtggaacttgggaggaaggtcgaggccgcggtgcacctcggaacggctaccgccgccctccgacgtcgtggcggccttatctttcaggccctccatgttggccttcatagccgtcatctccgtggtgagggactgcaactgcttcatgatatccgcgagggtggtctggttggccatggctgagaacgacgagggagagggcggtgaaggaggcgagctgtgtttg

SEQ ID NO: 812 - DNA, 302 bp, Zea Mays
cgcaacatgatgccctacatctgacgaatgcaatgaacgatcaattacctcacagtttgcagcagacgaacccgaccacggtgagcggcggaacggtgggattggttgagctccggcgaggaattcagtcgacgaccgaggctttcccggctctaatccaccacggtcacgcaacacgcaaacaggagtgttgcccaggcaccttatctagactaaaacgacgacgaagagcgagtctacagctacggcggcgcaacccgattctgctcacaccggcggcgtcaggtgaggggttaggtcgc

SEQ ID NO: 813 - DNA, 304 bp, Zea Mays
gcttgccctagttcacgagcatggaaacatattcacatggtatttcaccatttttcagctaaagtggttcagctcatttttcacaaggtttggacgtagttaatactactagaccgcatgcaaaagtgctgctgagagcctgagatgataaagtttctgaacgtgatgtgggggtttgtgacattgtgtggtgtggcaagatgctatggattagcctcatgattcctgagcagataccacgctgtggctgtattgtgtctctgcccgctgccagatgcctttgctttctggatttgtggccgcc

SEQ ID NO: 814 - DNA, 304 bp, Zea Mays
gcgaaatatatgtgtcgcgatcgatcacacaccatacggccggcgtacgtacataagaagctttctcgccatggcagcggtgcttagcgcaagacggccgggcacgcacgaggccggcaagtgcgtgcgcgcgcacgcgtccccgggatgaccggtccagtccagtccttggatccgccagcaagccgatcgtgcgtgcaatgtgcatgcgcgtgcgtgcggcgtgccgcgctagcaggccgtcgtggcactggcgtcgtccatctctcgttccatcggcgagcggcgacaaggcaccttcggc

SEQ ID NO: 815 - DNA, 305 bp, Zea Mays
cagaaaccactaatactactgctgtccgtccaccccctaaaattctggacagcccttctaccaaattgcatatgcaacatctaatcaattggattgcagcacaaatgaacaagagataaacagaaaaatcaccttggattctccccctttccttcctcccttcttccctccaccgaaaacaattggagatttgcaccacgcgacgtagatccgagcggcaaggaatggcaccttgagaggaggagatggggggctagggttaggtggtgtggctgcaagggtttgagggaggaggagatgggagg

SEQ ID NO: 816 - DNA, 305 bp, Zea Mays
ggagcaccgagttctgccttccctttccaccacccgcaaaccaaagactagctccaaaaccgctttgtagcgtgcagattcgtcattgcgccaggagcgtagggttgcgccgccacggaacctcacctccatcggcgcctagtgcctgaattcggaccgaaggcctctgcgggacctgtgtgaagccagccacgacaatttcgggtgagattggcggctcatcggccaccaattgctcaccggagttccacactgtcgcggatcctcgcattgccgtgggcaaggagctacgcgtcttaaccacc

SEQ ID NO: 817 - DNA, 306 bp, Zea Mays
ttttgctagaaaattggggatgttatgtgtgttttttttagtgcttgatctaaaggatccagcaccaagagaggagaaaaattttgcgattaaatgttcaagctctaaatgcgaagctatgaagcatttgttccgaagttctttgagtcaatcaaaggcttggaatttacacatgggggtttggagaatgcttgaggactcaatatcttcaaagataagtacatatgcaagattggagatgccagaaggtgagtgtgtgtgtcagagatatgatgttccataggctcagtttcattgtaaatgaag

SEQ ID NO: 818 - DNA, 307 bp, Zea Mays
gtacgcaattactcagcaagacttacccgactaaagaaaagactctcaagggtatgctggatttaagggattcaaggtaaagcttgtcaaatttcaaagactcgtttttgcataaaagcttactagtagtggatccttatacaaaatttttacttcacaaattaagtacttttcctgaatctagatttgcctggtctagagtattcacttgtcctacactagcttcattttatcaactttaatttcacttgttatctacgatgagggtcgaagatccagtcttcatatccgagaagttcggcgatcc

SEQ ID NO: 819 - DNA, 307 bp, Zea Mays
ggcggccttagcttcagctctgaaaatagccttgtctaccaccttaatatcttcgttcttctccaatcttgagcttttttatgccttcagtagtagacatctgaatctcgcttgattttttacccaccagatcctgcttttcatctttagtcgagggaatcgagatcacctcacccactttagcttggaagtcagtctgcatttcttccatatcttttgcaaattcttctaactcttgagaactcaacaggtcatcttcattgggatcaaaatccactttctcatcactaagatcttccaatctcag

SEQ ID NO: 820 - DNA, 307 bp, Zea Mays
ttttttttgcctgtaataatcagttcacatcgttaacggatcccactgctatctaatcccttacgtagtgagaagaaaaatcctctaaacaaacaatcacaggcttcagttaaattttttttcggatcacaactctaaccattccattgtcgcttacaatcacggagtcataaccaaatatagcaccatagagtaaacgaaacctagcatctactctaatgcacgaaacggttgtgactcataaccatatgatgatccacatccaacgcacataatataaacatacggtcgatatatctactcaaac

SEQ ID NO: 821 - DNA, 308 bp, Zea Mays
tgacgctggtgcgtcactgccagtgccactttgctccaccgaaaatgaggagattcttggtttctagaagttcagcgtcggaaccacaaggtggtgcacaaccaacacaaccaaatccaccataaactcaatctagagggggcggcgagatcaatatgcactaccccagaatcgctcaaaggtggcatgactgtcttgtgacactagctaaaaacacgtcactaacaaaattatctttatgatgtctgttgtaaaaacacgtcattagcaaaatatggtaataacacagtgacgtattttattttaca

SEQ ID NO: 822 - DNA, 308 bp, Zea Mays
cgagaaccgagtgcagagcgacagagaaccgcttctgctcgtttgttttcctttgggtgctttaccttcggggaacagggcagaggatcttccatagacatggttcacgagctcggcgtcgtcagataccgcgagagggccgtcggtatcaacgccccagtggaatggaacgctgccgtcgggatcctgtaacgaggccatggacaccagctattactattagctgcctatcattgccagctgaattttttatattttagccattcctcggaaaaaaattcacgttttagaccttaaaaaattttaat

SEQ ID NO: 823 - DNA, 308 bp, Zea Mays
tttctgacaagtagtgcagcgtacaacaaggcgctcaacatcagcgcgcatctgaggccaaaagaagtgggcagccaacacctcatgtgtcttgtagacgccaaagtgccccatgagaccgcctccatgcgcttcctgtaacaacaaaagacgaaccgagctagctggaacacgcagcttgttagcgcgaaacaggaacccatcctgtatgtgaaatttgccccatggtttcccattaatacaatggcccaaaagcatccttaaaatcagcatcgtcaacatattgatctttcacagtgtgtaaacca

SEQ ID NO: 824 - DNA, 309 bp, Zea Mays
ctccatcgcctgccagatcccgtcgagagagacctccacggccgccgctagctcggagcgtactggggcaacgaattgaccgtcgctggacgttggggtgatcgcgggcaacggctgaagctggcctgggtcctcccgagcgaagcaagtccccgggtgatcacgaattgctcaccggagcacttcaccgccgccaagccgcccctctgccgtggccagggtcttccgcgccgcgaatccctcggtatgatgcccttgccgcgtttacttgttccttagctacgcgtagtaccgattggctaagggttt

SEQ ID NO: 825 - DNA, 309 bp, Zea Mays
cttcggctatgtggacaacaccagaacagagcaagttgtatttgacattgttgtcacgcccggatttaaggggtaaagccgggtgcgtctcatatgtgcgccaaataagaacaacacatataatgactaagtgtatagagataaatatcacaaacattattacattgcagaagtgttttacaaaaataaatgataacaataaagcgaactaataattattccttggtgccataaagctgactaggagacgccacctagacaagctcgtactcctcatagtagacctcctcttgggctacctgctcttca

SEQ ID NO: 826 - DNA, 309 bp, Zea Mays
ttatcgaattattccctatccaaccatgtcatcccataagcatggttcataatccagaaaactcctaaaatacacttatcccatattctgcctataatctctctgttcagactaagtcagacgattcattcgtcactattctcaccaacagtgaacttcactttgctacaccacatacacccagctataaatacacccagctaccctctccctctccacacacattcaacaccctcagccaaggcaaacgcccacccactcggttactccgctctaccggctacacgcatagtgtcgcttcgcctccag

SEQ ID NO: 827 - DNA, 310 bp, Zea Mays
tttcactcatacctttgatgaaacaaatagtaacagccaacgagaaggacggtctccaagtgtgaatgatatatatgcaaacatcacaatatagctaatctgattacaatcaaaggaaacaaataagaatacagttgttcatcaacattaaggactttaggagttttgcatatcaaagacatttaccattattgtaattgcatcagctgtactttctctgtttaattcatcttggatagagctctcggacgaaaaggacaacgttagattctgtgctaataccattggacgtatttcttcctgaacaaaa

SEQ ID NO: 828 - DNA, 310 bp, Zea Mays
ttttttgcttgtgttatttgtcattgtattaccatgttttgtctgatggttaaagaaccgcctttatgctatgctgaatttatttaaccttgcagcgtcttaatcagttgatctctagccaattatataatctgcctagattatataatccatttgccatagattcatttgcaggatttgccgcctcaagtttcatctagctacctccaacaaacccttcaatctccatggctacatcggtacttctcctattccaccttgtgctcctactagtagtgtttttattcttgagtagagcattttgctttca

SEQ ID NO: 829 - DNA, 311 bp, Zea Mays
tttgcttgctggttggctggttcatataaaacagccagttagtggggcttgttgtacgagagactccttgtacgaaaaccactattccagggagagatatttgtctcgggccccacccgtcatcgtcggtcccattagatcctcggccccagtagatcagcacctggtacgcttcgacgtgccgactgccgagcagcccgttcgcgacaggccaaatggcgccgtgcgtgctcagcacccacctccatagttccgttccacgttccactcccacttctacctcgtcgcggctggaccaccgtagtccgtcg

SEQ ID NO: 830 - DNA, 311 bp, Zea Mays
acggcgtgctgtccacagggctccacgaaacagcgagccggcagtatgcggcttgctgcacatttttacgaacagccggcgggctcgacggggaacaacgaggagggggctcgctgtttgcagaggagggcacagggaaaaatttctgggcgtccatgggagagagggcgctgcgtagggctgctgctcggccagggaatggcgctcacgccatggctagagctgcagctgccgtgggaaaaaccagagaggtggactgcgtaggggagaagaaggtggctggtggcggctgggaaaagaataggggtggg

SEQ ID NO: 831 - DNA, 311 bp, Zea Mays
gataaagtccatgccactgcgattaagagcgatgccagcaaaggcgaggcactggtgcttttcaccacagataacgaactgacgcgcgataagttgcaacagtatgcccgcgagcacggcgtgccggagcttgctgtaccgcgcgatattcgctatctgaaacagatgccattacttggcagcggcaaacctgactttgtcacgttgaaaagctgggtagacgaagcggaacaacacgatgagtgagtcagtgcacactaacacttcgttgtggtcgaaggggatgaaagcggttatcgtggcgcagtttc

SEQ ID NO: 832 - DNA, 311 bp, Zea Mays
caagttcacgcactgttttacatgcaaaatgagtcttcaccgtgcatagattcaaagcgcaaaatatttgagcggtgccacatccttggtaatgttgttcgatcaaaaaagacaggaagaaaaaatggtccaccatactgtggagtgcagacgcatcatgcatgagcatgattacttgattagaacaatactctatatgtatactacacccctgcctaccatatcattgatttagcgaaaacatagcttctggctccatcctacgggagatgcctgaacatggctggttattggccaccggcatctggacg

SEQ ID NO: 833 - DNA, 312 bp, Zea Mays
gaaagttaagaaaagcatctttatggcgtctggcagtttgcaatgagctgcacttgccttaacagttcaacaaaaggaggcgtactacttgttgaaatattggtagctaatgacaaattccttgacctatttttaaaaggtacatgttagttacttggaattaaccggcacattcaacattgttatctaaagttaattatgatgatcaaagtctatgtgtagtcattgatttttctgataggagcagtgattgcaatcttttgtagactagagtttctgatactaccacggtagttttggacgaccaaaccc

SEQ ID NO: 834 - DNA, 312 bp, Zea Mays
gagtctgctcctcccccatctccatgaccttcgctgcgcaaccccgaccgtgtggggagctattcgggagtaagcgggtcgacgacgtagggacgttgtggacgtcgacttcagccgtacctacagactccgcgtgtggccgtggagcgtcgccgtcaatcagggaaggcgcgagcaccatctgcggctggagttctgactgaattctcggacgaattccttgtcggagtgcgttaccgccgtgggatccacatcgccgtaggcaccgcttccgaagtcgcatccgcctccggtaagctgttgatcgtgtcc

SEQ ID NO: 835 - DNA, 312 bp, Zea Mays
gcgcctcgccgggccgccgcacgcgccagccatgcgcaccaccggggggggcacaactatgggcgctgttgccgggggggccggatccggccgcacccgtgcgcgccgtcggggatgtgcaccagcgcaaccgcgccactggggccgcgcggcggggcagttctgcccaactacgccgtggccggagccgatgcgcccgggctgggccacgcttcggggccgatgcccgcgccggccgccgtgtgttagggaatgtgagcccaaacggcccatgccagcccaggttgctaagagagtgccagcccaggttgc

SEQ ID NO: 836 - DNA, 312 bp, Zea Mays
cctaggcgccatgagggagccgcgggcgagggaggaaggaagctccctggccgagcttgaggggcgcagccagctaccagagacgatggccggatccaagcaggaggaaggagcgcgcgcacagggaactgggaccgagccgagggaactctgagctgagtggcggggaagctccatggcggggtcgcggagatgggcgcgcggaaagtcagggagccggacgtggcactggaggggcagggcagggcggcggccatggaagcttcaaggtcgagcgaggagcacggcagggagaagataagaaagcagggg

SEQ ID NO: 837 - DNA, 312 bp, Zea Mays
aaaaaactcagctagtaaaaagactgttccatggtattatattaaaaaaacttaatcgacatccggattgagaaagatcgtaaaagatgtctccatagtacgagggtccgcttcctataaaccctaaatcaggaatctgaccgaatctcagtgacaaaaagaaaaacatctcagtgacacctgggtgaagcacgtctaggcagctggggtcgttcgtgcaacaacttgaccaagaatctgacggaacctgtgcttgtggtgtgctttcctccggccatgctcctttctccggaatcctaatctctgcccagc

SEQ ID NO: 838 - DNA, 312 bp, Zea Mays
cttcccccttccaactgccgagtacaggggctatatacagcaattggccggcatgactagagctaatcggctcctagaattaaggactaacaatagcaactaatcctatctttcctcctagccttggatagcaactaatcctctctttcctcctagccttggcaccgattgttgctttcctttcctgcgggtgcggactgcatggtggtgaccgctccctatgatgcccatgacatctatccctcccttgaggaccagctcgtcctcgagctgccatagacttacctgacatgacttaaggttaagcctttt

SEQ ID NO: 839 - DNA, 313 bp, Zea Mays
atacagtgtaagggtacttgaaagaactctactgttcgtgtgtacgtacctttctctctccgtctctgttcgcgggtagaattgatctgaaggagatgtctcaacgagctgcgacctatgtagtggctggctggctggtctaaccaggtcaagatgcgtttcttccttctcttcgccctgccagcgtactggccagatttacttcacagatatataagtattttgacagacacagtcacagaccccacttcagtttatcatcatatcttgacaaacaaaagcaatttgctagtaggagtaggatcggaccctc

SEQ ID NO: 840 - DNA, 313 bp, Zea Mays
aaatcattagtacagaatacctggtagttttgaaaagtgttctttatatatcaaataaagtcagtacgaagtattactccagaacacataaaagctaagaccatgatttacaaagtattactccagaacatgcatttattagactctgtcgtttgagttactcgccataataatagggactctgcaactacctgtccagtagcagaaactcctttgtcggttcttccacacctcgagtagcatgattctttcctattggcaactataagttttgctcttgctagtgctttaaatatctcacttctcagactga

SEQ ID NO: 841 - DNA, 313 bp, Zea Mays
cacctcatcaggcctacatcgaacggtccttaatcgacacagacgggcgaccatgtccgctcaacgtctggtctagatgtattctaaccattttcccatttttggtacccagcaggggtactcttttccaaatgatgaacccactccggccgaagtggaatcatcaccataagtttgctttgatttttgaaacgaaagcccgtaaccaatgttccacaatcattctttttgaaaacaaatgatttttcagtttctaagcagggctaagcattatgagttctttttataaaactaggattaaggagtttccaag

SEQ ID NO: 842 - DNA, 314 bp, Zea Mays
gcgagagccgccgtggtgagaactccggtgcgtcctcgaagggacctcaggcgcgggccaggaagcttcaccagatcacgtagatggaggtcgtgccttcgctaggtgagaggagaggctggaggacccgaatgttccacgccaaagtctatgtagtcaccgtggatccgccttcgccgtggacggggcatagtgtcactggattcgcggtaagggcttttctctgtaggtttgcttttgcccatgcgtcacgtagcatcggaggtcatgggttgaggtgcattggggcaagcgaaatcgctcgccggtcttca

SEQ ID NO: 843 - DNA, 314 bp, Zea Mays
aattaattagctaagggcgtcccatttcactctcatggttgcactgttatcttgggtggtctctcaacgaacaggtccttacggagaggtactcgggaagcagcccgagccccctttagtgccacaagctcatcctcaccgtatccagaataaaaacatcgtatcataaagtaattctcatcatgttcgttgattagagtaaagcactagcatagagctagccatgataacccaaagataaacaaggataaggtaaatagaaagctagtcaatccttaggtttcaattaagtagcgcgggacagtgaattataa

SEQ ID NO: 844 - DNA, 315 bp, Zea Mays
cataaatatcataaatgtacttattacatagcagaattcttacaaaataaatgataaatataaaacaaactaaatattatttccctggcgccacaaagctgactgggaggcgccacctagatcaagtcgaactcctcgttaggcggctcttcttgaaccacctgttcttctcctgtgggggtgtgagacagcaagggtgagctcacatatgttcatcgctcaacaagttgtggagaataatgtgcatgaactcgccaaaggtgggagttcatgtgaagtgtaaggctgatcaataaaataaaggctgaagctaag

SEQ ID NO: 845 - DNA, 315 bp, Zea Mays
gaagaaaccagcctctctgccgaagatatactcggggcactcgaatgtattgaaaaggaggttgatgtccttgacgaagtcataaccggccatggagacttctatgcgctggtagcttctcgtggtacaactgccgccttcataaaagctggatgtaatcaagcgagagctgtcaacaagccgaatttcaatctttcatcattggatctggttgacattccaactgaagcccgaagcatagggaatagatttattactcaaatttgggctatgggcgggcgtgaattggttggaaacgaagcccgaaagctgctt

SEQ ID NO: 846 - DNA, 315 bp, Zea Mays
ggaagcatgggaggcgttgaagacgatgcgggtctaaagaccgccgcacagagattgagacgcgagtacgagaatctctcgttcaaggacgatgagtccgtggagaacttcgccctcaggctcactagcatcgtcgcccaactggacacgttgcgcgaccccgagccggctgaaaaagtggtggccatcttcttgttgctcgtccacggtacaagcagcttgttatctccatcgtgacactcctcgacgtgtcgacgcttaccatcgaggaggtgactgggcatctcaaggcggccgaggaagatgatgaccccc

SEQ ID NO: 847 - DNA, 316 bp, Zea Mays
cttttgaaataattgtcacagtcatgtttgaggacatgcatggtgttattatgttacacgaaataaagtcaacacctacatatattgaattgttgacacaaataattgtactgtgttcttggtctagtgtagtacagcagtcctaatgcttaattgttcacaggttatatttggaaacaaaaaaaatgttaccttataattgtattgtactttgcatgtattctcagataataaagaactggatttccctatgcactgctctatttcatttatcacttatatatcagtagtcatatttgttgaattaatatggggc

SEQ ID NO: 848 - DNA, 317 bp, Zea Mays
ctaccttactcgataggggcaagggcagtaggagagtggtcagtgtagggaggtcgttgggttgattttgctgtgatggcggacaggcgagggatccttgcactggagcttcctagaaactgtagtgggttttctaaagctagtggaactttgtaaaggcctcgtagaggtaccctgcctcgcttccttgttacaggtgtatgggatccgatcaaccctgtggcaaatgggtaacacgacttgtgggtaaagatgcgcaacctctgcaaagtgtaaaactggtatactagccgtgctcacgatcatgagcggctcgg

SEQ ID NO: 849 - DNA, 317 bp, Zea Mays
cgaagacctcagggatctagatagcgcactgcccgaggcgtcgagtgcgaaggagggggctgggggggagctggcgccatcatccgatgctggcgagggccccttggtgacccccgcgccgccctgtgctggcgaagacctcgtgccggccgctgcgccgactagagtgggcgcttcagtggaggcaggcgaaccggctcccgaagaccctgcggcgacggccagccctttgcaggtggcggaatagggactagggctatcgggtgtaaaattttgtttttgtgatactgaaacttggttgctgcgtaggttccgac

SEQ ID NO: 850 - DNA, 317 bp, Zea Mays
cttgaataccacggtgttccttttcttatcacttttccgtttgcgaggaatctccacaagttggagtctctcgcccttacaacaaatatcaaagtgaaagcactagaataagggagggaagcaacacacacaaatcccagcaatacgcacacacacacaagccaaggcttgagctcaaatgaaacacaacaagttcaccactagaacggagctcaaatcactaagaatgtcaatcgagtgtgcgagaatggagtgcgggagtcttagaatgttcagagtatgctgggtgttctccccatgcgcctaggggtcccttt

SEQ ID NO: 851 - DNA, 318 bp, Zea Mays
caactctcctcaaaggagatattccaggtacggggactgccagttcgggtttggcgtgaccccgttctgctctcgctcaacgcgcagggcctcaccctcgacgaccgagggcaccttgggctgagccgaggcttcctcaggctcgggcgtgtcgttgattttgacggatggttgatgtagatccctgaagaagacgtccgggggaaccgttgtccgccccgaagctatttttgccagctcatccgtagtctcgttgtaccgtcgagcgatgtggttgagttccagcccgtagaacttgtcttccaggcaccaaacttc

SEQ ID NO: 852 - DNA, 319 bp, Zea Mays
gtagaaccgcgcatgcaaatgcgtactagcacacgcgatctactacccttcttttaagcaaagatttggcatgtactgtagtgaggagagagtcagcggtcaatcaagcgactgaggttatcgcagtcgtcagtcagctcacgcatggcaaaacctccctatcgatcggggggtgcaactagtggaccacgtagacgggagtttatttggttgtgtgcctccattaaacgtaggtttccctcgaataccctaagccccgtttggattcttagaataaaattttattattattagggtgtaccagaaaaatataaaaaaa

SEQ ID NO: 853 - DNA, 319 bp, Zea Mays
gttatcttttctgcttaacagcccgccaaccctggaatcggttcagccggaggtagggtccagcggccggaagagcaccgcccatcgcgcggtgtccggtgcgcccccggcggcccttgaaaatccgaaggaccgaataccgtccacgcccggtcgtactcataaccgcatcaggtctccaaggtgaacatcctctggccaatggaacaatgtaggcaagggaagtcggcaaaacggatccgtaacttcgggaaaaggattggctctgagggttgggctcgggggtcccggctccgaacccgtcggctgctggcggaat

SEQ ID NO: 854 - DNA, 319 bp, Zea Mays
ccgacgtccgtggatggagctgaggatcgtggcgagcggtagttttggattcggttgaatccttccgattccgcgtataaaacctgtcgcggtctgctcagccaactaccggccgcaaattcgccaccacttagcgcagttggagccctaattgaccgccgtgagtaccgtgggggaaaaatcagggcagcccatgcatcgtcattgcggctcacggtggggtagctggaggagctcgcctgggtgcgccgtgtgtaatcgagaccttcacgggcggaattggtggtctgagcacgacgaattcctcactggagttctt

SEQ ID NO: 855 - DNA, 319 bp, Zea Mays
acgcaggggtgaggatgggcgtcgcgccgtggctggccaggggacagggccgccaggcgccaggggctcggccgcggctcacctcgcgcgggcgctggtcgcctcgctgggctgcagcgccgcctggggcaggagccaggtggacacggggcagttctggctaatcgacgcctgcaaccaacgggagaaaaagatgtgggagagaaatatggactgtataggagaagataggaaaggtgcaggtcgacgggcggttggacgaggaagagaaacagtagctgataatgttgactggcaagtgggacccggtgcaggcgcg

SEQ ID NO: 856 - DNA, 320 bp, Zea Mays
ccaccatgaggtgtaagaagctcgtcgtggacatgcactatgaggcacgaatccaggccatcatcagctaccatggctccatcctggggagaaggtgaccaagcagcaagcccgaaccatgtcgttgaccaggaaccagtacctgcagatgattccatattggtgcgccatatatcctctgtgctgggagcagatggtggataggtgctgctcgcctgagtgggacgaggcgcacaacgctagtcgaaaacgacgtctgatgatgcaatgtccctcccaccaccaaggcagccgcaacctaggccaatatgcagaagcat

SEQ ID NO: 857 - DNA, 320 bp, Zea Mays
gtttaatgttgcatgcagttatgcacatacacgtgtatcttttttttcattttttgttttactgctacctaccatgcaatattggttatttggtatattgttgcatgcatttttctgcaattcggttatttcggggaaacccgaacccgtacccgaattcggttatttcggggaaacccgaacccgtacccgaattttcgggtaccaaagtttcgggtacccgcttatttcgggtatacttcgggtaacggttcttaaaacccgaattttagaaaacccgaattacccgacccgaatttatcgggtaacccgaatgccca

SEQ ID NO: 858 - DNA, 321 bp, Zea Mays
aagttttaaattaacaagatcctcttgatccgtagggagaataccaccatttcccatcataccacgcctgagttgctgtagctcttctttcaggctggatatctccttttgatacttctttattaaggacttctcatctattatctgaaaagaaaatctgtcaacactaacaacaagcacagaacaatacggattacaaacttattgattattaccttgttttgggaagcttttatctcaatatgcttgctcctgtgggcaaattttaatgtgttatgtgtctcctcactgttgctggatgcaggtgtaactgtgcaaatg

SEQ ID NO: 859 - DNA, 321 bp, Zea Mays
cacacatctccgcaccatggtggcaaatatatctgctgctgctggcatatgtacactgaggcctactagtttggttacttttggatttggattggtgtggcttggaacgattagagtgtgtttaaattggcaatacatcaaaatcccttcaatatatctttttttttcttcgaaaggacgtcaagaggattgtcgaatatatttaaagaaggggaatcagtacaactaaccaaatacagggactactggctaacaaagtcccaaatacaaccattacaaaaaagaagacaaagagagagaaacaaagaaaaaacaaaaaaa

SEQ ID NO: 860 - DNA, 321 bp, Zea Mays
ctcacgctccaacttccccatctacgccgccgccatgtagactgggtcaaaccaaaggagaagacccccaccgtcgcagacgcatgtgattgtggtgcgctgggcagtggcgatacattgttgagctactcggggttgcaaggttgctcgccgaggccatggtgagcgcaagggagcttcttggggacaagaattgctcgtcgtcaccggagaatcaccgccgagcgcgcaatcgtgtgggcagggccaccactgttccgacttgtggtgataacccctccgtatgccttgtcttacttttctacgtgcgtagcacctctc

SEQ ID NO: 861 - DNA, 322 bp, Zea Mays
cttgaattcaatgctgagtgaagtgtccccagcattttgaatcctaaaactgaaatacacttctttaaattctgaaactgaaaggtgtccctagttttctgaaactgaaacaagtatcaacatgtgttctgaaacatgcgagcaggggaacatctaagtgtctctaatatcaaatatggcctataaaaatctacatcaagactagcagcatgtgttcttctcacatcgtcaaaatgccatgcccagtcatgccttggacgaggaactttggcaacaaaagaaaatgtcaccaattgaagagagtctctggcaaggtggcaac

SEQ ID NO: 862 - DNA, 323 bp, Zea Mays
attcgttgtgcgtcgcgaacagattgcaatctgttcccgagcttcgaggaatcgacgatcaagatttggtgaaccaccggtcttgagatcaagctcttcgagttctacgggattgaagaccctgagcatctctttggtgaaggcaagtgtcctctgacccattatgtcctatttactttataaatcactatcccgcataactcaattgaaacctaacgattgactagctttgtatttaccttgtccttgattaccttttgggttattatggttatcttcatgctattgctttactttaatcgatgaacatgatgtgattactt

SEQ ID NO: 863 - DNA, 323 bp, Zea Mays
gaagaggagaaaggttccatgtgaacggcacttggacatgggtaagccgatcctaagggacgggggaaacccggcagatagcgcgatcacgcgcgtcacccgaaagggaatcgggttaagatttcccgagccgggacgtggcggcatacggcgacgttaggaagtccggagacgccggcgggggcctcgggaagagttatcttttctgcttaacggcccgccaaccctggaataggttcagccggaggtagggtccagcggccggaagagcaccgcacatcgcgcggtgtccggtgcgcccccggcggcccttgaaaatccgg

SEQ ID NO: 864 - DNA, 324 bp, Zea Mays
tgctcaccgagatctggcgcgacaggaggagcggcccgcccctgttgaccagcgacccggccgagggtatggacaccggcgatgacaccaggtggcccagggataccgcgctcgatcggtacggccacaaaactggaagaccacgcaaggacccctcccttcgattgctcgaccctcactgcacggcgatgaagaactcatgacggcgctggagtcactcggggtcaccaggtaaagggatggcggccttgccccgcgatcatatagggccggctggttgggttattggagcgtgtggcgccaggagttatcgtgcaggtggtt

SEQ ID NO: 865 - DNA, 324 bp, Zea Mays
taggtatataaaacatctcacgacatagattggggaacacaagacagcatctatatatcgctggggctgatgaagggaccgccggaccggtggtgccgaacaacatcacgtacgctcatggcgcggtgcgcgcgggcgcgcagactggggaaggaattgccacgcgcagcgcaaatgtgagggaagagaggccacggatgagggtcgtgaagattttgaggtaaggaagagagacctgtttgagctgttggtaacttgtttttaattgccgtgaataaaaaataagacaacatatatattaaacattaagtaccttcgttttcg

SEQ ID NO: 866 - DNA, 324 bp, Zea Mays
gctcggggccgttcggatcggaatcccaacgaactcgcccgtcaccatcgggagactcaactccacgagtattagtcccatccccgaggtctccccattgtctgccgcaattaccaaagccaaagcccatagagcacaggtgttggggtcttcttgtgcagcgggtctggtacgtgaggcgtccgcgttacgctggtccgtgcggtcgcggtcgcgggcggagcacctgaccgtgtagcgtcgccagcagaagcacgagatccgcctccgtcatccctcgcctccctactcgttgggcacccgctgtgcgttcaggggtgtccg

SEQ ID NO: 867 - DNA, 325 bp, Zea Mays
ccgggttttatggggtagaggtcgtggctcccgttgagtcgcggaccagcggcaccgctcaattagcaacgagaaattcgggtcacaccgcacacttccttcccggaggttcgcacacccacgcgcctcggtcgaaccccaaaacacacgccgagagctgggtgatggtgtggccgcaatttccatggcagcacgatctccttccctgcgacaaggtcaattccccccggtcacggcgatgtaatgcgatggtggcctagttctagcctctggtcgaaggaggacgccagcaacatacttatagagtgcggggtggacttctagc

SEQ ID NO: 868 - DNA, 326 bp, Zea Mays
aacgaacgcatgtcgccctagggcctataagtattcgggcaccatgaccctcgcaagccatcaatccatagatcgtcttctctgttgcccccaccgtgtaaccatcgccgagagaggtgatggcctaccaccgttgaacgcacatcacaccattgcttggggtcgagcgcatggtcaaggaggttcgccagaaagtgtaggtggtgtgtgggttggtcgtggagcgcaggaggcttcgatggccccgtaatttctcatcgtcgaccctactccgtcgtggaccactgcgttgcgtgggcagccgtccccaagtatctaaccacaag

SEQ ID NO: 869 - DNA, 326 bp, Zea Mays
ccagcttgcctacccaacgcatatatggtggggagtagggctctcgaccgtgctcaccgtattcgaaatcacagagaaaactacgcctggttgaaagctcggtgggcggggagggagaagaaatcgccgccgccgtcgcgtccttcgtttccacgcacccgcagtcgctggtggagggcagccgccaccatggctgtctgcggggtggtgtccctgcacgtcgggcggttggaatcggcccaattccacgccggggactcacccgaatcgcggatccgccgctcaccgtggctgggctttctgcggtgaactgtgtgtgaggtcac

SEQ ID NO: 870 - DNA, 326 bp, Zea Mays
atatatactatagaaaatatcataaaaagttcggtgaaaaaagaaaaaaacaacaaatattctttgcagtgtcaaagaaaaacactcggcaaagtattcgtttctatgccgaatgttatatgccgaatgttctgtctttggcaaacaaggtatgtaccacttggcaaataaggtctgtgccgtggagagtcttagttcgtcgagagtggcactcgataaagttcgataaattatactcagcaaagcgtcgagcatttggcaaagaactcaattccggtaatagtgctgatcgagctccggatcatggagtctcggtgtaccctccc

SEQ ID NO: 871 - DNA, 326 bp, Zea Mays
ggcggacctcgcgatggttgtggatcttgtggttgtgggtctcgttgtccgcgatgacgggggcacccacagtggcggatctcattgtctgcggcggtggcggttccaaaggcgatgcgggcagactgagatctggtgcaagtgcttgacgagatgaagatatggtggcgagcgcatgcagatgcagaggtggagatccatcgagcacgcgcgatggtagggcgtgtctctctctggcggcggtggtgcgagaccgcgggtcaactttgatgcccgctcgtgcccaagagcagcggagacaggccccacggggcgggacacatgtg

SEQ ID NO: 872 - DNA, 327 bp, Zea Mays
gtcgacgaggaccaggaggccggagccccgccaagccaagacatagctaggactccaccttgcagcatctagctccacttccacctcaacaagagatatgagagcctctcctccctatctcgattgcttaccgctactcacgagtttgatcatcaatggtgtctgtagcgcaagccaccaatgactgtaagtagagacattctgcccgaaccagtataaatcttacgccctccgtgcacacccttcggagtccggaacacacaataaatttacttgtcggagcgaggtacgaaacactgacacgtgtcgtgccacattagagcaaac

SEQ ID NO: 873 - DNA, 327 bp, Zea Mays
ccgggctacgtacgtaccgctgcatctctctgacgcgaaggcgagacgatgatggatgcagcaggtaccctcgatcgggccgcctggtgaatgaactcgtcgtcgaccgatggatgccatgtcgctgtcgcctatatctgccctgcccgagctttactgtagctgctaccaatgggcaatggcgtagcttttattacaaccccagaagatcggatgcatcgtctcctttgtatataattaatcaagtcacggatccaccgtacggtaccgtccaataataaataaaatccttatgccatctagaagaaacgatctcattttctcccc

SEQ ID NO: 874 - DNA, 328 bp, Zea Mays
agtgatgtgctctgctctgctctgctgggctgctagtggtggcccagggggcagttgggcagtgcaggacacgccaacggggacgggacggtgctgagacggacggcgagggacggctgtccgccggcgagtggcgccgcccgggtgtccggccgggtgaagtgatgagcgctgaactacacagacacggatacggaggaggcgctgggatcgaggcggcgggggtgtcttgtcagcgactggagacgatgtgtgagctgtgactgttgtttgcgtggaggagctgagcccggcccggctcaggctgacgtgggctagaagagcaagc

SEQ ID NO: 875 - DNA, 328 bp, Zea Mays
aaatagtgtaagcatggatgcttcattgttcatatttaaagcgctgattcacgatcgagtacgagttacttaaactagaaatgagctagctagctagctagtttgtgttctgaacttgaccgctaagctatagtggcctgccaggttatataacggtttactcgttgcgtcaaataaacgagagtgctaaaattccaacccatccatccgcctagccaaaaaaaaaaaaaaaaatcggggaggtcgatttgtggaagcaaaacgtccaagaaagcataaagccgcccaccctccgctctcccactccaaacatctcccctgcccttcc

SEQ ID NO: 876 - DNA, 328 bp, Zea Mays
acctttctgtgaaaacttcaggagcaagaatgcaaaatcgacagagaaaatcatgaaatatttttcttgtaggatatccagcacagctgattctaatagcttcaagaacaccctgaaactcaaacgaaccattagagtatacaatgggggttggtttaattgaaacttcactattagtgatccatttcttactgaacaccgaagttgctgcagaacattgatgttctcaaaagtagcaggcttaagatgattattgggcttaatacatctgatgtaatgtggttctgtagaactcaaagtctccattagttcttggagttgccactgc

SEQ ID NO: 877 - DNA, 328 bp, Zea Mays
cagccctcccctgcgcctcagctagaggtgccccctgcaccaccatagggcaccccatctactggaggtgatcctgacggagacaacgactgtggcagttcgagccatagcatggagcttttggagtaggagccaaaaggatggatcgcccaacccattactcgtgatgccgctcgcggttgtcgtttccacgatgctctcgacaccttgctgcgtcgggccttcgaccgacacacttggtccatcgagtaccgctgtatagtctaacagcaccgtcgcgggttatacctggaccaatgggaggctacctgcttagtgcgtcgcccgg

SEQ ID NO: 878 - DNA, 328 bp, Zea Mays
cccacttctctcctcccttggccgccgcccccctgcccatctcctcctctctccattcttgcagccaccaaaccctagccccccccccaatcccctcctcccaaggtgacaatccttgccgctcggattatcgtcgtcgtggtgcgagtcttcaatcgttttggtggagggaagaagggaggaaggaaagggggagaatccaaggtgatttttgtgttcatcccttgttcatttgcgctgcaatttaattgattagaggttgcgtttgcgattgggtagaggggggctgtccagaattttaggtggtgggtgaacagcagtagtctag

SEQ ID NO: 879 - DNA, 329 bp, Zea Mays
ccagcttgcctacccaacgcatatatggtggggagtagggctctcgaccgtgctcaccgtattcgaaatcacagagaaaactacgcctggttgaaagctcggtgggcggggagggagaagaaatcgccgccgccgtcgcgtccttcgtttccacgcacccgcagtcgctggtggagggcagccgccaccatggctgtctgcggggtggtgtccctgcacgtcgggcggttggaatcggcccaattccacgccggggactcacccgaatcgcggatccgccgctcaccgtggctgggctttctgcggtgaactgtgtgcagtgaggtcac

SEQ ID NO: 880 - DNA, 329 bp, Zea Mays
gggggcaacagtgtataaacatatatcatgacaaaaaacatactaagtattattaatcggctagcaaagggaagttaaacatacaacatgaactgaattaaccagtgcgcacgactagttaaaaaaacaaacatcctttgacaacaagtttctaattaaatcatggctgcgcctgggtagcgttattatgagagtgaaagtggacgtgctgctactcccctcattcccaacatgtatcaagtacctgcattgagtaatgcaatagtgagatgacacatctcagcaagtaaaataataacaaactgtttaaccacataagaacattgttt

SEQ ID NO: 881 - DNA, 329 bp, Zea Mays
actaattaacccacgaaaattcctagaaatccctagaactactgttgtccacccacccacaaaattcctggacagcacctctaccgattcgcaaagataaacgcataatccaattgattgcagcacaaaaacaacaaaagttaaacatgaattcaccttgggttcttctcttcctccttccttcttcctccctccaaactccaattgagatcgcagccacacgacggagaaccacgcgggagggctgcaccttggaggggggaagagaaatggggggggggctagggttttgggtggtgagggctgcaaaggtttgaggaggaagtaga

SEQ ID NO: 882 - DNA, 330 bp, Zea Mays
gcgctcccgccacgatgaagggcagatgcgcggcgcccgaaccgctccggtgagcaattctggtcggatttggtcgaggctccggtcattatgctacgtgtagatcccccacgcaatgacaaagccccagtaccgtcgtcctcgcctacacgacggtgtagaccgaggatctcacgatggcgcgggcagtgtaacactcacgcactctcggtcctttcctggttcaaggctctagggtttcgttgtggcgtattgaagggcgaggcggtcccgcggctagggttttatggatgggcgcgacaacaatcctcgttcaagctgggtttgcgg

SEQ ID NO: 883 - DNA, 330 bp, Zea Mays
gcagccttattatctcgaccgtcaaattacaggggccagggtgatgagttgttctgtaacccttggggccggggcaatgcgactctcttgcaacgatacaaattaatagcacagcaggcagcagcagccttcagcatctatcatcagttggcaagaaatgcatatcaaccacatgcacgtagtagccgtacgtagtcgaatgcgtcctcacgccctttttaattagcctctaacgaaagagagacagcatgcagggcgcagggggcaaaacaaatgccaaggaaaattaagatcgatcaatcaatcaaccggcgcgccggccggtcgtcg

SEQ ID NO: 884 - DNA, 330 bp, Zea Mays
gtatattaataactactgattccgtacaaaattgtacaacgcatcgccactaggtgtttaaattcaccatcgcgtagcactatttaggggttttgatattcctgtctatatgcattcatatgcataatgcatttcattcaggtgcgataattaatcacgtgatgcggaagatgactcaagtcgaccccaagcgcgggctactccgcatgttgatgctgatgaacaaacctgcctgatcaagtgctaggacaaggatgatcgtcaagtggacatcgtctaacaaacactaacctagtgttacccgggcaagccccggtgcatgcaacccct

SEQ ID NO: 885 - DNA, 330 bp, Zea Mays
tgcgttagggcccctttcattattggcttgcttgttagccttaattgctatcacctttccattctttttcttcttgatcaaatatggtgtagcggccttttttaccatcttgctgatgtaggtgttggagattttgtttgttggcttgagctcttgcttttgcttatccttggtcttcgccttgcattggtaagacttgtggcattctgtaacaccccgggatccacaaacaccccagaatgctactaaactacacatctaatattcatatataaaatttcgacagcatctcctttgaaaattgcataaatgggggaagcaacaaagtat

SEQ ID NO: 886 - DNA, 331 bp, Zea Mays
ggacacttggtattgagttaggaattttatttttactttagccatactataaagagggttgtgaattagtagtttgaccaagagataactggtgtagtttcggtgcatgttcacacccaaaactagtgctaggtgtcactcataatcttactcacaagttagaatcggaatcgatttagaaaaccccaagataagaaacaagtgttgctgctctaagggcaccagactgtctagtggttccctcgacacctggccagatagcacccgagagcaaacccaaaacccgagagcaagcacttggcgccagtcgaattttagagaggcaccgaat

SEQ ID NO: 887 - DNA, 331 bp, Zea Mays
gagggagacgccggacagcagtgtgtgtgccgaaccactgtaggcatgtgaattcgaaggagattgagagagatagagagaaagcagtggtgctgtagctgctggtggggttggatggaatggagatcgatggagtctgcatctgctctgcatgatgagagagaggcagcagaggaagaatattggcattcaccatgcacgcagtagctacaataacgaacgaacagacaaacaaaatggtggaagattacatgcatggagatcgagaggatctaaaagtccttttttttcttccggaattcgagttttaaaatcccctcctctcttctcg

SEQ ID NO: 888 - DNA, 331 bp, Zea Mays
cagaagataacgatgtgagaaaggcgcgagagtgaatgcaatgtcgcgtgaacagtaaggtgttactgttcccctatttataggcacgggacacaacctggacaaaattacattcatgtccctgatatttactcttaatcataatgtgattaatcaaggactaagtaagtgtttcccctttaggtcggtttcgtccttgatcttcatcatcatactaagccgaagctcctccagccatagcttcagcgtccatccatatcaccttcaggttgtatcttcatatcgcgcatgcctttgccatgagggaaaaccttcatcccgaagctgaagt

SEQ ID NO: 889 - DNA, 331 bp, Zea Mays
ccctgctcatgctcgctcgctggtctgctcctgctcgctcgctggtctgcggcaagaagccggaagccaccgtccgtcctcaaccagccgctggcccgctgcagcctgcagacagcagatcgtcctcgcgcgcccagtcgcccgtcccgtcgcccctgcacacggctggcttgccgcagaccgcagtgccgcactgccgctcgagtctgtcagaccgcagtgccgctcgagactgaagacgctgctgaccgcctgctgtcagctgtggataactggatttaatctggtcatttaattatttgagcaatggctggaaataagaagggaaaga

SEQ ID NO: 890 - DNA, 332 bp, Zea Mays
acaataatcagagtacttattacatagcggaagtctttacaaaataaaagataaatataacaggatctaaaatccatccttggcgctagaaagtcaactgggagacgacgacctagacctctcacgaacacaggacacagcgcaacatccaccatgcgcctcatccagtggtacctgtctttgacctgtgggggtgtgagacagcaagggtgagctcacacatgttcatcgcttaacaagttgtggggaataatgtggcgtgaactcaccaaaggtgggagttcacgtgatgtgtaaagctgatcaacaataagggttaaagctgagcattg

SEQ ID NO: 891 - DNA, 332 bp, Zea Mays
tcattatgcaggtaatccttaaggtgaatgtcctcttgggagaaggtgattgggatgtgagaccatttagacctgatgaagggtccttgaactccatcatgatgtaccctttgttgagcttcttttttctgtttcttgttagttggtttgagacttgatcctcctgtgatcgagagaataagcttcttcacgcttgttaacaaagtgctgaagcctatcatgttcttcattagtgtggagacgaagctttttgtggagttcatgagttcaccggaagtggatgacaatattgggaacttgattttaatcccctggaggtattaaaaaccaag

SEQ ID NO: 892 - DNA, 332 bp, Zea Mays
attttgcttcaacagaaaagtctcaaatttagattatagggcacgaactacgacttagtatatttaaggcatttaaaaaatattttataacgttttgatcaaaatttataaaatgagacatagtttgagaaagatcgttggagatgctaaagtaggtgagtaagttgacttcgctctcgacgtcgatctccttggtgtaaaaaacagcctccttcgatcggattcggtgccatcgatcactgcactgcatgcgacggtatatcaatttttgtgaaacaaataaataattagcctattgaattattgattactctgaaacaggtaacggcgtg

SEQ ID NO: 893 - DNA, 332 bp, Zea Mays
gccggggaggaggactgcgtcgtggtcacatcggtcggtcgctcgactggctgctcacggccatggcgtcgtcgtccttcctgctctcccgtcatgtttacatctaggcgtagctcttgtcttcttgccaaccagacgttcttcaggccaggactcccaagtgcgcgggccccacacagcccctttccccccgctactccgatcgatcgcaatcatgtccttcatcataactctgcatttgagctcgtgtctgaacaggaaggcgttccggctgttgtgggcacatacatgtccccctgcctcgctccgggagcatgacacgtaggcccggc

SEQ ID NO: 894 - DNA, 333 bp, Zea Mays
tcggatttcaaagacaaagccaggtgcatctcatatgtgcgctaggatcaattaacacacatatgatgacgacttcagcgtatatcaacaagtgtcataacattattacatgaattgaataactaaacaaaagaaactaaatgatgatgatagcatgacaatcacgacgacgatccataggtagtcgactagatcaacgaaggcctaggactcctcaaagtcttcataatagtcctcctgttgaccttcgtctgagtagcaaattgagcaataatgagtacacttatggttaataatcagcaagtgtgtaagaaaggtatagtgtaaggccaa

SEQ ID NO: 895 - DNA, 333 bp, Zea Mays
cagagggacccgaatcggtcccatccacaagtatatatatgagtggtcgaaccatcacctgcgctatttaagtcattgagaaagtagccaactcgtatgagaaagtttgttgccaaggtcgccagaccggagcaactccgtcattcgtcgtcaacagcatgccgcccatgtcgaggagttgccaacatgtgccgcatcgaggtcaaggacaggtaccacaagataaggagcatgatgctacgatgagtccgtgagaggtctaggccgtcgctcccagtcaactatggttactggatctttgtctttgtatgatgtaattatttaactattttt

SEQ ID NO: 896 - DNA, 333 bp, Zea Mays
tctcgctctcgccgccggtaagggcggcgctaggtcagtggagcagcacatgcgggctatggccggctgacaggtggccggagggggaaaccgaaagtgtctgtaccggtgtacccgcgccccaagtgcgcggcccgcggaacgccacctgtccctctcctatccctttcccttgctgggcgccgcgacgcttttgctgcatgccggatctgtttcgtggtggctggtgggttctgacggctgaggtatacacgttaccacgtagtactagtacgtacgtgccatcatttgttagatcttgctcgcgggcacgtacggcgggcatgctgccat

SEQ ID NO: 897 - DNA, 333 bp, Zea Mays
cattcgctctccactcgcagaactggtcaccgtttggccttcgccgcagcgccccgcgcgcacccctcgctccccagccgcacgccccgcctaaagccatgcccatgtcgtgcacatcacgcggacgcacgcctgcacccggtcccacgtgcctatcaacattgtcacctattgtttctcttcctcatccaaccgcccgtcgagatgaacatttcctattttctcctatatggttggtcctcgtcttcctctcccacatcttcttctaccgttggtttgttttagcaggcgtcgctgggccagatctgcccgtcccttctcgcccgcggttta

SEQ ID NO: 898 - DNA, 334 bp, Zea Mays
ttttggtcctgagcttgacagtatgtcatatatgctgatttgtagttacctctttgacataacattattttaaattagggatgtcacttaataaaaaaacattttaccaatgaattcgcactgcttgttggaactggaaaaagataagaaattaatggtgggacatagtagttaagttgcattttcataaacaaacatgatagcggactctttattaatgtgtttcttgttctcatacgttggaaatgtggtgtagaccttgatctgtggtcttcttggcattcctccatctaatggagtactcccccaatctccgatgcatacaagaagccta

SEQ ID NO: 899 - DNA, 335 bp, Zea Mays
tttcaactgcgatcatatcatagaattaacgaaggcacgagggtttcggccggcatcggtccgtacagctcgaggtctgtggcggagaggacgttgccagggcggagccgggcacagacccacgcaagcatccggcgggagtcctccccctggagaaacgcccactcgaggctatccgcgtcgagaggatcgtcgccggcgtcgaaccccacggcggccagggcgtcgcagagctgcttcgcgctcatcgccggcggcgtgggggtcagtgctcagtggggatgcgtgaggaaatggaggggtcggatggaagtttgcaaagtggtggggccgtg

SEQ ID NO: 900 - DNA, 336 bp, Zea Mays
ttagatttgtggaggaataatgatttgggaggaatcatttacctacgtcatcgcgtgcgcaatgagcgggagatcacggccataatacgtacgtacttcgttaacgacggcgcacgtagagtactgcctgtgcagtacctttcggtaccttttggttgtgtgccgcgcgctctcggcgcaggcgcgcagcagtgaaaagacagctagcttagctggccagcacagtagccatgtgacgacgatcatacgtacggtatgtacgtggcgcccgcgtgcgtgatcagatgggttatgccagcatcaaaaatcaattaaagacagcggcggcgaggggga

SEQ ID NO: 901 - DNA, 337 bp, Zea Mays
tcatcaccctaccccgagctgactcgggtcgcagggaacaagaccggtgtcccatctggctcgcttcgccagataagcaatgatggccccgcatactctgtgacgacggcggctctcagcccccttacggaagcaagaggacgtcagtaaggactcaaccgctccgacagttgtccctccgctaggctccatcgctcctccgacggccacgacatcacaccagctgggtgccaaaatctctccggctgccaccacggcatgtacttagggcgctagctctcctccgctagacacgtagcactctgctacaccccccattgtacacctggatcctctc

SEQ ID NO: 902 - DNA, 338 bp, Zea Mays
cacggatcctccactacatgaaccggtccgcgctacctgggagcacattaccctaccattcagcttcttgccaggagggtaactgctactcccaccatctcccacgcccagtgcgcggttgtcttttcacgtagggaatagccgggttcaggcttgcccatgatgaggtatgtggccagttaaaaggtcctagatcatcatgccaacaatcggtacggtccttaatcgacacagacgggcgacctttcctgctcaacgtctggtcccattttaaactatttcaaaaatttggtgcctgacagaggggccatgcctggataatgaatttatcaacgtct

SEQ ID NO: 903 - DNA, 338 bp, Zea Mays
attcacacatcacaaacttaacatcgccaacatagtttacacaaacatttcaaataggaacaacgagataagttcaagtgtttagttcgcgaaaaacatagcgtgcacgagttaaaaaacatagcgtgcacgagttcaagtgtttagagataaccatcacttgggtggttagagctttgaccgctgccgccaccaggaggagggaacgcgaagagagagagtcaacaaatccagtccctgctgtgcgatcagacccactaccacccgcttcgggcgtaacctatttaagttagcaaatattaacatttttatctcaaatatcaaacgttaaatgccaa

SEQ ID NO: 904 - DNA, 338 bp, Zea Mays
cggacgaagtcgatgggttgccatcattgcgcaatgatgcgctgccggcacctgggatcgtgcttgatctttgctccaagatttcctgcgcacaagcaccactgttttcttccaaagaggtatcattaggtgcagaattttgggtattttgaatatcaggcaacaatgaatcagctacattagtatcccccggataattcatggtggtactggaaggaaacaagtgaggaaggagattgacttcagcccgtaaacgagcgccgacattgggatggaactcacggaaaggaaaaactccttcatcaaatatgacgtctcttgatatgtagactcgtcct

SEQ ID NO: 905 - DNA, 338 bp, Zea Mays
ttgatctcgtttatcccccttcttcgccctacataaggattctgccgatgtgccctgggtcctttgttggttcgccacccgcatctagccaaaaaaagcattatcgtggtgaaagagggagacaacgagggagcgatttgggccgccaccggtggttctcggcggtgtcgggtctccatcctcggggtgtggccaaggagagtcgtcaatgcctagggaagtagtctgcaaccgcaaatcaagggaaggaccgacagagctgggtgaattgctcatcagtgggttgcgggagcaccataccgcgcatcggtgttgttagtactcccctcatcggcacc

SEQ ID NO: 906 - DNA, 338 bp, Zea Mays
tgttggcctgccgcgcgagcactgctgaccttgtggctagcgggcggtcggcggtctgccgcgctagggcctgccgcacaggagcaaccgccgccgcgctggtcggtagaccgggcaccgccctggcctggcgagcgaggtctggacggccggtcgggcatgccgcgtgcgtgccctgcctccgcaagccttccacgcaggtgcgaggtagccgctgccagcctgccaccgggagtacgccggctttagtcatcgccaccgtggccacagtggccgaagggcttggctcgggctgcatgcgtctgacgaccgagctaggaaccggttgggttagtgcg

SEQ ID NO: 907 - DNA, 338 bp, Zea Mays
tcttttttgagatgctggagctggattgcgcatcttggaattgcctaatcagattatgacccggaaatttgttgccgcgagcttaagagttaagaccgtgccgaacagttgtgttcatccgagtttgaccttttccaacttcaacagctctaaagttgaatcgttcaaaagttgaagacttgaagttaaacacatgcaggtactactcacataatatgtttcttgaagttgactcaaaagtcaatccgtatgtaacacttccctcggttcgtgcgccttgagtcttggacaaagcatgcatgggcagcgaacgactttccgctacagtggtatactcc

SEQ ID NO: 908 - DNA, 339 bp, Zea Mays
ctaccggtgccacgcgacgaggaggacaaggcagactcagatgaggactacttaccgatggttaggctgcaacattcctttcccacagggacatgcgatccatggtggatcccaacttctgatgaggaattgcgacagcgccagaggtcgttccaatcccacgacgcaatgccaagcatccaaacgggccagtgattaaccttatctcccagccaaccagcaactcacaatcgatggcggcacggagcgacttcctctgtgctctcccccatggaggctctcagctctcacgatcgcgcgacgttagcgggacgagatgcagaggagtatggggagctg

SEQ ID NO: 909 - DNA, 339 bp, Zea Mays
cgaaacaccagcaccagaagctaccgcgggggaaggatctaggttggggaaaccatgtgtcgccgccattacggctgggaaaactgccgccaccgcgggacctcgcctgggttgccgtttgggtcatgtggtctggcctgggggcttcacaacattgcctgggagttgatcatggttgttctggacggaatggtgctccgtggctccatcgattgctcaccggcactgaagcaccaccgcggcgccgcttcatgctgcgggccggcctcaccacaacgccttagacggtaataatttggcccgttaatttgccttcgctctcgcatcgtgtagcgtgtc

SEQ ID NO: 910 - DNA, 339 bp, Zea Mays
gggagggagaggacggtcgcggagagacagacgccgacaggtcgtggcgccgtgtcgcccggcccgtgccgctacagggcgcgccgcacgatacgcggccgggcacgccgatggcgacgtgtgcgtgcgccgtgcacgtaccgccccgccgggaccgcgtatactactggtatggtaccgggccggggcaggcaccgcagcacatacgcgcgcccccggtcgttgtcgccgtaggcaggccgtagtcatggcggatacgtacgtacgtacgcacgctccggcaggtatgacctgacctgacctgatctcacttccctggcctgatgagatggcgacgat

SEQ ID NO: 911 - DNA, 339 bp, Zea Mays
cctagcagtgtgtccggttttaccttcgctgatgaatttgtctaacacatatgtagctttggcaaaaagtaacctgcctttatacatccgtttcaaaccagatcattcaggcgcggtatacgaattggtcttgcataccacaaaaagacatatctgttccagtcgagacacagcgtacatataatacagtagtactagtatatatgagcgccttgcaggctagccacaggtaagtcatgcgcagacgcatttggaactctgcgctatctaaatacagaaaacacacacatggatcgtctcaattttcaacacgaaacgccagcaaagcctgtggaaatc

SEQ ID NO: 912 - DNA, 340 bp, Zea Mays
caggatcacaggaggaagtaccagtggggattgtcgaggagctgtcagggattctcgtagaagagggtgaacccaaagctgaagctcaggagtgtcctgatcaccgtcccagttccttcgagaaagacgagccccgacatctaacttcctatatttgcaatactttaatttattcactgcctacctatattgttgcattaggtataggagttgattgaaaccaattgctgcatatacccttgatttcttgtttaccctatccttgccacctatttaaagtaaacacacttaaatgcttaggcttgcttagacgatagatgtcgggtgaatttcctgtcac

SEQ ID NO: 913 - DNA, 340 bp, Zea Mays
cggcgcgccaaccaagctggagacctggaagccgatcagatgccagaagctgctaccatgggggcaagatatgaagatgtgcatgttgtcctccaactccgcaccacagtgggtacatcccccgtctggcataatgttcttcttgcatagggttgaccagtgatcttgcatatgaagatgtctggcagaatgttcttcttgcatgtgaagatgtgcatgttgtcctcctcaactccgcacctagaccttcgttgctgacatatagtggaggggcatatcacttaaaatactttggaccaagaccaatctgcccgcgcattgaggatcttagatttccgcg

SEQ ID NO: 914 - DNA, 340 bp, Zea Mays
atgaccgctctgagcctggcgcaaatccgaactctctcgggtatataacccgattaagtctcgcctcttgctcaaccccccccccctgcgccgccacagtgcaaccctaacatagacagagaaagggagtgcagcgagagagagagagatttccatcgccgatggaattcgggcgccagcaaggttttgcgggtgttgggctgacctcattgcagctgggtgaaaggctaattagtggggcgtctgcgggactggggagcaattcctcgccgttgatcgatctccgccgcgagcagcttcacccccgtgaccgggtacctctacgacgtcagggccggta

SEQ ID NO: 915 - DNA, 340 bp, Zea Mays
agcagccagctcttgagccgcactaaccacagctgctccgggtcaactattgcgtgctgatactcgacgacgagatgcagtaaccaaggcgcgctcggtcgtcactgactcactgcgtgatctgctcggctccggtaagcagagaatgagcaagtgtgtgagagggagagagctgaccagattacagtagagtttcttgcaccggtccatggcatttcctatctttacaagacgcccagggctcctgccatttaaattgacactaagaccccaacctcctccactatgagcacattttagaaatcagaatcacatcagcctctaccaaaggctcgcatcg

SEQ ID NO: 916 - DNA, 340 bp, Zea Mays
ccctggtgttccagcgacgcctcgtggcccccaactcggtacaacaaaggcgaagcacaccatgaatacgatagggaaacgggccttactgctgagacgacgaggacgaagctggtcatgtcaccgcgcagtctgacacgagacacaagccccgatgatggacggactatcgccggagacctcgatacgctcgttggccatgaacggcttcaccgagccttgggattgccctcatccactttccgactcaagcacgccgcgggcgaggtgacggcagcagtcgcgggttacctctctctctcttgattcttcaactcgcaccggcggtggtctacaacgc

SEQ ID NO: 917 - DNA, 341 bp, Zea Mays
agttcaagcagaaaacgtacctatagtgatggccgcgccagagatgctctgaaccgcgctgaggaacaagcatggaagcgggcaggtggctggctccaggtcagtctaatctcgacaaacaaagtagcgtgcatgtttgtgtggaatgacgtcgcgcccaccatctatcaactcactcaccatggctcgctgcagctgcaaaatatacgtatgtttcagttcggtttggggctcttttcagttcaaccaacggagctttgccttctttctgagctttccacatgtaggttcagctacaaattaccagccggttttccaccttatcctcggccacgggaaaa

SEQ ID NO: 918 - DNA, 341 bp, Zea Mays
agatggtcaatatcaggaagggtggtggaattgatctacctcccaatcggcacactcggaggatatttagacaaccccagccacaaccagtgagatggatcctccaccgcctccaccagcaggagttgacccaactgttgtaacacaaatgaggataatgcaacagatggctgacactatggcagatatgcacgcgcagatgcggtaggaacgccaagagatgtgccaagagcgagaagatatacgacaagagatgcgccaggagcgagaggagatacgctaggagaaaagggcgcagcagcaacaactgcaacaactgcaacaacaacagcaacatcagc

SEQ ID NO: 919 - DNA, 341 bp, Zea Mays
gcgtagccggctagccgcgtagagccgtagaccgagcgctgggcgctggctgccagcctgccagagtgccaggcctgggcgctgggcggctgggcgtgccgactgccgcgtgcccgcgtgccactgccgcactgcgtgccagccctgggctgggcggctgggcgtgccgtgcggcgtgcgcggcgccgctgcgcccgtgccaggcgcaggcagccaggcagctgccggccagcggtaaccgagcggtattctctgtgaggcgtggatggttggtgccttggtgtggtggtaggcaaaagcaaagtggtcagcatcgaggaaggcggagcttgggaaaattg

SEQ ID NO: 920 - DNA, 341 bp, Zea Mays
gttctgggtgaaggggacactgcaaagcttgagattcagattaagttggacaaagagaagaaaatcctctccattcgggataggggtattggtatgacaaaggaagatcttattaagaaccttggaacgattgctaaatctggcacttcaggtactgccttttcatctttccagctgattactgcactcataatatttgtttatgagtgcaggaacaggagctgctcgagtctcttgtcgaagctgatacggaaagagctaagaagatggaagaaaagaaagtgtatctgcaactatacgaagcaatggaggcgttggtcaagatcaatctggagaccaac

SEQ ID NO: 921 - DNA, 342 bp, Zea Mays
gctgaagctccgctccgctctagccatcgagaaccgattctgccatctatgaggaagagccgagaaggaattcgccaccgcgggtatttcggaaccacgccgttgattggggcttggctattgcactacggggatcgacggtgggcctcgaagttctcggtgtagtcggtgggcggcgagggaccttgtggccaccggaattcctcaccgcacctgctgcccagtcgtagaacctgctcgcgccgtagcccgactcctctgcgacgtcattgccggtaaggtgcccttggccatgttcgccgtcattactgccttgcgtagcattcgtagaatcgatgtttg

SEQ ID NO: 922 - DNA, 342 bp, Zea Mays
ccctactaccgattccgcgcgccaaactacgattacccaggtgctaagcgaatggaatgaccgcaggaatacaaagggcgggtacacaccggtgatctttcagcaagagcagtgcgacgacgttggagtaggcagattggctgttccgcgaagttcgcgacaaattccagcaagaccagtgcatcaccccgctcgagcaagtcgcgatcacattcctgacgacgggttgaaactccccaggatgaggtcgcgccacgaacggcagccagaacacggatccatgatggcggagtagggaccccccaagctctgttggtcggtgatggctacggcggatgaaaa

SEQ ID NO: 923 - DNA, 342 bp, Zea Mays
ccgtgagtaacccgccacaaaggaactcgccaccatcaccgtcgggtgggggagaaactccgccgccacggtcggaatcaggtttcgctgagagattggtggcggtgtgtgggtgattgcgtgcgcaatgggtgctcggttatgaccgaggggtcattgagctcgtacatcggcgggggaacaacgaattgctcgccgacgtccttctcccacggggatctgcgctctcccatggccagcctttctcaccgttgatcgtcggtggtaagcatctctgtagaattggactgtggcccctctacgcgtaggactgttcggggttggagatgatcaccggggagg

SEQ ID NO: 924 - DNA, 343 bp, Zea Mays
gcgcacgtagcaccatgctcagccgttccggttccacctgtcataagcgtcttcatccaaccatcccctccattcccacacatacaaacaccccgatgactccaaaatcaaaactgccagcccctcacctcctcctcgccatggctgctccgtgtgcagcaaccgcacactgcaccagcgagccgtcgacaccatcgaacctcatctgcattcgtggtcgctacgccctccgacgccaagattgtaacctcgtggacggagaatacatcctcgtgctagagcaaggagttgctcaggaggtagccccggatctagcaccagagcctgccatcgaggatctgcc

SEQ ID NO: 925 - DNA, 343 bp, Zea Mays
tagcacctcggccgatcctctaggtgattataaaatagggcaccgaacgctaacccccatccccctcacgccacgcacaaatccatcatcaccggcgagggcagtgtcggactgtgtgccgccgccgtcgatcctcggccctgactccgttgaggactcgaagttgggaggtagagtttcgccattgctcctgtcgggtgttcgtggcgggattgggcgagaccggccattggagcgaccgcaattgctcaccgacgatcgcgacgagccccagatccgcccattaccgcgattagcaccaatcagacgtccatttgcggtaagatgcataccagtgtgttcg

SEQ ID NO: 926 - DNA, 343 bp, Zea Mays
atcgaatgtcacaactttactatataataggagttctatacaaaataaataattacatttaaggagacaacggtccagcaacccaaagttgactgggagacgacgacctagatctctcacgaactcatcgcagcatcctccttgcgcctcatcctgcggtacctgttcttgacctttggggggtgtgagacagcaagagtgagctcacatacgttcatcgctcaacaagttgtggggaataatgtgcatgaactcgccaaaggtgggagctcacgtgaagtgtaaggcttaccaaagaggatggttagagctgagcattgcttttaaagttggtcaaaatttt

SEQ ID NO: 927 - DNA, 343 bp, Zea Mays
accagatccacttcctttcccgcgacccagctcgcactctcctctgctcgcgctagccagcccaggcacagccgtggcccatctcctcttatcggcccagcccctcacctcggcctgctccgcgttccccctagccctcccacgtccaggcgcaaccacctgcgttgctggccagcctggcagccacatggccggccccatgcagccacgtcctacgcatgtagtctctattttttccttctccaaaccgccaaggtcgaggcgtcaagctgcacgcacccacgatgtatgctttcgtctccctcgcgctcggatccacggagcgttttgacggttcggccgc

SEQ ID NO: 928 - DNA, 343 bp, Zea Mays
tactgctcgtccatggaagaactgtcgggcgctgctaccctgctccactggccgcatcaccgtcgcctggccatggccgccgacaccgacgtggtccacctcctggccagcaactaactcgcttgaatgccccttgcggtcgtcgtggtggtagggagagaaaaatcaaccgtgcacgtcatgcatgggtgcaagaaggaaaaaggcatgcaagtagaaacgcccgcgagccccatgttgcatgtcgtattcctctcctgcgtgcatgcgctcaagagaaacagtcctccaaggatccgaggtggatgcaaaatccatgaccatccctgggaattggctcgga

SEQ ID NO: 929 - DNA, 344 bp, Zea Mays
tgcatgcctcctcggtgggatatgaaggcctgctcctcccctcctccctcccattcaccaccaaagccgtacgagagaaacagagtgaacgccgggccgcctctactgcactcggaatttcgccggctccccgactctatgtctgcccgttaggttctcctcagcacctcgcgggtgggggcattggtgtcggccacaaggtgaagcatcaccggggcaattcctcgcagccatggactctcgccgtcatcctcatcgcgaccaacttcttccctcagttttggactctcgacgagtcagctactgaggacccaggtgttcaggaggtggagactgtagagcag

SEQ ID NO: 930 - DNA, 344 bp, Zea Mays
ggccgttgcagcgcagcgccccgaggggcgcgccagaggcgcgcggataccgtccgcgccgacgacggctgccgggggcgcctagggcccccgggctttggccgccggcgcgggcgacaacggtccacgccccgagccgatcggcggaccagcaggagccgttccgcatacggccggtgcgcgtcgccagcccccatccgcttccctcccggcaatttcaagcactctttgactctcttttcaagtccttttcatctttccctcgcggtacttgttcgctatcggtctctcgcctgtatttagccttgaacggagtttaccgcccgatttgggctgcattccca

SEQ ID NO: 931 - DNA, 345 bp, Zea Mays
cggacaacggacaagtgggctggagtgggagggtgtgccacgggtcacctgtttgttttttgttttcggaaaattccgagatttaaattcggtaaattccgattaaaatcggtaaccgatcaaaacggtcggtaaaacgttaaaccgatttcgatatcgattctaaaataaaattccgattaccgatttcgttttcgaaaattaccgtaaccagtgaatcggatcggaaaaaatcgaaaacagttttcgaaaatccaaaaaattccgaaaccgttttcatccctatcctcaggcttcctcttccgaacacatgtggtgttgactttcctataattcaatatgcgg

SEQ ID NO: 932 - DNA, 345 bp, Zea Mays
gacgctcaaggcattgtggtcgtttctgtcgttgtgcgcaatagccctccagcacagtggtatttcaacatcgtacgtgtggataccatggagacgttgttcttgttgcaacagtgttgaagaaaagagtgatgttctactacttgtgctatgttgacgccttcttcttatgttacgccacatgtctagtggtaactatccatgattcgatacttgcatgttatctttggttgaacgtggtagatatgctagtgtgtggcgtgcatgttttccaataagtatgaccttaagatagccttagtttttttaaataacatcacaaagacagtgcacattactattaat

SEQ ID NO: 933 - DNA, 345 bp, Zea Mays
agacgagcaagtgattgaggaccctggtgttcaacaggtagaagttgctgagcaggagctcattgaaggcaagttgtgcccttgaccactttatttacccaataatgttctctataatcattttgtcatgcataggcttaattttgattggacccaataggtcaccctagtttggtcatctttacaccttgtttacccctgaacttttgggtagtctttgctattgctatatatggttttgggtgtggagataactattacacatggtcattctttattattattgttttatttctgttcatgataagactattatgttaattggaacatggagcttaacttgag

SEQ ID NO: 934 - DNA, 346 bp, Zea Mays
tttttttttgtccagcaactgctattttcattcagtgatggctgctttaggtcatgctggtgtgctcttcgggactggtcttgtgttagtttttttttgtgactttgagcatatcggtatactgcatgtaatctactgtgcgtctgaaatttctttttgagaacagcaacaatagagtcgcaccgatctgcagggcttctgtacaaagttttttgatatatcactttcaatctattgtaaaacaatcattaatgcctaaatagtgatcggtcgttggtagctttatttgattgccttgcacttaaacagcagtctgtttgtcatccttcttttcagcaccatattt

SEQ ID NO: 935 - DNA, 346 bp, Zea Mays
aaaagcctgaacggaccaaaccgattgtaactaatgaagatcagcatcatgacttgtgcagtgacagtcttggctaaactatgaatcagtagctaagcacgatagtcgatagatggctctaactcttgtgtctttttctgtagttctgaatctgaatctgtgagatgggcaagctggcacacatgagacggtgagatggaggggaacaatgatcagcagacagcagtagaagcaaccagttcgtcaaaagtgtgttaatcacactatggtcttagttttaatggcctaagatgcgtttgggcttagagtaggcatgtgcctagtctcaagtggtgagaacagaaca

SEQ ID NO: 936 - DNA, 347 bp, Zea Mays
ctgctaatactaatgctgttcgtcctcccacaaaaatctggacagcacctataccgattcgcataggtaaacatgtaatcaattggattgcagcacaaatactaaaaagaatgatcttaaaatcaccttgggttcctcctttcctccttcctttcttccttcttcctccctccaaactccaatggaagactcgcacccatacgacggggtaccaagcggggaggctgcaccatggagaggaggagggggggggggcggctagggttgaggggtggtgctgcaatcacttggggaggaaggagagggagagagagagggggtggcggctacaaaggggaataggggag

SEQ ID NO: 937 - DNA, 348 bp, Zea Mays
atatatattagaggaagccaattatataatggagcaaagcaagaggatatacatgtataagagtcgacactgaaacacacataatcacgtgcgtgagccatacctgcactgtacagcgaggaaacgagagggagtggggtgatatggacaagacaggtccatgacatgcaaatatatcatatcttccaataacaaggccgccttgcggttgcagcaacaccaccgcaccacgcatgcatgatgccgtcgcctatactcgcgctcctgtgtgcgacgaaagagagggcgtagaggagggttcacgggaggttccaaggcgcgcaccccaaatcatgcctctgcctcgac

SEQ ID NO: 938 - DNA, 348 bp, Zea Mays
gagacgatgaagatggtggcgctcatcatggtctgcaggtgatagatggatctaccaacaagacggatgcgtacctgcatgtaatctcctcatctcgatcgacctcgccggttattgaggccgacaaggatggatggatgtggcagcactagcaagcgccatccatccatggacgaccgagatggccgccggccggatatattgcgctgcggcgcgcgtatcagcagccaccaccaacataatcttcgatccgctgctcgcgtcacatccgtagtcgtcgcttttaatattttcttccagatcaccggccggtcactcgtgctggcctgctgcccttttccattttcc

SEQ ID NO: 939 - DNA, 348 bp, Zea Mays
gaccatgcatctctccttcccaaggtggacgcattggttgcattgcatcatcgcattgatccagcacaaggcgcagtggcagtggcagcagggagttggttggttgttgatcgttgggcgatggcgatgtcgacggcgacgtccgtgcgcgcgcactagatctcatgtccgatcaattccatgcatgccggttcccgtcgtccccggccccggctccagcttccaggtcaacgatagagcaggccccgctcccgtcgcgccattaacagagacagacagacgtccacgaggccgtcgatcgaaatccaaaccccgggggccgcggcgatgtgccggggaatcgggttc

SEQ ID NO: 940 - DNA, 349 bp, Zea Mays
tgcattggcgcctcgggctttctcgtcgtagtcggatcgcaagggctgtggtagaacctcccaaggtatcgggcccacatgcacctgtccttgtcttaaagaactcagacggccatgcatgtgcaccagataacttaacaggatccgtccgattgccccacagacaccggataaaccacttacaaccagaaccgcgggattaagtaatacaaatcacacacaccaatattttgcagcggaaatcttattaccaaattttacaaattacaaaaattttacttcgtacatgatcagagtgattactacattgattcaaagaaagaaactttgaacggttataaattattta

SEQ ID NO: 941 - DNA, 350 bp, Zea Mays
cagcatggtgccccggcgtcgtgcatggtggctcggcggtgaaggaggacctttagagaagaatttcgatggctcaaaccaagctcaggatgttcacgccctcacacagcgtgccccagcgatgcaccctggccaccttgggactttaaacagcagtcatcgatctgatcgacgatggcggctcctgctggcttccccattggtttccgcccatgcacgagattgtggccgagacttgggatttcaggtctactctatcgcttttatatcctgggcagaggctataacagtcgaggagattctcgtgtggggtttgttatgatcgcgtcatggtttgttggagataatca

SEQ ID NO: 942 - DNA, 351 bp, Zea Mays
ccaagttcatctcaatacccttattgcctttttactcttatttgaagattttggtgaggcaatggggtttaagggccaagattgatcccgttttggtgcttgatgccaaagggggagaaaataaggccatagcaagaaatggatcagctaccacttgagaattttgaaaataatagaattagagctttttgtttgacaaaatactctcattgtcgcttattgtcaaaagttggtctcttgtgggtagaatgtttgattatgggaaaagggggagtttttgaattcttgatcaatttctcttggaatacctctctctatgcctcaacaagtgtgtttgacttagagatagga

SEQ ID NO: 943 - DNA, 351 bp, Zea Mays
gaagaaattgaagtggaagtggaagaggagccaactcttcaatctgaggtttctccaactgaaggtgttcctgaaggtctttctgaaggtgctccagtagggtttgctgccaactgcaatatcctagtagaagagcctgactctcctcctcatcaaggcaagccccggtgcattttccacctccttgttattttaaaacttttatcacttatatgttgcattaggtggtaggagttgaatgattaaacctttgctgcataacttccttgagatattgattatcatccttgatacctgatttgaaaagctggttgtgcttagtattcttatagacaaggaacaaaatgtttt

SEQ ID NO: 944 - DNA, 351 bp, Zea Mays
gtcgccctaagcactgcgcctttgtgacggtagcctacgcctcgttcagcaaatgtcctttacaagtactgggcagggaccatggcgccaatataatgagggcaatgagcgttcgaatcagtcatctgtcacactactaactaggcatgaatgcgtgcatgatggaggccctggaccggagttgccaagacggtcagaactgaagaattgccggaggagctcgtgttccgtgattgtttttgcatgagtatgcctgcactgcactgcaccctctcattgcacaactgtgacggatgggcgctggttccgcacatgccgagtgtctgctgccacgctctcccgacgccgagc

SEQ ID NO: 945 - DNA, 351 bp, Zea Mays
cagagaggggcatgggagaaagaaggaaaaggcttacctgctcacggcaatcactgatggcgggacgagcacgacacgaacggaactccaagcgcaggcctctagtgttgtggtcggcgtcgagcgctggcattccttgctagggcgcgcggcggctggaggtgcgctgggcaggcgcggcgcgttgggcaagcggcttgcaggcgacgacgctagggcttgggcgctgggcagcgcgcgttgcagccgctaggggaggtcgcggctgggccaggcggcttggcctaggggcgcggttgctgggctgcgggtgggccgagcgctgggccggccaggggaaggaggcttgct

SEQ ID NO: 946 - DNA, 351 bp, Zea Mays
gtaagtctagctgagtattagtatactcagccttgcttgtggcaaaatttttacaggatctctggaggacatggttgctggagtgacttggccgtccaccttaccaccgggttggactgttgagtgggaccctgcctcggctgaggaggagcatgaggagtgatgggacaagctcccccatctctctgtttaattatcgttagttttattccgctgcacttcgaacaatgatgggtacttttgcaaaaactccgatgatgaagatggtgatgtaataatttaacattgtggcatgtatggttttatgctttattgtatttgctctgtgactcaccatcgagtgagattgtg

SEQ ID NO: 947 - DNA, 351 bp, Zea Mays
ttcttttgtcttactcgcaggcctttctagcccacaagcttctgccacatccaaatccgaaacccaaaatccggcgactcgtcttttgtttctcaacttgtcaacgccacaggccagcctccgcagctgatcggtgcatgcatgagtgcggtgttgtatctgcgcacctgttcatctcatcggttaccagacgcccccggctgcttgtgcttgcattgatcggtcgtggatggagatggaagaccctgccggccgcagctgcgtccagaactccagatgcgagggcacggaccgggtgtgctgccgaaaggccgaaatgcacacaccgtcagtttcaatcaaagaagaaga

SEQ ID NO: 948 - DNA, 352 bp, Zea Mays
cgatggccttgtaggggaaagctccagccacgatgaggggcggatccgcggcggagtgtgagcaccggcgagcaatctgagggatgatgacccccgatcgtgcctggaaatcccacacgctaacaccagggaacgtggtgaagctcttgcactacctattggacccaaaacgaggacgcacgtcacgaacaatgacggcggcatccctcggctcgatttcacccgcttccctcccactcttgctttgatgatttctgattcttcctcagcttgatggcgcacgacttctatgcattgagaagcgagatgaaacgaccgacccggtcgcgagaacgacggaggtagctcaacg

SEQ ID NO: 949 - DNA, 352 bp, Zea Mays
ttttgataaaattctatgtacctcgcagtttgcaaaatattgactgaactgaaacaggtagtgctacacttttttatactcatgtagaaaaaaatatactcattactcacttgttcatcagaatggaaggattgttctttttgctgtggaagtatatatgttttcagataacaattttgtatcgattcagctggatacaattcaaacagcactatgaagcttgtttctgctcctctacaattgaacgcaaccgaacagagtgttccgggtttgtttccttgttcatgagactgaattatctctgagtgcaaagctgagccaatcattcatggaaatttgtcaccgaagtaag

SEQ ID NO: 950 - DNA, 352 bp, Zea Mays
cgcggctcacgccgccacgccctactcacgttcgcgtatggaagacggaaccgacaccacgatctcgcccacgacgcagggaaatccgatgtctgtgcccacactccccttgccgaacacctgcgcaccctctcctctcccctctatttctccagccactagtacccgacgcctccaaaaccagtgcgcggtccgttcacagtcgtcgttcgtcggacccacgccgtcactgctcgtccaccaagaccagcgccctctcgttgctcctcacctggtatgtccgcatcgtcgctcctacccgccggcgctgtcaagcctccgctggtgccaccgtgacctgccttcttcctcg

SEQ ID NO: 951 - DNA, 352 bp, Zea Mays
cccagactcagacttcttccaaggtggaccgcgggtttgattctgtgaagttcagggacttatttgtaaagcgcctgcgccgaagtggtatcccagcatgtggattgctggatcgacagttcacgacgcggattaaaaggccgagccaaacgagccagtatcctattgatcaattcctagccgcccatcccgtgatctacgaccacgattttaaattacaagatttagcagtacgcgtttgatctcagatcgacgacccgcgtccatccaggccgaaatagtacaccattgatttaatctagatcgttgatttcttgatccacaaccatgacttcttcttctacctcccgac

SEQ ID NO: 952 - DNA, 352 bp, Zea Mays
agcccgccacgatggtcgagagtgcttgcaactcctcttgcagccactcgaggcaccgaaggcccgcctctcggtcaggcacctcgaagtcggcggtccacgcacccagctcgcagtacgaatccacgagctgtttgcgcgttcgctcaacttccacgcgagtagaggcctcggccctctccacgcgggcctgctgagcgttgaaccgtgcctcccactcctcggcgcgctggcttgcaaggctttcttccgccctcgccaatttggcctccgcctgtgccgactgcgccttggtgatggcctcattggcctcctttctttcctccaccagctggcgccggaggtcagtcct

SEQ ID NO: 953 - DNA, 353 bp, Zea Mays
cagcaggcggcgggactgctgtgtctgctggcaaatagtgcgcccatgccaggcagcgcactgttatcccttctacaagaagcttcccctgcacaccgaagatacacagatctcggacgacaggacacaagggattgccccggcagcaaatatttatagtcccaagtgttatattctctatgtccctgggcccacatgtcggggctcagtacctttgtgcatgccccccttcagctataaaaggggaggcatgcgacgttataagacagatccaagctaggacccaactctaggcagacactcttaagttcatacaagctcccaagcaatacatcacacagtggagtagggta

SEQ ID NO: 954 - DNA, 353 bp, Zea Mays
ggcgccccgaggtgggcgatcgacgacgatgctcccgaggtgggtgggaaagcggcggcggcactccccttagaccgagtgatggcgtcactcccgaggcggacgggcaagtggtgagaacgctcccgaagcgggcgagcggcggcagcgcaccctaggcgtggaggcgacggcggttgcgtgaggtgaggtaggcttcggcagcagctgtggcggccacaagagacgcgggtggctccaggagtcgcgcgaggcatggtcatctctggcaatggcagcctcatgaggcatgggtggtttggcgtccttcgatgaccaactcatctgatccggtggccacagtagcatcctcc

SEQ ID NO: 955 - DNA, 354 bp, Zea Mays
acgtggctgtagaaaaggagggaggtggcctcagaagtgttagacaaagggaagaaatttaaagaaaactcttcggaagaagcagacttcgacctacggcacctaggtggccagcagctttccgaagaagatatggcagagttgaaggattttgctatcaattgtggctaccagccagggtccatgctctttggtggggtggacgaagaagttataggatgcatccacgatcgtgccggtgcaaaaattataggcaccctgtcaaagagcattagattcccgaagcttgaaagggatatcagttgttacaggtgccagcatatcatagggagcctattttattccagctttaaa

SEQ ID NO: 956 - DNA, 354 bp, Zea Mays
attcaatttgtggtttaaatatctcgtcaaaacaatttgcttgctgagatgtatcatctcactcttgcattactcaatgcaggtacttgattcatgttgggaatgagggaagtagcagcatgttcaccttcactattataataacgatgcccagttgcagccatgatttaattagaaactcgatgacaaatgatgtttgttttttcctagtcgtgtgcactggttaattcagctcatgtcgttatgtttaactttcctttgctagcagattaataatgcttagtatgtttttttcatgatatatgtttatacactgttgcccctcgtttatgcaatctttcaaaagagatgctg

SEQ ID NO: 957 - DNA, 354 bp, Zea Mays
ctctcgccggcgaacccagatccggtagttcgagcgcccaaaaccccatgcaagcggatctatacgttgcggaatgtaatgcgaatctacaggaaggtatctcaccggcaatcggtgcaccgagagagtctacccgcggcgcatggcggaatcgccgtcgacgatgaaatccgtcgacgccggtggccaacccagagcaatacggacgcgaccgcccttccccgacttagaggagctcgttgatgttgcaccgagagtgcggtcgacggcaagccgggatctcctgcggcggatcttcttcctctcgacgatgatggcggcgccggttagctatgtaggcacagacgatatgga

SEQ ID NO: 958 - DNA, 355 bp, Zea Mays
caaattctctcgccgagtctcgtgctatggacgattcgcacaggagccaccagacgggccgcgcagtccgccaaggtcgacctcgccacatcgtccgccagattcaccctcgacacgccgtccactgagctcaccacgatcgagctgaaggaggacgcgcgggccgtgccaacagtcgtgctcagcgaggatgtgctagccaaagtcgtgctcgctagggccgcctcgccggcactccctgggacagccatggctgccgcgttgagcaccgttctggcgtagccgcataggtcgcgttggccagtaccgcctcgcctgctctccctgtgaggatcgagtttattggatcttcggt

SEQ ID NO: 959 - DNA, 355 bp, Zea Mays
gtgcaatctatgcttaggtaaagaagaaggcgtcgaggcggatctccaggagttccaggacttcgacgagttcgagggttaggctagcgacctcccccagtcagctgcttgtggtgggtttatttacgttggctacgtttctattttgtgcactttgattcatattatgtaaatgactctagtctttaatattatcactcactctttattgttattcgaagcattgtgctatgatgagtcatttatgtaatcactatgtacgtgagttctgatcctggcaagtacatggttcgcattcggtttaccttccaaaaccgggtgtgacattgacagctgtacataagttattttgaaa

SEQ ID NO: 960 - DNA, 355 bp, Zea Mays
cggaagtgagctgggacggtgacggcggtggtgatgggacgggcctgtgggggtgcgatgcgtgcgagagggacggacaaccaaaaaaaagttggagtcgagtcgagtcgagggggagggggtgtcgccgtgccgggtggtggccaggtgggtgggctcaggtcgccgtcgaggtggaattgcgcgtggggccgaccgaccaagcgtgccaccgggggtccggtccgggtcgagtcaggttgggctagtcgctttggcctttgggtttggggttggcgctagaaatccaatgggcgccatggctgcttcccccttttccggtggcgcgagcgcgacgacgcagcgtggacttccg

SEQ ID NO: 961 - DNA, 356 bp, Zea Mays
aagaggggaagcagacagcagtgtatttaatctcacgctctgttgattgcgctttgagtcttgcagtccacaaatctgcctatccctttggtggtctgggtacacgtgagatgtgattgctgcagtcgaccagctggttcttagatacaccctctacagagaaagctactgtctgtatgctaagccatgctacttgtatatgtaggcactagaagatggggtcaatggtataagtctctctctatttgctcctccttcagtttcatctgggccagcacctttcctcgatttgctcgaggcacgcacagctgctccttgccaccaaaaggctggagtgtcagttgttctgttcaggc

SEQ ID NO: 962 - DNA, 357 bp, Zea Mays
cgatggagaagagaaagggcctcgctcggcgttgggcggtggaactcccagatgcctcctcctcccctgtggccctgtcgttcttaacccgtctggttttgctagatcagcgcccatgggtcttcttcctttgatactgtcacaaccttccaaagtattctcattgactttgaaagatcagcttaaggtgattattacatgcctatcatgtattctgcagctaaagtaatacctggctaattattcacctttttatgcctgccatctagcttcaaacagcggcataaggcaataatgccaattggctacttattcacctttttagcagttttgttgccacagaagatcagccaaacc

SEQ ID NO: 963 - DNA, 358 bp, Zea Mays
aggcgagtgtggcgtcttccacgggcggccctaaccaactcctgaagactacaaattgagggcctccttgtcctcgctcgcgccagcactgttcaccggaatccctgtgcccatggtgagaacatagtgagagagagagcgaggcgggaggcgccgccatggggcctgcatacgcgtcgaactcaggaccacggcttggggccagggtgcttcgccatgctgcgcgagactcgaccgtggccttgcttgggcgatgccgcgctctagactaccggaattgctcgccagggcctctacgccgccgcgggcctgccctcctttcgtggaccggccccatcacgacgccttcgccggtgag

SEQ ID NO: 964 - DNA, 358 bp, Zea Mays
cgccgtcaacgagtcgggtgttttgggaatgcagcccaaatcgggcggtaaactccgtccaaggctaaatacaggcgagagaccgatagcgaacaagtaccgtgagggaaagatgaaaaggactttgaaaagagagtcaaagagtgcttgaaattgcagggagggaagcggatgggggctggcgacgtgccccggccgtatgcggaacgactcctgttggtccgcctatcggctcggggcgtggaccgttgtcgcccgcgccagcggccaaagcccgggggcccaggcgcccccggcagccatcgtcgacgcggacggtatccgcgcgcctcttgcgcgcccctcggggcgctgcgcc

SEQ ID NO: 965 - DNA, 358 bp, Zea Mays
gacagtgtccggtgtgccaggctggccggcggtgaaccgactgctctcgggaaaacgtagagacgtacgactataattcaccggacagtacggtggtgcaccggactgtccggtgagccaatggtcgccagcgccaacggtcggctgcgcaatccgcgggcgacgcgtggcctgcaacaatggtcggttgggcacaatggactgtccggtgtgcaccagacagtgttcggtgcgccaaccgaccccaaggaccaacagtcagatgcgccagacatggaaggagatcacgcaccggacagctacagtgactgtccggtggtgcaccgaactatccggtgcaccacccgacagaaggcaa

SEQ ID NO: 966 - DNA, 358 bp, Zea Mays
gtccatcccggcctcagcccgcaccttctcgctcgcgccccgcctgccctaaatcgtcccaatcccgccgcgccgccgccgcactcgcgccccgccgttctctcatgcaagctcggcgagctccgtcgcgcgcgcccgccgttctctcgcgccccgtggccgccgttctctcacgcaagctcggtgagctccgtcgcgcgtgcccgccgttctctcacgcaagctcggcgagctccgacgcgcgcgcccgccgtccgtccacgccaccctcgttccccgcagtgagcctccccgtctcccttcttccacgcctgtaaatcttattcgtgagaaccctaggtacacaaagatgacgccc

SEQ ID NO: 967 - DNA, 358 bp, Zea Mays
gccgcctccgacaccgggcggaggaggatcgagctggagctggatgagggggtaactacacggaaccttcaccaacccgttcgactgccccagcgataggctacagtccggctgcagcggctgtccgtgaagccataggccatagcatgcactgattattgtactactactagtactagtagtagtaatatgtatttgctatatctgggttattgacccgactgtctatttgtgacgtgcacgatgctggtagtgccccacattggactgccacagccagccactgctgactgtgctttgcttcgcgcaagttgcgacgctctggtgctaggccgatagacaacggtgcttcaaaaac

SEQ ID NO: 968 - DNA, 359 bp, Zea Mays
cacgaatgaaccagcttatgcctacatcatatttcaaaatatgaacaccaaaagtcaataacgaaagctaattatttggttctttaaacagtgtgtgcaacatgccgctacttcccactccccttcatgagcatcaagcacctgcattgagtaatgcaagagtgagatgaaacatctcagtaagcaaattgttttgacgatatatttaaaccacaaattgtattaatcaacattttaaaggaatcacaattaagatcagaaaatacgtgtagatatagaacccaatagtcctaatataaccaataccatctcatttcttcgaacaagcacaataggttgtataacacttccctgcgtca

SEQ ID NO: 969 - DNA, 359 bp, Zea Mays
gtgtatcttgcgaattgcactaggcctgatattacatttgcagtgagtttgctagctagacataatgtgaaccaaactagaagacattagacattcattaaggctttattaagataccttaaagatgctcaagatcttagatagatttctagaagaatcagaaccaaattttggtggtctatatagatgttgaatatatgtcagatccctataatgctagatcctagactagatttgtgtttctctgtaatggtattgctatatcctagagatcaagcaaacatacactagtagctatgtctactaaccactcaaagataattgcatttgtcggggaccgtaattaggggtacccccga

SEQ ID NO: 970 - DNA, 359 bp, Zea Mays
gaatctcttaatgcatcttccaccctgtatggctcaatagatgacacaaaagagtaatgttcacaaaaatgagcgacacgagatcgagtgattacccccttatgaatatcaccgaggatggagttcacggggtgatctctttgaatcgcttgatggactcttgggtgaggtggcctttgaccctgttcttcttgatcattatcatctccccctttaccattgtcctcctcttgaggtggctcatctcttgatcttcttcttcattatcttgagcctgttcctcatcttgggttggtggagatgcttgcatggaagatgacagttgatcttgtgcttgtggaggctcttcggattcctta

SEQ ID NO: 971 - DNA, 359 bp, Zea Mays
ccgagatttacaaagagggggaacaagcgagcctgctggcgacattctcaccggcaatcgggtggcacagagaccggaccacggcgaggcgcgggtgtgaggccgatgcacacaccgacgagcgatttcggttgcctttctcccttggtgagaccccaagcacgcgcagagcttcccagggaaacccacatgacccgctcgaggttcccatgttgccgtagccacaaatcactgacagcgaccacctctgcccagttcttgcaaccacggcggccctcggcttccactcactctctctctctccgctctctccctcatagttctgttcggccaccgatgtagactctcctgaagctggg

SEQ ID NO: 972 - DNA, 359 bp, Zea Mays
ccgcgcttgctcgctcgagaggtcgcggcggccctcgcccacgcactcgtccgcagtagccgcgcgcggcatggcctggccgcggcggtagccgtcgcccgcgcgccttctcatgtggcggcagggcggcttgcatgtctgctcgaggcgcgatggcggcggcgcgacctgcgcgtttgcttgcgtaggagcgacagtggctgggtggcctgccctcgtgcgttcgtcggctcttgcgtgctcacgactgtggcggcagtgtgttttgcggcgtggtcacggcggcaatgctgtctgcagggcggctcggttcgcgtctgctcacagtggcttggcttgctcgcgcctgtcaggagctg

SEQ ID NO: 973 - DNA, 360 bp, Zea Mays
ccagtaaagcgattatggcgatcgcgccaacaatgattaatatcagacgcaaatcctgcatcattatattctctgttgttctaacaccttgccaccacggcaaacatttactcactaagagtatttgccgattacctcaagtgcaagtgcactattaactttcacagcacaaagatagatgaaatcgtgctttttgctgttttttcgaacatatcctaactgtccattgcgcaattacccggtaaaatacgcagaattttcctgggattggtcaaaaggagctcatcctgattatggtttcatcattcacatctgccccacgcagcggtttttactattttgcgcaaggctggaagctcg

SEQ ID NO: 974 - DNA, 360 bp, Zea Mays
gcacgggctgcttctgccccgccgcgccgccgcgcttgcgcccgccgtccagcgccgccgccgcgccgtactcgggcgccgcggggtgcgcggtcacgcagctcgacagcgacccggagctcatggacagggccagcgcgtggtggtgccccgcggctgcggcggcggacagcacgccgctctcggcgcgcgccgccgccacccagctcgccatggccgtcgcggcggccgcctcgtcgtccgcggacaccagggacgcggccgaggttccgccgtacaggtcgccgcacggctgcaggaacccgtgctggtgccccggaccgccgccgccgccgtagtagtagaagctggaggcggcgg

SEQ ID NO: 975 - DNA, 360 bp, Zea Mays
tctgtcagggcccaagagggtccgctatggttagataaagataacgctagtttgggataagatgagaattagagataagattagatctagtgtttagaggtcaaataaccctctctgtataaggagaaggattgtatcaattgaagggaagcaagagattagaaggaaatcccttctctcttgcaggtcgtgggcaaagccatgtggctgacctccccagcgtcccatccttactcgttgtgccacgtccccggtaggatccgcaacatatcaacccaccagatcctgatccctaacaatctggtatcggagacctcgccgatcctagtgttactaaccttgggttgggattgacaattg

SEQ ID NO: 976 - DNA, 361 bp, Zea Mays
gtgtattcatgtggtgtgttctgggactaataacagtaattacagaagaatgcagggcgtgagggaaattcccataccatattagtagcgccgaccagtgccttgttgcgccgaccacaatcctggcttggaaggagaggaactccagtctgggcgtcacttgttgcgccgaccagtgccttgttgcgtcgtccagtacccaccagcagctcgcaatccttgttgcgcttgattcactcccagaacttacaaacgcgtggaggatttgccgcaaggagaggaactccagtttggtggccttgatatatatggtttatggtggcgtgtatggaggatgggtaggggtttctcgatggtaggg

SEQ ID NO: 977 - DNA, 361 bp, Zea Mays
agggtttgcaaggcccttagacaccaccgaagtgaatggctagggatccactatgaggcctttacaaagttccactagcttctgaaaacccgctacagtttatgggaaaagcacttgcaagaatcccccgtctgtccgccatcgcagcaaaatcaacctgagaacctccctggatgcaactcccctactacccttgcccctttcgggtaaggtagtcttccactagctttcctaattagttagccaaggggtcccattcctcccttgtggtggcatgttttctcaggtggttctccatgttcccattaacataatgatcttatcatgaacataattaacataacagaataataggaacatg

SEQ ID NO: 978 - DNA, 362 bp, Zea Mays
ggcggcgataatgtgtcttactgttgttacggtcgctagctgctagctcgtgcaggcagctagagatcccttggtagctttgcagcggacgattttacgggaatccaatcaagggcggcgttcgttggcagtaaataattgaagtgcttggacatagcacatctcattgtccgtcattgctagatgcggactttgcgagtgcttcagcttagctgtggagatggaaacgatgtgagcatttgcaactgctcgttcttttgttgcgtttgttgttctagtttgcgtatgtatttacgtatgcatgtgtatcttctttggaattgtgtatgtatcttctttggaattgtgtatgtatctagtat

SEQ ID NO: 979 - DNA, 362 bp, Zea Mays
cactactctactacttacactacgctatactaatactactctaatctactactgcttagtactacttactattactaccactatctatactaatatctaaacaaacagcattatgccactggccttgccgttgccgccgtcgcccttgccgtcgttgtcgtcgtccttgctgccgtcgccgttgcccttgccgccgtcgcccttgtcgtcactgtagcccttgccgtcaccgtcgtcgttaccaccgtcgccctcgccgtcaccgtcgccatcgcccttgccgtcgtcgtcgccgccgcccttgccgttatcgtcgccgctgctgccgtcatcctccccgccgtcacctttgctgccgctct

SEQ ID NO: 980 - DNA, 363 bp, Zea Mays
ctcattctgcaatccaactgcatgggtgtgtctatcattaaaccatgccacaagcttgtaaaaggtaaatgttactatagcagtgatcgacataccacgaatgcccaacaacaatttgttgaatgactcgaccatgttactacactggaacccatatctccatccacctaagtcgtgagttctcgtctacttctccaaatccgacataaatccagtcaaccaatctctgccttcggcatttattgcgactttgagcttttctaacttttctctaaagaacttgtcttccagctggcgacatgtctcctggaaaagctcaaagttatccttgacaccatccttacgcagaagattctcagcaag

SEQ ID NO: 981 - DNA, 363 bp, Zea Mays
cacgctactcctcctggtcctctcctgcagaagcaataaccctctcgaccgtctatcccggtggcagggatgaaggccaactcacaccagcaacaaatcatcctaaagagtacctgcaaaaaattgtgccacaagcaaggctgagtatactaatactcagctagacttacccggtgtgaggagtctactcctctacctctagacatgcagttgtctggctgtggggtttggttgccaaaagcactagctgagtctaaaaaaatcaagttttagctttgtcaagtttaagtgtgactctcttaagactaaatgtgtactatctactcatacatggtatcaaacatatttagcagtcaacatctt

SEQ ID NO: 982 - DNA, 364 bp, Zea Mays
tgtggatgtgcaccgtgctgcagggaggagtcgaggaagtgcctggctcgcgtggtttttgttcctggttctgatggcttcgtagcacgcgatccggttcagttgcaatcggtagcaatgtcgggctcgtcggccgcagaggaggacatagtgcagcacctatcgtccaatttcaacccgtcttcgtcgatgctcgccaagctcgaggctcggatgaccggcaaggcagtctccgcgccatcgtcaccgccgcaggcaggattcgtttagcacagcatcgcgattttcggtaacaacccctcccatagattcgctttgagcccagctttgttttgatgtgttccgcttagagcaccgggcaccg

SEQ ID NO: 983 - DNA, 365 bp, Zea Mays
cacacaataatctttgctcaaacgagcgagtaatacaaactttcttgtggtcttccacaagatttggagactcacaagagacacctagtcgtctaggagctagaagctccaagagttatgaatccacaaagaactcgatgtagtaccaaagctcgaatgaagaagaagagcaagagagatttagagatgaagcacaaaaccgcactctcaagctcactcaaagatttctctccaaagatttgaaattggagaggcaagagatgtgtgtgatagagagggaggtgtttcttgggttagaaatggagttcaaatcgtgctcactgctttagggagagaggtaggaggtagtatatataggtggagct

SEQ ID NO: 984 - DNA, 365 bp, Zea Mays
accccgtctaccgatttggttcgaatcgcttttagctcagccaatataagaagatcagacggccaaaccctggacggtctagctagttccacgcgacccatcccatcgtccgccgagccaccgatgcgacgccaggtcttcgcgcgaggcgcgagcgtgactagcctccgagttctgtcgccccgggctacgccaatttccatcagttggggcgtgggctggcggcgagcggcggcgtcgaggctcgcctgggcctccgtgcactaggggcggttggacgcagttctccacacggcggcccgacgcggcttggccgctcgtgcgggtggccacccgacgaccacaggggaggtggggaaggggtg

SEQ ID NO: 985 - DNA, 365 bp, Zea Mays
aaaaatactcgaccacatctgttcttctctaaaccatactctgtattcactattcagagacagagagtgagctgttcttgaggctcgccagtgaggacagcatttggcatcagagtcgtgttcgtacttcgggagggagatgtcactgtcaccgcaacgacgagggcgctcaccaccacgacggccacggaacagggaggtcgtcgtcgagcgcatcgtcgagcaggttgcgacggcaggaccgacaacctacccgatgctcacgaggacgaactacagcgactgggtgttgctgatgaaggtcaagatgcaggcatgtgagctctgggaagccatcaaccccggcgaggttgacgagcctctgg

SEQ ID NO: 986 - DNA, 366 bp, Zea Mays
tatgctttgactgaatcaatgaagtgaaaatttttgatgaacacattgctgactccctctagcaatccctaaagagaatgactacaaataacatcaaaacaaacaaaaatgaacattagcaaccccaaagaagtaagctaacctggagcagttcaagtgatagcagccttgtcttggtagcaacctcatcactttcttctttcatgctcatctaaaaggatgacaaaacgcaggaagtatataattgctactttctcatagctcccactaaagtaacattactcaagcaaccaaccttgcagagagttcgaaagagcaatagtgcatcacgctgtattatattcacagtgtccaggtcaattccac

SEQ ID NO: 987 - DNA, 366 bp, Zea Mays
gtcgcgtctgcagggcggggtagcgcatgggctagggagaaacacaccatgtcatggaggctggggttcgtcgtaggggctgcacccagccatggccacggttagacgccgggatcctcacctcagagctcgacgaagatggcgagggcgtgactcgacagggcgcggacgacggcgttggcgagcagccctgcgcgaacaacaaggtgcaccggtgacgcgtgcacaatggcgttgatgtgcgcggcggggcggtggggcaacgaggctgcgcgtgcatgtgggagagaagagcggggctggtttggaggagggtcgagcgggtgcgctggcgtttgaaggggcgtcaaggataggcggttgccg

SEQ ID NO: 988 - DNA, 366 bp, Zea Mays
tatattagtaataccattccaggttccaaggttctcaatccgtaagaaccgaacgaggccttagccaatggcggatccaccaccaccagccaccataggcggtggtctaggctgccatgccgacgataataaatagaagcaggcaggtactgtacctagaagcaagtaagcagcatagtcgtgttataatctatattgtctaggatcgattcctaagtctctataataccaatccgtaactgaaaataaaaccttgatgatatgtagatctgatctactgatctactcagagaaacgggaaaacacaccttgttgttgatgttgctatcttcataccgttgctctgcagagaagcaacagacatcg

SEQ ID NO: 989 - DNA, 366 bp, Zea Mays
caataattgaattaatttcattaagatgtgactgcatagatgtaccttttgacatgcgaatagtgtaaagatactccttgagacgtggcttgttttcaagactattggtcatatacagctcctccaatttcttccacaatgttgcagcggatttttcatgcattacttcacacagaacatcaaaagacaaactcagttgtatgatggacaaagctctctcatcaatatattgccacttatcatgagtcatgtcaacgaccgtctgcagcgcattttgaacaaccaactgggtaagaacaaccttcatctgactctaccaaatagcaaaactaattttgccatcaaactctggaatatcaaatttag

SEQ ID NO: 990 - DNA, 367 bp, Zea Mays
ccagaatatttcctcacgggggttatagcgtgtcattacatcatgctttattacagacgtggcccgacccgctatgcccacacggcggcctgcgggcggagccctataatatgggccgaattgtacacagacctctttttacatggatggaggtcaagacgtagggtcttcgaagtcttgatcatccgagccccgaagcctttaatggtcttcgctccggctcaccggggcgaagggagcgcttgagccttcgcatgggcgtcgtcctcgggcccggcttgcagggctcatcttcggggccttcagtctttgatatgttgatgtgggaatcagcgagcgagggggacacattcgcctttgtcccaac

SEQ ID NO: 991 - DNA, 367 bp, Zea Mays
ctgatttcccttaattcctcacgaaaaaacacagaaactgctagactactgctgttcacccaccacctaaaattctggacaaccccctctacccaatcgcaaacgcaacctctaatcaattaaattgcagcgcaaatgaacaaggaatgaacacaaaaatcaccttggattctccccctttccttcctcccttcttccctccaccaaaacgattgaagactcgcaccacgacgacgatgatccgagcggcaaggattggcaccttgggaggaggggattggggggggggcggctagggtttggtggctgcaaaaattgagagaggaagagatgggcaggggggcggcagccaaggggaggaggagaa

SEQ ID NO: 992 - DNA, 367 bp, Zea Mays
gtggagcgcggctaggcagtgcttgtcccagagaatgcgcctcgaacctgcccgtccacctgtgcctctgttgagacagcacccgggcggcgaacgctcccttctgcggcttagggcaggtggcggcgaccgtgtacccttgggcggggaaagggcaagccggtcggggtcagacttgcacgccgacaggggctacgcggctaggtcgggtgggggctcggggtggccgggcggttcggcgggtgcgcaggtgcggggcaggggctggatggcagcttctggcggctgctgaactcctggtggcgcggcttggggagaggaggtggagagaggtgggcggtagagagagaaaggggagggagaagga

SEQ ID NO: 993 - DNA, 367 bp, Zea Mays
agcgtggagatcaacggtccccgtgccatcttccccagcccgacgtgttgagcacggtggcgcctacctagccgcggcggcgccattgccacaacccccaatcccgcaacttcgcacatgaaactccaatcaggcgacaccacacatataagataggaaggcgaacatgatggtggcatcctcaccgtgattagcgcgacatagcaccctacccaccgtgcgcggtggagcccaaagctcggcgagaaattccagtcgccctggtgctcgattcttctgaccacgtgcgcgagtatcttccccacgctctatgctttcccctggcctatcccacggggtcgaatcgacgatcaaacggattctcgcc

SEQ ID NO: 994 - DNA, 367 bp, Zea Mays
tgccgggtctagcgggggattacgggcaccaaggcgagagagcggcggtagcctgccgacgggtgcaacaggcaacaaccgtgtgggtgaggtctctaggaggcagaggcgcaggcaaaaccgcagcccgcagagttggagaggaccgaagaccgcgaagatgagagcacatatgagggacaaccggaaaaggacatcggcgttccagctgggaaggtagccacaaacggcagggaacgacgaggagcgtaggaaaggcgttgtgatgatctaggaagctcgatcagctgcaccagatggatactcgcttgactaacgcatgttggggcgttgtgatgatctcgagcgacggatcgacgaatccgag

SEQ ID NO: 995 - DNA, 367 bp, Zea Mays
gctcaggggtcatgggtggtgaatatatagttacagaaacctatctaggcatgctcagggatcagacgaggggatagattcccgcggactcagtgttcgagttgttatgagggatacaacgagttcgttaggattcaaccgaaaatcccatggatttcggtgcggttacaatgccagactgttctcgcttgattcgggaagacgaagctacaacattgggcccatctatcatccacggaagctgaacgtgtaagcgcagcgccgatcggctacccaagtgggcccgcatgtcggagccagattagatagctaggttgaggtcagggagttcggcctatgcgcaagggagttacctaggacagagaag

SEQ ID NO: 996 - DNA, 368 bp, Zea Mays
gcgaattgatctagagttttcttaccggctatcgtgaggtagtcgcggccgaccacgagcagcggcggacaccgagcgccgacgtggaatttcggtgtcgccctaagcccctcctccaatccgggtcttcggacaccaccgtaaagacccgcaaaagtttttccggtcgacactgaggtcaaccacggcgaccaaggtggggattgtcgacgacggccgcggcggcaatttctctcgccgcgcgcaagctttctggtgacgacgcaaagggaagagtcgaggggaaaagtgaggagggtcctcagcccgcatttattcccgcagtccggttcaaaggaaggagggaacgagattgcgctatgattccg

SEQ ID NO: 997 - DNA, 368 bp, Zea Mays
aagcattctaagactcccagactccgcctccacgcatttgattcgttgtgttagtgatttgagctccgtgttcgagttgtgaactccctgtgctgtattttgagctgaagtcttggctagtgtgcgtgtgtgctgctgattcgagtcttgtgtgcgttgctttccctcccttactcttgcgtttctcgttatcaaaactttgtaaggacgagatgctctaacttgtggagattcctcgcaaacgggaaaagatctcaaaggaaaagaccgtggtattcaagttgatcatcgaatcacttaaaaggggttgagtgcaaccctcgtccattgggacgccacaacatggaagtaggcaagtgttgccgaac

SEQ ID NO: 998 - DNA, 369 bp, Zea Mays
aatttcaaagactcgtttttgcagaaaagcttactagtagtggatccttatgccaaacttttacttcacaaattaagtatttttcctgaatctagatttgcctgatctagagcattcacttgtcctacactaacttcattttatccactttagtttcacttgttatctacgctgaaggtcgaagatccagtcttcatatccgagaagttcggcgatccgaatcgattaatacccagctggggatctccaaccacacgacatatgtagcacttaacccttgcatatgtcaactcgcccacgggtttctcaagaccagaacgggtccccgccaaccgagagctcagtaccccaccatccagcctcttgcca

SEQ ID NO: 999 - DNA, 369 bp, Zea Mays
tcttccttccaaagcggagattctccgatgtgagagcaatggcgatctctatccactccgtcttccccaccagcatgctctcactgcatcctcgatggcgtcgttatggcatcagcgactgggtcatcctggacaaccagtcacctcccatattttaaaatccctgtcttttcaatgtaataaagctgatgctcattcctgctcctcttgtcgattgggcaaacatactagattaccttttcgtgtttctgaatcacgttcatttttccctttccaactagttcattcagacgtctggacatctccttgttatagttattccggatataaatattatgttatttttctggatgattatacacattatct

SEQ ID NO: 1000 - DNA, 369 bp, Zea Mays
ggcctaggcaaccccatctctcgattaaatcctctcccaatttcaagttcaccacattcaagcgatttcatgagattctcaactctagcatctcgaagcataccatgatgcttacaagaaactccaatgatattcaataagagttacttgatcaaaaaaccacacacaatcattatttcccttggaaacaacaacaagaactagttggagttgatgtgcaaaacaatggacataataagcagaaggtgactcttgcatgatcaatgttttcaatcctttaatatcacctctcatgttgctagccccatcataaccttgtccacgaattcatgtcaaagtcaagccatgactaacaagtaaagattcaat

SEQ ID NO: 1001 - DNA, 369 bp, Zea Mays
gcctcatcgtgagatagagagaagataaagggggagctgtcgctggtaatcttcaccgccgtgcgggccgcgacggttacacaaggaacttcaccaagatccaacgaaggggcgtgcgaatgattacgggcgcgtgattgagtgggtgtcgatgaatttctcgccgtcgtaccatgggtgtcgtggatccgctccacactgcgggtcggcctcaccacaacgccgacaatggtgagatttcttgctaagtgttcgccatcacgtagatcacgtcaggttcaagggttgcaagcctaggcaaagtttcgcactcgccgatgatggcctccaccacgggggcttggcggcgctgcccaaagtcggttgggg

SEQ ID NO: 1002 - DNA, 369 bp, Zea Mays
gaaaaaacaacttgtttattgtattttatggagattgtcttacttacatacaattattacccaacaaagtggtcactaaatgtcaaaaccaactagataccaggtgactttatacctgatcaaggtcggaggtgaccaagcgacggggagagacaccgaaaccgtggagacttcgactcgatctccgaacgaccgcagaatcacaaccggagctaattcacacaatgcgaggcagccgtactgcaactcacaaggcacgaactagtggatcccagaggaatctcttcacaagtccaggagaacaaggaagaacaggggtagagtaaacactcagcaacttggctgcggtactcacttggattatcaaat

SEQ ID NO: 1003 - DNA, 369 bp, Zea Mays
acgaggtacgcacaaatttacataaatttctttacaatcatattacaaaattttctctagaatcttctgcagcaaagtctttcggaacatctgttaaagcttcagctcatcattctttagcttcatcatcctgtacatattaaaacgaaatgagaaaagcgcagagttcaaggagaaggtaaaagtaacaagtataagtttctcactggcttaaggtggcttcgagcttcgtcaccagccatttttcgcccgccgtttatccaaatctgagtcataaacctgtttcctatgcttcgagctaggctggggatgtcaatcaaatctgctggtgacaaactgaagtttggcctattaacaattttccggtgc

SEQ ID NO: 1004 - DNA, 369 bp, Zea Mays
ggcttatgctgtctgaggtgctccactaaatcttcttgtaattgatgatgaacttcattgtctcttatattcttgtgtatctcgataaattccataaggtcaggtgtcgcaaaatgagaaggttgaacattgtgttctagggaatcaaatcgttcttctggatcgacatctccctcatcttcaataatcatgttatgcatgattacacgggacttcattatgtatgccaatgcctccatgtcccataaacgagcaggtcctcgaacaatggcgaagcgagcttgtaggactccaaaggctcgttcaacatcctttcttactgcctcctgtgcttttgcaaaatatttattcttatttccttgtggttgt

SEQ ID NO: 1005 - DNA, 369 bp, Zea Mays
acaggggagtcgagtttctcacttttatattgtataagtcttttccatggaagtatttcttgacaattgtcttttgccaaagaatcgattcattttcaatcttccaccaccatttacaaagaaagcttatgtttaaagcttctagatttttaatacccaaacctccatttttctttgtgtgacaaactttgttccaatttaccaagtgatacttttttctccaccaccttgccaaagaaatcttcttcttttggcatctagctttttaatagtggtttttggaagaagatacatggacatatgataaataggtgaattagtcaagcaagcatcaataagggtaattctcccagccatgggatagacaat

SEQ ID NO: 1006 - DNA, 370 bp, Zea Mays
tcttgataagctttaccttgattcccaaaagccagcatatgcttgagagtctttttcctttgacggttaagacttgcgaaagtacattctatactcagggttttcgaacccatgttgttgtaggtgatgaaacaactgagttctgctgtttttgctcaaaggtggtgcccaagcaggaggaagaacactaaacttatttggggaggatgttttgcctcctgttaatgtaataatcagttgcgcactcgaacacccggttatgtaataagtactctttctatatttttatgtgaatgtaaattatattattgtaatcctttccgctcattctctactccgattatgtgtaatgtctgcatgatgggttaag

SEQ ID NO: 1007 - DNA, 370 bp, Zea Mays
gggaaactagcgttcgccatggtggagagagaaataatgtggctgcattgccgtcgtactggcagaacgaatcgagagagagagtggaagcgcagccgctgtcgtggtttccgaccgcaacttcgtctggtgctggggggtctgcgcgcatctccgtgtggagttcttggactgagggcggtctgggcttgtcgaatttctcatcggcatgccaccgtggccgctgttccaccgtatcgcgtcgacgacctcttcctcatcaccaccgacggtgagaacacctctgtatgactcgccttcatctctgctccgtctactgcccctaggagttggggattcgcgctcagatcggcgggtggttgtgcgccgg

SEQ ID NO: 1008 - DNA, 370 bp, Zea Mays
ccggacgctccagattaaatcaagtattagaccgaaccggtacgcagtcgcggccatcagatcgacgatcaatgacccagttttaatgagacgcgatctacaccacaccgtccattgcccgatttgacgcccaggatcacaggcatcgaagaggtatctttgaccagatctgaactatccatctacggatcgaaggccagaccgttgtcttccccagccaacaccagacccagcgacgcaatgccctgcgatggtgaacctcgcagagaccgacaattcagcccaaaccgcgactattcttgattctgtcaggtcccaaacataactcgatgcatggcgaatcgatcggatcttcctatactcgagcgga

SEQ ID NO: 1009 - DNA, 370 bp, Zea Mays
ttaatattgattttgttactcctattacacagttagtttcagtttatgtacctcttgttagcaacaatcactccattactcaagatagacctagaagtaatattgttttgccacatcgatatcgtgacactaatagtatggctcattatgctctcattgctgctcaagaaactaatgttgcatttgaaccttcttattcgaaagctatctcatgtgatgattcatccaagtggttagttgctatgaatgatgagtttgagagccttcaaaagaatggtacatggaaattggttgagctccctgaaggtaaaaaaccattaaagtgcaagtggatttatgagaagaaggaaggtatatctggagttgaacc

SEQ ID NO: 1010 - DNA, 371 bp, Zea Mays
aggggctgcatcgacctcgctgggcgcgcagatgccggtccacagatgcccatggtgtcggcctcgctggggtgtgctaacgtccaagcgatggccttgcgagaccgcgcggaggctcgaatgaccctcccatggtgtctagattgaaggacaccactactagaaatttgaggtcgtattagtaccccatgaaaagaccacctcaaattacctcggtagctattaggaaggcagcagcggactttctccaaagcattagacgcatttagcagctactagccaatgaagttacctgcaccttagcacaagtattgatgtatagcctcaccgtacaaatgttgttcatagcatgagcacctcacaagccgtca

SEQ ID NO: 1011 - DNA, 372 bp, Zea Mays
ccgccccccctgcccatctcctcctctctcaattcttgcagccaccaaaccctagccgccccccccctctcaattccctcctcccaaggtgccaatccttgccgttcggatcatcgtcgtcgtggtgcgagtcttcaatcgttttggtggagggaagaagggaggaaggaaagggggagaatccaaggtgatttttgtgttcatcccttgttcatttgcgctgcaatttaattgattagaggttgcgtttgcgattggggtagaggggggctgtccagaattttaggtggtgggtgaacaacagtagtctagcagtttctgtgtttttttcgtgaggaattaagggaaatcagtttggggatcatgtagaac

SEQ ID NO: 1012 - DNA, 373 bp, Zea Mays
cagctggtgtgatgtcgtggccgtcggaggagcaatggagcctggcggagggacagctgtcggagcggttgagtccttgctgacgtcctcttgcttccataagggggctgagagccgccgccgtcacagggtacgcggggcgccatcattgcctatccaacggagctagccagatgggacgccggtctcgttccctgcggcccgagttagctcggggtagggtgatgatggcgcctcctgttgacgtggctggtctacgccctaggttgggcgatgtggaagctcctccgaggccgaggtcgagtctgtctttcgtggtcgaggtcgagtccgagcccctgggtcgggcgaggcgtagttcgtcgtcttctag

SEQ ID NO: 1013 - DNA, 374 bp, Zea Mays
cgcgacttcggaaacggtgtccacggcgatgccgatcccgcggcagagacccaaccacagcgaataattcccgtccagctgtggcctcgctcaccaagcttctcccccaagcgcgacccgagcacactcccgcacgtccgggcccaggttacgggtgccgagcggcgagtatggtgggattcaacggcgtggacttccgcgatccctccctggcagcggctgaaagaagcggggcacaggaagaggtacgaggagagggtcgggtccgcatttgaagcctgggcggtgtgggatcgtgggcagcggggatcccgcgcagtgcaacagcttttgccggggaagaagaacagtgccatccgacatgtgggcccgcg

SEQ ID NO: 1014 - DNA, 374 bp, Zea Mays
cgacaaacacgaggccccgaggactttgctcccgacagcccactacgttcagtgcactctgctcagaccggggtgaggactcgaacgaagcgaatggtgatcgttccccctcaacgtcatattataagacgtggtggtggagccggcctcaaagaccccaaggtgaaggcctctacaacttgagattgggaggcttcaagaagacatcagaggccaggtgatcccttaacatatagagcaggccaacctgtgtgcctctcctgtgtgtacaacgtttggtgtaattaaacttatgtcatggctattgtataattacctagttgtactgtatattctgagaaattagtaggcaaccaagggtatgaacgtacttt

SEQ ID NO: 1015 - DNA, 374 bp, Zea Mays
tgcaaatacactttttttagtagccacggctacctgatcgagctatctgaccaacgcttgcatcaccttccgatccaacggccgacgcttttcttttactatggtggcgttctcttcttaaatcaaccgacaacggacaagggacaagtaccatggatatgcatgcacatacaaggtgactgtatatggtgcttggtatgagttggattcagaacaaatcagaggtttgatcggacgtactttaactttgtcgaaacaaattaactgacgtgctttacaccaaaggcgtgcacaaaagtaaaatttcttttgtccttatcccctcactactacgtatcccgcaataaaaaaatatcggcatcagttcctcctcc

SEQ ID NO: 1016 - DNA, 375 bp, Zea Mays
tgacgacaacgatcctccgcaaccatagttgactaggagacaatggcatatatctttcacgaactcatcgtggcatccttcatgtcgtacatgttcttgacctacgaactcatcgcaggtagccctttatcttagtcgtgtgatcttgactggatgacctagattagatcatcaatcccctctactcggctactcccaagatgcggatctcaaaatcgacggcaccctatacacgctctcgggaccgtcagatctcagattggtgacaaagatccaaccgtctaaaccggtaccacacttctaatctccaccctccattcctcgatcaatagctagtgctacctcctctcatcaccgtcacgccttctcgtcgat

SEQ ID NO: 1017 - DNA, 376 bp, Zea Mays
aaatagtcataaaataaatttaatatcaaaatgaacatatgattcacataccgaatatgaatggtaacacttcaaacaacaacaacaataacgtgatgataaaattgcctcgaggttggatttacaactctattgccattcatgttttgaacatgttatgtttcactcagtcgttctaattatggtaggtttatgagcaacagatctctgaatccaaccaccacatgatgacaagagtaatatagatagttgtaccacaagttcttgtgttcaccagaccaggtcacttgttttctgaaaaacggagcgaaacagtggtcgtgagactggtatgttggccacccgactccagttgtaccataaatcaagcacaaca

SEQ ID NO: 1018 - DNA, 377 bp, Zea Mays
gacggggcgaggcaagcaatgcacggccatggcgaaagtcgaatgcgcagaatcgggcacggcgaatggcacagtggcgagggcatagcgggcgcgactgtacggggaagcggggacacggctgggcacgcgctcgcgcaggtcgaccgggatgctgccggcaagccgcgctggctggccacgccggcgagccatgggccgccgcgtagggtgtcgcactgccgcgggcgcgccacacctcgcgagggagagggagaggaaatgggaatggagagaggaatgataggggatcaccatgggcatacggagacgaatggcatgggttccacgcggcctccggcggacgacggttttgggcgagaggaagacgatgtggg

SEQ ID NO: 1019 - DNA, 377 bp, Zea Mays
gcgagatcctcttgccattggcttcgccgcaagataagtggacgaccccctctcctcttctcctcatttcaccaattagcgtcgtgcggagggactgagagaaatagagcgccggtgccaccgtcgctgcgcttgggttttgccgttattgcgacctcgaatccagccaacagagttcgccgcagcgcgtagagcaagattatatcggtgttgggcatggagtagtacccattgggtgtcaattcctcgtcggcgtcgaagcaaagccccatctgcatgttgcttgaattcacctccacccgggattcctgtcgagcaagtgatcgaggacccaggtgctcagcatgtggaaaattttgagcaggagctcgttgaag

SEQ ID NO: 1020 - DNA, 377 bp, Zea Mays
cgatggtgctggaggagccttcgtgtgcggaggaccgcctccgagctcttgacgctgagcacttcggacagtctacgaccattgacctcgtgtgcgggcatcttagggttccacggtcaggggaattgtccgcccagatctcccggatgacgctcatcgtcggatgcatttgtgaactggaggtccgtcctctcgatgaggactcgatcgagcgggattgagtacgatacaacgagctcaaagacctaggagcgttggtgggactcgtcacgctgtgcctaggtcacccagttttcacatttcctagagagaaaatgtagaggattaattttgtgctatttaaactcatacccttagttttgccaccttcctcattt

SEQ ID NO: 1021 - DNA, 377 bp, Zea Mays
ggtgatgcagacaggctggtaaaccaatcagggcaaaaataatcagggccgttagggtttgtttactttgcaaaataatcagggcaacctaggaggcgtctccttcagagccgttagagggtgtgttcgttagttcgagaaggtagcagccttggcagagattctgcgcttctccaccaagaaagctgaacatgatgctgctcaactcatcttgtgatgcatgcttatcttattgaatttgtgttaaataagcttgtgagtggatgatttctttggttagcattagtatgtttttggtcttgctcactccccgttgaatgtagcttttgattgtttgggaacgctatctgaaactgtgaacccatttctgaatttag

SEQ ID NO: 1022 - DNA, 378 bp, Zea Mays
atgaaaatagataccgaacctcttcagtacctctccaataatcccatgtagggggaacctcaatccagcctttagaaaacttttaaaaataacaatctcatccttctctggcttcggggtagtctcttctccaccgaagcgcaacaacttcttctgattttcagtaaaaaagcccgcttttaccatcttggacaaatcagccttcgaaacagtagatttcccgaagtccaagtggctcggcttgcttggcatggcgatgcggtaatcatcttcggaatcagtttcttcaatatcttcttcctctgcttcagcgattgtttgttctgcttgttttgcatcatcatgagggaccttttctgaagtcactagacccgatcg

SEQ ID NO: 1023 - DNA, 378 bp, Zea Mays
cgagcatgcatcctgattgttgcattgtgtttgttgtttgtgcacaaatatgcttctcttgcccttattctaataattggtggttgtaaacgaatatgcttttctcatctttatttcgataataaataattggaaaatgtttgaagtatgactgtcctataagcaaatttctagctttatttgaggtgtcctttagacatgtgtttatgtggtctgtggttcttcttagtttgaccgatagtgcaacttatgtttatttttgtgcctgtgtgccgatagaatgttggtggtatgtttgcataaactcaaaattaggccatgtcctcatctaggagccatgacccaaatcgatgtaaattctttgaaatttttccccag

SEQ ID NO: 1024 - DNA, 379 bp, Zea Mays
ctggcttattggcagcgctggctgatttgtctttgcactggagctgtggcggtcccctatcgatcggtgaagaactcgctaagggacagtgacaggtgcatgcttggcatctcattgctagatctaccagatcgggctgaaatgacctaacatcacattgccgttggagcggctcgagctcactgcccattgtcgtggaaggcggcggcggcctcgccgcgggagttgctacacgatcacggtgcgctgctgaccttcatcacgagcggccatgaccatgaccttgaggtgccggacccgctgctggtcgagtggctccgtgagaagggccagatattgatgttcagatcggagcttgcgccgctagagtgacgcccca

SEQ ID NO: 1025 - DNA, 380 bp, Zea Mays
gtgcggggtctattacagtgggccgaatcccacgtgggccggtcagacaggacgtgggatagagagatttcgtcgtaagccttcatcttgaagtgaggaggacgaagggtaggctgcaccggtcatcttgccttcgttggtgcagtgaggtgatgaaggcctcgagcgaagggtagcgtcttcaccttcgtcccaacagtagggcctcctcccatggcgaaagcgactctgcacgatgctcaactccatcgagaatttcttgtgaagccaagggtcttccacgtccaacgaaccacgaggagcttccatgtgtgctggtgatcttgcctgaccgtactccgaagaccgagatgcagcgcgctcgtggactgcttgttgcg

SEQ ID NO: 1026 - DNA, 380 bp, Zea Mays
ttctttggcaaaggtaatattttgttgaccaatggccactactttacagaaaaaagacaagtactctaaataatgtcctcccctattataaggataagcgcaaaaacaaacatgatcaagtagtcaatgcgaacgactctagatactccaccagcaagttggtggcttctgcatggcatctgtagtttatgtattgtctgaataaggcagcaggatatgcctctttccgagacatgtgccatgaaatcttattctctgccttgttagcctgaatgcaaagtgtagcagccaaaccaaaggtcgatcaacactattatataaaaaagttaggtgcccatgcgtcgctacgaattctattgtataggctctcctctcccgct

SEQ ID NO: 1027 - DNA, 381 bp, Zea Mays
cgcatttttctcaccgaaaccgtcgccggcgccattcatggcggtaatgaggccgccggacctccctctccctctcccggcgttctctctccctttctcctccccatgctctataaaacgaagctccgtgcccgactgcccgtggtgccggttccctgcaatcccgagctcgccctcacgctctcgtcctccctgctcgcgccgaccgccgccggtgccctgctcactgccgccggagcctcggagccgccacccggagacctcggcgccgtcctcatcgaccccgccgccgtccgacgtcgaccagcgctgccgaggacctcgacatcgcccttgccgacccctctgctcagtcgatcaccgtcgcccctcccgtgctcg

SEQ ID NO: 1028 - DNA, 381 bp, Zea Mays
cccggagccacactaagtctcgaacttctctcgtccccatttcctccccacatcccatcagtttctctcgtgccagtttctctcgccccggttctctctcgctcgtcgccgcgcagcattagtcgccgagagcgccgtccgcgtcgaatggtactcgccatcgaactccgtcatggtggtgatcgcaatctgtcttcaagcttcgagggatcaaagatcaagcgttggcgaccaagtgatccagttcttcgagttctgcgagattgaagatcctgagcatctgtttggtgaaggcaagtgtcctttgacctatctatgtcctatgcaagtctataattcactccccgcatttatatctttatacctaaggattgactagct

SEQ ID NO: 1029 - DNA, 383 bp, Zea Mays
gttcagtacaggtcatacttcagcataatataaagaccggatgtgatcaacaaaaggacccatctttattacatgcagcagaaatccatgccatacctgtcagcatggtccacagcaagaaagcaggaaaaatcattcatgcacgcccgcaataccatcttgtctcgggcacactagatctgaccgcacatgcacagtgcacttgtccaaacgagaaacggcttgcgtttagctcgagcctaaattccaggatttctacactaatgatcagaactttcccataatttcagtgcatgcatcccaatcctgtgcattcccccgttccagaacctcgagcgcgccacgaaatctcgcctaccgaagaccaaggtgagcaccatgaa

SEQ ID NO: 1030 - DNA, 383 bp, Zea Mays
cggatacatctcccaccgcgctcccttgtccctgccacacaggcccgagtcgccagtctctcgcccaaccacctcgccgccaatggaggactggcgcgtggaagttgggggttcgtggctcaatctcgggtcgccctgctcctacatgtagcgccctagccttgtgacgacccatcttccacctctgcgccccctccttcctaacgcatgaatctcgcaccgttcattctcagccgccatgttcgccgagagcaggagagagaattgtgggcgctgtcgacgtcaaaatcgcgcttcgccatcactccaatccccgtagcaggtgcgtgtcgaagggatgtgctcggtgttgaatcaagttggatcacctggactcatgggcg

SEQ ID NO: 1031 - DNA, 383 bp, Zea Mays
aaaaagaccaagaattgggttcaacaaagagagcaacggataaccgaaggcagccctggtctggcgcgccggactgtccggtgtgccaccggactgtgtccggtgcaccagggaacatcaagccaaactcttcaccttcgggaaaatccggagccgctccgctataattcatcggactgtccggtgtacaccggacagtgtccagtgatccaggaatgaagcgtccctggaactcgccagcttcgggaattcgctccgccataattcaccggacatgtgcggtgtgcaccggactgtccggtgagccagcggagcaacggctacctcgcgccaacggtcacctgcagaagcaataaatgcgcgccagagcgcgcagaagtcag

SEQ ID NO: 1032 - DNA, 383 bp, Zea Mays
caacgagtcgggttgtttgggaatgcagcccaaatcgggcggtaaacttcgtccaaggctaaatacaggcgagagaccgatagcgaacaagtaccgcgagggaaagatgaaaaggactttgaaaagagagtcaaagagtgcttgaaattgtcgggagggaagcggatgggggctggcgacacgccccggccgtatgcggaacggctcctgctggtccgccgatcggctcggggcgtggaccgttgtcgcccgcgccggcggccaaagcccgggggccctaggcgcccccggcagccgtcgtcggcgcggacggtatccgcgcgcctctggcgcgcccctcggggcgctgcgccgcaacggtctgcgagctccccatccgaccc

SEQ ID NO: 1033 - DNA, 385 bp, Zea Mays
gcggtaccaaggtgtccatcggcgtcgtacctgtgcctcagaccttcagtgccacggttggcacggtgcttctgggactctgcaatccactcaggcgacgcccatctcttagccaaccacctctaggcttccatgtccttcgcaagccaatccacaatgctctccaggtactgctcctctgtgaggtagatctctttggccccttttgatttgctcatgttctgcccctttatcttcttgtagtagtagttgtcggccgcgatgcgagcattatacatggcatccttgatgaccttatcagcgcacttccgaaagtgcctcttcacacgtgcccactgagcctgatcctcctcgatctcattcggcaattggaacctctcctaca

SEQ ID NO: 1034 - DNA, 386 bp, Zea Mays
atgcctagcaccatagcctgccagcgctaggccattgccgctaaattcggccaacaggtgaaggccgataggcctaatctttgccggccatgcctataaagcgaagtcgttcagctacgccagcggggaaaagaatctgtaagaatctgcaagagcacgccgccaacagagaggaggatctgcatgagcgttgtcaaccgggagatcgccatcatcgtcgccaacccagcattgtggtcacccaaatctacgtgaggatacgtgtcatcagaagagcaagttggtacctggaatctcaagtcccaggcaagttgtgcccttgatcacttctttttacccattcatgttctgattaatcataatgatctgcataggctaattttgat

SEQ ID NO: 1035 - DNA, 386 bp, Zea Mays
gttaaaggagagaagaaagggtgcgaccgttgatattgggattaacagtagagatctgatccatgtaccggtttaggatgatgcaaccgtagccgtccgatctggatcccgcgacctagattcgatctcggacactttcaatcaatgtcgtggatctttgatctaacggacatcagggcgtaccggttcgagtaatgggaaatctaatctgaggcgcaaatttctgacctgacgacccactatcgtcgataccccttcgatctggaaatctttctaaagagccccattccttttgtcatatcaaactgcagtctactggatatgtaaagtaattacagacaagtcctgtaaacctataaacagaaccctgaactctctggttattg

SEQ ID NO: 1036 - DNA, 386 bp, Zea Mays
acgaagttcactttattactttaggaaagcagcaccgaggcacgatacatcgcgatcaacgtgcgtcacgcacgatgtaatgagctgacaccctaatcacaacatgactggccacctcgttgtgaccttccagcgggtcttctcgcccttcatccaaaagcaaatctccctcatcagcagcgccaccacagctcccatgtgaacgccgaaatcgatgatatcctagatgcggcacgaagcagcttgatctcgacctcggtggccgcttgcgctgcgcgggaaacatcgcaactccccgaagacgcctgaaggaaagggagaggagacaaagagctcgatcgaagcagcctaacaggtggcaatgtgatcgcctcatcggcgacgac

SEQ ID NO: 1037 - DNA, 387 bp, Zea Mays
cttcgtcttcaggatgcaagcctcttcctcatgacgaaggtacacgagatgaagacaaatctaaagatgataagagtaaacgccgaagctatcgccagatggacagcttcagctcataatggagatgaagtataatgatgatgctgaccgaaagggaaaaagactactatgtccttaatgtcttgtattacgatcatacgtgaatattggggacataaatgtacttttacccggctgcgtctcgtgcctataaatagatgaacagtagcatcgtactgttcacgctgaatagtaatcgttctctcgcatcttcacctttgagtaagccaaaggtatcaatgtaatatgaattctgttgatattcatacatgttttattgaatgcgaa

SEQ ID NO: 1038 - DNA, 387 bp, Zea Mays
agagactaatttcgagatcaaaaatctaatctcccatctaatccaacataaagggctaattgcagggcctaaaactcatccaaaacaaggtaaaacatccatcaagtggggacaatggagagaggaaaggaaatccaaccaattcttgaagaggaacgatgacgacgacaggcgactgtgtgccctaatcttccctctcttctctcccttgttcttcctttcttctcttgggcaaggcacaaaaggggatggctgctagggtgggaggacgtggctgctagggttagggaggtataaatagaagaaaactccctcaatcctaatatccaatggctcagatcgaccggcacttaaaaaaactcattcagactccaaacaaggcaaact

SEQ ID NO: 1039 - DNA, 387 bp, Zea Mays
aattcaaccaccaaaattaatttaggaaaaggtttgaccctattgccctttcaataacagagtgtatagagataaatgtcacaaaaacatcaaagtatttattacatagcggaagccttattacaaaataaaagataaatataaaacgaactaaggatcatccttggcgccaatgtcaactaggaaacgccacctaaatcagatcaaactccttgctttgaggctcctcctgaaccacatgttcttctcctgtgggggggtgagacagcaagggtgagctcacacatgatcatagctcaataagttgtggggaaaccagtgggcatgaactcaccaaaggtgggagttcatgtgatgtgtaaggctagtcaacaacaggggtcaaag

SEQ ID NO: 1040 - DNA, 388 bp, Zea Mays
attcactagtaaaacagtagaattcttgttggactggtgccctgggatcgggaacggacgtgagagtgagtttgggccgtggatctcgatccggcggtggggagcccattagttctccccccttaaccctagccgccccctcccctattcccctttggttgcagccgcccccctcccctattcccctttgtggccgccaccccctctctctctccctctccttctcccccaagtgattgcaacaccacccctcaaccctagccgccccctcctcctctccatggtgcagcctccccgcttggtaccccgtcgtgtgggtgcgagtcttccattggagtttggagggaggaagaaggaagaaaggaaggaggaaaggaggaacccaagg

SEQ ID NO: 1041 - DNA, 388 bp, Zea Mays
catgatctatcagaagatggttcaggagctagaggagcaggaaaggaaaagaaggtaaaaccaagaacagagtgtgcatggcatcgtcgcgttcacaggtgcatggaggaggggtgtgatctgcattagcttggacaggtgtgcgtgccgtgcaccaatctatctatccacctttcccgcccggggtctctttagctgcatggttcacaggagaagagttgagtttcacaaccaccacctccaccacaccaccatcaccatgtccataaacacgcacccttgcattgcactgcactgcatatgacggctttttaatcggcatgcatgctttcttttgggctcggaaacagattttgtcctgggactgggagcagcacgtacggatgag

SEQ ID NO: 1042 - DNA, 388 bp, Zea Mays
cccaaccgcatctccgcagctataaaatgggtgctggtcgtttgcgcacccctcttgctagtgcttgaacgccgtcaccaaccgaggatttcgccggggagggagtgcgggtcgtgcgcgccgtctggggttgccgccgccgccgcaggtgaatctcggccatgtcgccggcggtgatccgggtccgtgccgaagacgtttgcgtgacaaccatgcgacgattccctgtcggaaattaggcgcggaagcggcggagtgagagcaattcctcgtcggtgaccgcgcgccgccgtgaagccgctcacctccgtggacagtgccctgcgttgcctgaacttcggtaaggtccccaccattcttcccgccatctttccctcttcgatttgcg

SEQ ID NO: 1043 - DNA, 388 bp, Zea Mays
cggacttgtatgtaaaaaggcctatgttggtggtggttatttattaggtgggaagcgtcaaacctattaggcgggaaagacccctaacttaccatcaatcagtgctatgtgcacagaaggtcacgacaaagtatatgggggtttcccaccgttgggggagatgaaggcgagaccggtcaacgacgtacagcaggtccgtggcggtgagaacttcgacgaggtagttcccatgccccgaacatgccacctgcgtcaataatcgtcactccagaccccacgttggccgacgatgcaccttgattcaaggacggttgcagcccattgttccactccagctctacgatggcgctcgacttctgctggcttcatcgggatgcccacaacgctc

SEQ ID NO: 1044 - DNA, 389 bp, Zea Mays
gttcgagaagtggggagggaccgggatggtgttggcagcagtagtctcaagaaaaaaagagaggctagagaaacatggtagaaggaactgaaatacataaatactcaagacaatcgcataaatactcaaatctaacaaataaatattctaattagcagcaagcttgatcatgaaaaatgaattagcagaaaaggacctgaaccgagtcatgagggctcttgccatttttgttcatgttcgacttattatctgaattcctcaatggctttgcttgcaagggggaagcagttcttcctcgtgttctgtataacaaaccccatagcagaaaagcgcataatagtgcaaggtaaataaccactagtgagaagtccaagcatttggcctgtaga

SEQ ID NO: 1045 - DNA, 389 bp, Zea Mays
tgggagaaagcaatcggatcagagaaagaggaagtaaatttatattctgccagttgaggcatctttaggcttgatgtttgtagcacttgaaggaataaataattgaaggcaggtatcgaaggaccttctgttctgtctcgcaacatcaagtaaatcgaggagaagctccaaagaaccttgcatcctgattagtgttagcacagctgagacagtttgaacagtacacacatctcagttctcatttatttatttatttatttatacgatttgattgatgtacaaaatttagcggaacgaattgaaccatatacacgaccatgacagcacagaagagagaccgccaaagcagtgagtagaatttgctttccttcgtgcttgcatcttattat

SEQ ID NO: 1046 - DNA, 389 bp, Zea Mays
attgggtttgctgggagttatttcttgtcacttggaagaacatcaaacgtcgttgcaggaaaacccaacactgaaaatgaaggctcggaataaaaaacatagaccaaagataatcagagagaataagctagccaaagtcagaaggatcacctgaaggctggcgcgtggagtccctggctgaaggttggcgcatggagtcactggctgaaggctggcgcgtggagtccctggctgaaggcggctgaaagctagagcgtggagtccctggcgcgtggagtccaattatttgatggctttaaagcaccggtagcagtaacactttgggtctaatcactttgggtctaatcactttgggtctaatctagaagccattaatagttgtatgtact

SEQ ID NO: 1047 - DNA, 389 bp, Zea Mays
cttgcttcctgtgactaatccgccgttgtgatggtactacgggtaccgctgctttcctttcagcgttcatttgcagtgcggtggctcgttgcgtcgctgctatatcatctgaacagagaagaaggcgaccggatcctgcagcaaaggcaggtgacatgcactatataacagtattttcttccttactatcccattttagtgctccaatgaaatctacttcccctttactgattctatgggtctgtgcatggttgagtctgccccgtatccagtgagccagaatcttggctggcttcccgggtgtaatatacaacaccatgtttggctgtttgaatgtgtcctccagcctaatatccattacatatgctgtttggctgcttgcttgttgc

SEQ ID NO: 1048 - DNA, 389 bp, Zea Mays
tggccgatcttgttccttggctcgatgtccgccggtgtataaataacttccaccgctactgcccccgcccatcatctggggaacaccatagccgtgcgtctctcggttgcatgctggaagccgtcgccaccatgagcacacatagtttatcggtgctttgggttcctacggggagctcggcttgccctggtatgtgtaccgaatttgtttctccctccatctctctcctccgagtagattctacggctttgggcatgcctgtgcggcgagttgggcgctcgccggtgtacgtctgccgctgaccctatgtgcgccatgttccacttgggaagaagacgacctctgaccattggttctttgatggacgtttcggattacaagcagtcatg

SEQ ID NO: 1049 - DNA, 390 bp, Zea Mays
gaagcgcgtggcgtttgacccagcgccacacccctgctcttcattaaaatagcgttgtcctcccttctcgcgaagccaaccttcaaactcaccatctgcgccaagcacaaacgggtgaggtggcgctccacaaaattgcttggacttgggccctgacgagttcctcgggtgaggtgtctgggggccatggatcgttcggggaggagtgcgcacacggtgcaggcctcaccaccactgaattgctcgcaggagagattgcttcaccaccgggccgcaccttctcgtggtcagacttcttcgtcgcttgaccgccggtgagtattacctcatcgcctccgctactatctgctccacgtgtagcgccgttcagagggttggattgtgcactaa

SEQ ID NO: 1050 - DNA, 390 bp, Zea Mays
ccctcttccagtattgatcggtatgtttggttaaacttgcagcgaactcaggcattgaaggccgcccagatttgtttttgtacaaatttcagagccaattaagctagtttggcgcttcaggctggtacatgcacgttgttgggttgaattctagccgggtacacgtccagtgcaaggcggtgttacgtaatttatgccattgatttgccaacaggactgtgaagactggatcgtacgcatgcatgcagatgggtttgatgatgacgacaccgagccgagccgccgtcagtacagtaatcgtaaatcacgttctcttctgtaatttctcgggatatggatcatgcacatggccgcatctctccaatttgtatacaaagccaccaaactgta

SEQ ID NO: 1051 - DNA, 390 bp, Zea Mays
tcatggctgtgtctgggcaacattattatgagagtgaaggtggatgtgctgctacttcccactccccttgatgagcaacaagcacctgcattgagtaatgcaagagtgagatgaaacatctcagcaagctaattgttctgacgagatatttaaaccacaaattgaattcatcaacattttaaaagagacacaataaaaaatcagaaatacttgtagatatagaacacagtagtcccactataaccaataccatctcatttcctcgaacaaccacaataggttctataacacttccctgcgtcaacaatacctgcaaatatcacttcaatgtatgcataggaatgcaatgtgtaggtactctatcttcatacctctgggggtataaaacca

SEQ ID NO: 1052 - DNA, 391 bp, Zea Mays
catgaactggtgggtgctaatctgtacacattaggttttgcctcattgtattcttcaaatggagaaccccaacaagttttttctttaaactagtgagtgctaatctgtacgcattaggtttttgtctcaatgaatggctcatgaaaaggagaagcaacaagtgctaatctgggatcgatctaaactatgacctaaagcctggcttgctatttaggttttttctttaaaagggaaaggaaaattgattcctaggtttactgtaagcctacaataatgcatctcttatgagtgtgcaaaattagcgtatgaatttgattttttattacagttgcacttttcatcacaacaagcagcccatctttattgagtacattatgcttgatgtagttaa

SEQ ID NO: 1053 - DNA, 391 bp, Zea Mays
cgtagcctcgcttgtcagccacttgtagcactgcattgtgggtcccgcacgtcatctctatcccctccctcctataactgctcggctccatttcctccgccgctagatgcgcccacggcttcggcaactgacgctccttcaagcccagtagcaactcccccactacacacaatccacgttgcgcataccgtggcgaccctcctcgtcggggctccgccgtagacgtgcctcgctgaaacaccttgcgcagcacgcccgccgatggtgccttgactgactgcgatccttttccaagcttcgaggaatcgagtatcaagctccggcgaccaagagatcaaaactttacgagttctacgaagttgaatatcctgagcatctgtttggtgaaggc

SEQ ID NO: 1054 - DNA, 392 bp, Zea Mays
accagctttgatggcacagagaggcccacccgcactgatggtcgatccgcctcgatcttctttctcctgtgagaagttctctccgccccgacgatcaactccctctgccgagtctatgaacaacttcaccacgcgctagagacgcaccacggcacgactacgcgtacagatcggcgatggggcgagttctccccgggcggcggcgccaacaactcccccacacctgcggcaagggtttggatggtcttgtgcggtgcggatgggcgcgaccaaggggatacctctcttcatataggtccgagcatgggaggttgggctagctggagtcgggggttcttggcgcatcggttgtggccgcccgccatgcgcgcgaagcaggggagggtacaact

SEQ ID NO: 1055 - DNA, 392 bp, Zea Mays
acgcggtgcgcaaaggaaaggaatctacatgcacaccaaactcaccgaggacaaggtcgcacataggcagcacacgacgaggcgcggacgcggcaggaattccagctccggcgagaaattcaaggcgaaagcacgagtgctttcccccaatagcgccaagggaaccttcgcctcacccagaagaagcctccccaccgacgcaattggccggagcgcctatggtttcgagttccacggcggcggtgaatctcacccgcgcggtgcacggcaacgcagtggtggtggtttttggcttctcaggatgattatggctttatgggtcaggagcatgcatcaggctccaaattatactctgtcgtattgaccagggaatacatagctggcgtaacaac

SEQ ID NO: 1056 - DNA, 392 bp, Zea Mays
cgtaccatttttgagtcttcgacgaaaaaacaccttcccttcttttcatgcttcgtgaagaagaatttatcatttatcacgacaatatccataatgttctgataagaaatatccaagcttcgtaaaaataatctccgaagctatacctcgaaaatcaatattgtttctccctgtaacttggcatgatttgccctttttcaaagcattttccgaagatcgataacatgcccccttcttgtgccacatgcagcatgatgtatgatgattatgctatgcaaaatgatgtgatgatgttatgttatgcaaaatgatattttgtgccgaagatacgcacattcctgcaatggggcacaatcttttgtatcaatactgactttttcattataagcctc

SEQ ID NO: 1057 - DNA, 393 bp, Zea Mays
gttggccataaagggggtgggggggggaaattgctgggcatttgagggatttgacatcgcctgcgacgatgtcgcattgttggcagggtccatgctaggatatgtggagatggcacacatttagtcatatgttataaagtgaagccaatcgacaaaacgaggtacataaacatcagacaaagcatatgaacaacgataataataatataatcatgtcttgaacttattcacgacgaacagcagcattagaacattttagagtcaccagagttcacatactagaaggatcttaacatcatactaacttaagttcacgaggtagcattgagacttagacatacatcacaggattagttcgacaacatgacaagtaggacaccccgagtactggaa

SEQ ID NO: 1058 - DNA, 394 bp, Zea Mays
cggcgacctctcgtaggcacgagcggcaacgacagatcccatagacacgcgggacgacggtggctccccgaggccgtgccgcaacagcggccacctgaggcgcccgtgatggcggcacatccaaggcgagtttggaggtggtggcccccggacacgccaacgacggcggatctaggaagcgcgcatgcggcggtggatcctagaggcgctcgcggtgttgtctccccgaagactcgcgtgacagcgacgacttgctccagtcattgtttatgtatggcgctgttggttgggcacatattaggacgtttttcatcaattatgatgcgtcgggtagatatttatgcaactttctatgagagtttatgcttttgcacgattcctgacatccattttt

SEQ ID NO: 1059 - DNA, 394 bp, Zea Mays
ttcatagcatttgagaacaagtccccaacaccaaccttgccatcgaatcgctggtcaccgacgagagagaaagcccggagagggagagtgtgcgccaccaccatgggttgcgggctatcgacgccggaaggctctccgcaatcggttgaaggcctttgccaaatctcagggagggcgaccatggttgtcgtgatcgtgggagttcgccggtatttcaccaaccgctcgagggagtaaatgcgccgtcgtggatccacgggctgccgtgggtaacgtcacctgcgcctagtccatcggtatgatcacccctgtctgtttcgccgtgttcccccacgtggtttagcgctactgatcgtacaatacgggcaccggggggaactttgccggtcatgac

SEQ ID NO: 1060 - DNA, 395 bp, Zea Mays
cgctgccccgacgccccatcaagactctagttcgacccaacacattgagaggaaacctatgaacacgtgtgcggaatctttaccggagtcgaagcgcaacgacgttttcccacacatcgaagcggatccacgacggcgcacagcttcgatgagcaattcaaccagcgcagcaatgccaatggcggaattagttgtcgccgaagcttctaggagacacgacgcgactctggtatgccctacgggtgccctagtgcccccctgttgccttgcccgacggcggcggcccgttttcccccctcggcggcacgaagttcccgtggtggaggcgaggtggatggttaacggtgaaacggaaggcagggatagttttctagggtcctttatatgccgctggg

SEQ ID NO: 1061 - DNA, 395 bp, Zea Mays
ggcagaacctgctagctgccgcgtcggatacgctggcccggcccgccggcagctcgatctatcggtcggtctcgaccatactacgtacgtgcacactgcgctgcgctgcgcctgcgccgcgagcccgcgacgcgagcgatcgccaagcagctggcacgcacgcgcaccccgcccatgctcgatctatccgttcagactctatctgagactttccgggctcgcggcgttactccccggcgggacgaggaggtcggcgatccgatccaaccccacggccgcatcccccgtaccgtccgaggaggatgcacgcggagccagccacgtcgcggtcggctcgtacgtcccgtggcgctccatgacgccgcccgccacctcgcgcgcgccatgccatgctc

SEQ ID NO: 1062 - DNA, 395 bp, Zea Mays
tcgcaacccaccctcgcataactgtcgggattctagctagtttgttaggatccgcccaccgaatacttaagcaagggtcacgatgccggttccttggacccgttttcctctctacagccgatctcgagccaccaacgccttcgccatcaccctgcgagaaatccgtaaggagtgcgaccctcggtgagacttgtcgccgtcgttgatttcaaccttcgcggcaggctgggctctgcggcgggtgcagggcgtgtcgcctggagtcatgggacgcgtccgtagaccactgaggtcggagcataaggcggggttgccggaattgctcgacggacctcctcctccgccaacctaccaagtgtcaccgcgggctgcatcctcgccactgcaatcttggg

SEQ ID NO: 1063 - DNA, 396 bp, Zea Mays
gccgctgtcgatgtataattcatcaagtttttttagcgagtgtcacatttgacaaagatttcgccaagtgttttgctttttgctatgtgcttcgggcatacggtaaaacagtgtgtctggtattgtggtgtagggtaggccggcatgcatatgccacagctttagctgtcgctgcaggtccatatgcatgaatgaaaaatcaagcaagcgagcacagtcaacctcctcatggcggcggcggtgatgcgctgtggccggaggctagtcgacccggaccgcgtcgtgtggctcacgtgccatacaccgcacgtcgtcgttgcttgtgctgctcttagaccgctgctacctgcggcggaaacccagtcttctttgcgtcttctctccgcttgcatcgcc

SEQ ID NO: 1064 - DNA, 396 bp, Zea Mays
cgtgccgctcttctcggaactcatctctgccttggtgcgaacagcgctcccggatgccgcgctccagctcctcgcctctgcgcaggcaatcggactcacgctgcactccaacgcagtcgccgcactcatttctgtgcttggcgttgtgtggcgtgtcgtcgagacggagactttcctcaagttctgacaaacagctgggagagtgggaggtaggaaagtgagaagatactgctgaaggagatggatgctgatggagttaaatcaaacttgcgtgtgttcagtcccgatccttgcaatggaaaaatcatttgcagtgctcagagagatgcagggaagtgggaataagaccagatttcttggttgcatctgaaatttatagcatcattagtgttgggg

SEQ ID NO: 1065 - DNA, 396 bp, Zea Mays
atttgttcttattatcagttcaatgtctcatatgtggaccatatgttcactttaatattaaatttattttttataggtatcaaatataattatgtgatgcaagtctctactactttaaaacaccagtttcattcatcgtgcgacattgcgaagcgcgtagttagtttggtcctctcctcgcttctcgcctaacaatgggctatagtaccatctcgctagctgtaggaggatgagcgaccgagcaagatatgaaaaaaggggggtgatgcttcttttcaactcatatatttctcagcctatggctaagataaaatataatatttgttgttatcagtttaatatctgatatctggaccatatccactttaatatgaaatttgcgttttataggtatta

SEQ ID NO: 1066 - DNA, 397 bp, Zea Mays
atttttgaccaacactaaaagcaatgctcagccttaaccattttccttggtaagccttacactacactttttcccacatttgctgagcaatgaacgcatgtgagctcacccttgctatactcacacgaggtcaagaataggtaccgccaagatgaggagcataattgatgctacgatgagttcgaaaaggtctagaccgtcgtctcccagtcaactatggttgcagaggattgttgccatcatatgatgtatttatttagttattttgtacagaacccctatatgtaataaagatgtgacattaatttctgtaccatgagtcatcgtatgtatgagatatgatcctagcacacatttgagacgcgccagggtttgcccttaaatccaggtgtgacag

SEQ ID NO: 1067 - DNA, 397 bp, Zea Mays
tgcctctttagctcttgactcttgtaaaaatcagatcccaccctcaccaccgccagcgggatagccactgctgtcgcgctcctcggttatccctggcggtgagccggtgaccgagtttgcaattccaccctcagcatctttgctagcggtgaggctgccattgttgctcgcttgacgacgctcttcaaggaaacacatggtacatgggcaagttcgtcgtgcggcaacccgcgaagctgggcaacagatcgccatcgcatccaccatggtaggtcttgtggagtgcaaggtgtacgcgtacaaggtcggtctggatgtgatcaagttgctggagcgcatgcagattcgacaagagttatgtctacagctggaaacattggttagtcctatgtaccgg

SEQ ID NO: 1068 - DNA, 397 bp, Zea Mays
gccgcgtccaccggagtgccgatcgtgccgcaactccacgcgatttttgctccaggcctcaacagaccgcgtgggtagataagtgccttgctgccgccttcccttgcttccccccgttcgccgcccgagaagaaaatagtagccgcagctggtgaaatctgactcaccgtcgacctcgccattggtggtgtgccaaggagttctctggacagggtgtgggcgggcgcatccgattagcgctagagttagccgctaggacaccctgaattcttcgccggacaaaggtctccgccgtgctcggtagattgtgggcaatacaacgttaatctggaggagccaatggctgaggatcctggtgcccagcagatagaagttgctgagcaggagctcgttgaag

SEQ ID NO: 1069 - DNA, 398 bp, Zea Mays
tccacttcccgtctacgagtcgcagcccgttgccctcaaagcaactagcagcaagaaggcgctacctagcaaggtagcacaagtggaggctgctggactcaatgaggatgagatggcactcatcatcaaacgattcaagaccgtcttgaagggatgcaaggagtaccccaacaagaacaagtcaaaggaaaaatgctcctgcttcaaatgcggtaagactggtcactttattgcataatgccccgataacgataatgaccaggcacaagagaagcatgtgaagagggaaaagaaaaaactacaggaaggccaaaggcgaggcgcacatcgggaaggaatgagactccgactgttcctcatctgactctgaagatgaaggactagatgcctcggccttc

SEQ ID NO: 1070 - DNA, 398 bp, Zea Mays
tgcgcatcccccacctccactcgtaacggaacccccacgagcaccgcgtcgatctcgccgggcgttttgggtggttggcggcgtgcgctagccacttccacgcgtataaggagtccgccccggccgaaacgcctcgcgacaacaatcccctagccgctaaccgactcgacaccattcaatcttgcgtcgtgggagagtgccgctccaccatcctcgtccttggcagtgactcgatgctggtgttgggcgcaggagattcgccgcgggggtgcgctcgcagttgtgtcaaccagggagatcggggttcaccagaacagcagcaattccttgtcgttgctcattcgtggccgcaaatccgcgtagtgcgtgaacaacctcaaccaacgcctaatctccag

SEQ ID NO: 1071 - DNA, 399 bp, Zea Mays
cactcccacccctctaattctcctagccgccaccttctccttccctgtcttctccttcacgacatcaacagccaacggttattcttcctccagcgagcagcaagcgcagggagctcagctcctcccctcggccaccatggcgccctcctccctggcgctcactccctacaggagagcagctgacaccccttttcttcctccctggtctccacgacaagcagcaaggagcttgatttcttccccatggcgcagtgacctctatcccatgtccggcttcccttccccttggccatggccggacctctgccctctcctagccagcgccctcccttgttcttccctgctcggccagcagccatggccatggcgtccaaagctgtgctcggtgcccctctgtgc

SEQ ID NO: 1072 - DNA, 399 bp, Zea Mays
cccccatgacaatctgcaatttcctgagggtgacgggtccggatgggtctcgagggggttacgacagccctccctgacagaattttctggttttcgatggggtcaacccatagttgtggaagacatgttgcgaaaattattttgacatgtacaacgtagactcctctcgctggattcgtgttgccaccatggacttctcagggcttgttgtgggatggttgcaatcagtaggccatcacatcagattctagtcgtggtctaaattttgcgcccaaattcaagatcgctttggccgtgatcagacaactccttgattaggaagttgtttcacatacgttagacatgcactgctactgaatatgtggaacgattttctattcttgttgatcaactttctgc

SEQ ID NO: 1073 - DNA, 400 bp, Zea Mays
tggggcgccggctccggcctcggcctcgttcgtcgttcgtcgcccgcacatcgactttgactgactggcctggggcgatgcttgagctgcacacaatgacacaacaatagaacacatggacaacgaggacgaacgactgactgcaaaagcctggaatcaagggggccactaggccatcaagggcacacatgtcctgtgcaaccttgatctacggcaacctcacaaataaacacacacacacacactgacgcacagcaagttcacacaaaaatgccctcggggattatggcaacaaatggttctgcagattgccgagcatcacaatgggcagccgacaacgcgtgtgtgtttcagcgacgttatccaagctttctttctgcacaccgcatcacacggcccg

SEQ ID NO: 1074 - DNA, 400 bp, Zea Mays
gtgtaccaaccaggccaatggctggacggtggagtactgtactctcgggtcgcgtgaacctattctggtcttgagaaacctgtgggcgagttgacatatgcaagggttaagtgctacatatgtcgtgtggttggagatcctcagctgagtattaatcgattcggatcgccgttacttctcggatatgaagactggatcactgccctgcatcgtagataacaagtgaaactaaagatgctaaaataaagttagtgtaggacaaatgaatgctctagattaggaaaatctagattcaggtaaagtacttaactggtgaagtaaaagcttggcataaggatccactactagtaagctattctgcaaaaatgagtctttgaaatttgataagctttaccttgat

SEQ ID NO: 1075 - DNA, 400 bp, Zea Mays
cttagagcagcacagcgactggcgtggtgtgcgaccttggcgtgggaggtgcagctgtggcgtgggcacgtcggcatgggcgcggcttctggcgcggctccggcgcgggcgtggctgccggcacagcacgacctctggcacgacgtggttcatctcgacgagggagcgactgacggcgcgggtgtcgctgccgacgtgagtgcggctttcgacatggtgttcctgctggcatggtgcaagccaccatcgcgtgatacagagtgtgttcgggattggcaatatgggtccaaccattgattcctcattctttttcgaggaacggatcaaaacagtagaaccattgtacttagaaatgcatactggggtgattgcgtagaggataaatcgaagcctgtcgcgt

SEQ ID NO: 1076 - DNA, 401 bp, Zea Mays
caatattattgctcatacttaattgcttataaccaaagttatcggggtgataattagaggtacccagattatccctccaagaaatgcattcataagaagttaagacataacctccaaagggaagcagctcagatacctcctaacccgaggcatctccccgagggtctccaacctcaggcaaatccccgcctcgcccgaagtcaccatcgccccgtccgtctcgcccgagccgatcccatgcagataggacaaagacgcctgaagcctagcggggaacactcgcatttaatgcgcacacctaccccacgcagtggcacaggagcacagtgaataaacaagacaacagtcatatccgagcgcaacaacatgattatgcccctgatactgtacacgcacgccgc

SEQ ID NO: 1077 - DNA, 401 bp, Zea Mays
gtcccatctctctaccctagccttcctcctcttcggtcgcgcgggttgcaggccggaccactgtcgctctgcccccgccatgggctcaaccctgtcgcacagccactgcgccatggggctcacgcgccagcctcacacggagcttcttgctccttcgcttggacccgtggccgcatgccgacgccgtaaacacctccaccgatccagggaagccgttgcaattcgtcgtgtggtggttaggtttcggacctcagccttgtttcccttttcacggcatataaatcccctgtcgcatccccttagtcctccatctgagccattgtgctcctcgtcggggcaatgcatgaaaggaacctgccgccgccacagactcatgcctctaccgctggttcatcatcgat

SEQ ID NO: 1078 - DNA, 401 bp, Zea Mays
atttaatgaatcctccacttatttgatgggatggttaagagattacctatggttaaactcttcacaacttattaatggatataatccttttgggatgaatagtttatcagtatgggcttggatgttcttatttggacatcttgtttgggctacaggatttatgttcttaatttcctggcgtggatattggcaggaattaattgagactttagcatgggctcatgaacggacacctttggctaatttaattcgctggagagataagcccgtggctctttccattgtgcaagcaagattggtcggattagcccacttttccgtgggttatatattcacttatgcagctttcttgattgcctcaacatcaggcaagtttggttaatttagttatttttttttgt

SEQ ID NO: 1079 - DNA, 402 bp, Zea Mays
ctcaacctgcgggatccgtatatggcttgatctgcaggttgcaacgaaaatctttgaatagagatgaagtcagtcctttggtaaaaatatctgccaactgaagggatgatggaatatgtgtcactgtcacctcccctaaagatactttctcacgcacaaaatgtaagtcaatttccacatgtttcgtacgttgatgttgcacggggttggaggctagatacatcacactgacattatcacaaaataccacagatgcacgacgaggcggatgagaaagctcagtcatcaactgacgcaaccagcacagttctgccacagcatttgccacgcctcgatattctgcttctgcactggatctagaaactgtatgttgccgcttggaggaccaagcaacaagattgt

SEQ ID NO: 1080 - DNA, 404 bp, Zea Mays
taccacatgcttgaatgtagttcatgagcttaactagaatggttaagtaatgaacttgaataccaaaaactttgaatacaaggatgcactattagtaatgctttcctagaagttcaacaaatggcaaactaatttgacaagacatattttttagagtcaggagaccactctcacctagccaagtaaattttgattagtacattgtgtacttagggttttcctctgctacaggtagaaggtggatactaaaactaactgatgttgtgtggaacctccttgtaggtgcgaagaagatcgttctgctatgatggtagtagttttattcgtatacctctaaatatttgtataaattttcaaaactgtttcactcttgttgctatcaaaatgatctttttgcaattttt

SEQ ID NO: 1081 - DNA, 404 bp, Zea Mays
caccacccctatcttcattaaacatgaataaacattaacaatattcatattacaatggtatcttcggcttgccaaaaggtgagagagcgagaagagcgcgagagcgattacaattcagcgtgaacagtacggtgttattgttcatctatttataggcacgggacgcagcccggataaaagtacgtttataccctggcaactatctataatcttaacaaggactgttaaggactgtatggtctttattcttctctagttgttatcacgcttgagcttcgtcgacatattcagccgaaatcttttgacctctagcttcgtcaacatgttcaaccgaagttctccgtcctaataccgaagcttcctgtaactattcataatcatgctgaaaatatatggttagtcac

SEQ ID NO: 1082 - DNA, 404 bp, Zea Mays
tgtggcgcttggacccgttcctggtactgcaatctgcggcccgcccgttccaagttggtagttgggttgtgaccgctttggcgaaggccatggcgtcccaacctctagagcgacgggcaatgcgtgaggctggtttcacagagcagcgaataccatccgcttccaacggtggaaggataacgggccactgcactccaggcccacctaggctcaagcactctttctggcagaccaccatttttgttttttggcttgtcttgcacacctactcgtttgccactgcagcccatttgtccaacctgcagcgtctagcaacaaccatcatcaatcgattatgtagccgatttgaacctctaggcactggtcctctggacgttcgatacattccacatgtaacatgttct

SEQ ID NO: 1083 - DNA, 405 bp, Zea Mays
aggatgatcgaaagctgactgaaggaagtagtttgttttctattgctattgggaatcacgaaaaaactatagtgatgtgctcctcgttaggttctaggataacttcaattcccactttattttttaagaactatctaggctggccagtcataggttagagagctcatttttagttgatcttgccaaaggtgcatgtcgataccttgtaattagggtaccctttcctaccgtgtcaaggcagatacccgtgtggttacatataatcgcgtcatgaggaactgagcagttaggtccatgggtccgaacccatctgacaagaccactggccacgggacccgcttctcgctcaggtctatcaccattaactcagctgcatgtcagcaaggtcggcccctacatacgtcg

SEQ ID NO: 1084 - DNA, 405 bp, Zea Mays
gtttagttattgggccttttttaacccatctacagtataatttagagcaccctctcctgttctaacctagccgccaacacagtctccagccggctcgtctcctctcctctcctttcttggcaccgcccctgtagtcctgaactcctgatttgtcggcggctacaacaccctgctgcagtccttctcttgcagtcttcaggaatcaagtgttcaagactcaagaggtaggtctgcaaggttgatggacagatggagagatgaagaattggagattatgccattatgggatgtcacatgtcaagttcaggtaagtcacaaatcaaaatgaagcaatatgttactttgtttatcctagttgtttgttctaatttatataatgtataattgtatacaggtatatttata

SEQ ID NO: 1085 - DNA, 406 bp, Zea Mays
ttttttttggacgtagcataaacctagttttgttttaaccggaaggtggcaggtgcagactaaacatacacagccatgcactagaacggtagaacccaacgacccattcttgagcttatattaaacataaaggcttgcagctcacttaaaatgcagcatagaaggtacaccgtcactagaacttatttcatgagattctttaagcatgcagaagtaggaacaaaataaaagctaactggaggttcaggagctgaaagctctgtctaagatcagaatatatccctgttgagtattgaagttggctgccgtaaggaggatgttgttgtagtagatgtgaaaaagtcagatgaataatcaacaataatagggaagaaatattttcattggaaatttcgtagcattcttt

SEQ ID NO: 1086 - DNA, 406 bp, Zea Mays
ctgcgccgccgccaactctctctgcagtccgcactcactctcactcccgcatgcatgatccctcgtagcaacagctagcacaccgagcaagcatatcgcacgcgcgcgatcgatcggtcattcggtcgacgacgctgcccagccaaatcaaagtcttgatgccaggccacagttgcgcagtgccgcgcgcgcgcgcgcgcgtgcatgtgccattgctttccttccgtcgtctcgtctctctctgcggcgtgcgtctgcaatgcaaatagccggtgagtgagtgtcgatcaagcgttgattgctcagtctttgttcggattcggactagagagctaagatcacgcatgcgtatcgatggattctcttctatcatctgcttctttatttccaccctctcagtgtcgtg

SEQ ID NO: 1087 - DNA, 406 bp, Zea Mays
tgttcatccgctatccgtccgcacggagttgttgcctagttctcgtcgtcttggtcgttggcgtgccacagcacgacagctccgctgcgccgccagctccactaccgcgccaacttgttgagcaccacgccatggccgtcggggcggaggttccacgacgcgatgccctacgtggcctcggccacgacattcgtgtccagcgcatgttgatttggttcggcacgtggaaggagcatcatggccatggagtctacggtagcctccggcggcgcgacgcagttgtaggcagccaatccgtcgggtatgatctgagcgacctgcatgctcaaagtcatagccatgcaagtgggtggaggacgcgcaccaggtgctcgatgatatgctttaccgactgcctagaaacctg

SEQ ID NO: 1088 - DNA, 407 bp, Zea Mays
tttaatttggttttgattttttcagtttttcgcgaaaattttgaataatgcgaatcggtcaaacttgatcaaaaaatctaacaaattataaattaggatttgtattaaagttgcggaggatctactttttttaaatatgtatcttgatttatatgatctgagaaatgatatttaggccatccaactaattcagctaaagaatttgtttaattggtataatagagaagacatgtcaggtaattagtaatactatgggccggccaacccagcgtggagtacgggacacggttagtcggttatcctaataggccctcaacgaaagtaaaatatccatggccccaaggcccacttgtcagccgggcaggcgcttcgcgccgtcgctagagatgacaatgggtaaataccca

SEQ ID NO: 1089 - DNA, 408 bp, Zea Mays
gccagccagccgcgggcggataggatagctctgcccggtgttggctggtggtgcgctgcgcggcagcaggcttttccatctcatcgactgttgacgacggggctggaggagcgcacgggagaggcggcccggggacgcgtggcggcgcgccgagcgcacggccccgggcgcaacgctgcccgcgggggacgcgacacgttcgaggcgtcccatgtgcgcgcgacgagactgcggctgccgggacagcgatacccgggccaagccgacgagactggcgactggtcctcgatccctccgcacgacctgcactgcctttgcatcgtctttctacggccggccccacacgccgtgcacgaccgggctgcggctgcagggcatccttgtagcccccgcctccgccccactccc

SEQ ID NO: 1090 - DNA, 408 bp, Zea Mays
atgcgaacgtacagagcccgatattctgtccatatacaaattccatgtcaaatcgtcatgaacctcgacaggaaaggttgaaaagaggggagctccatgcgagaatttttaccttttccacctttcttactgcgcctgcttttcatggctccgttgatgattgcgattcaccaccactaccaccactgctgacgcccttccatcagcgatctccacattgactatcgcccccgggccatgagaggagagcacgtctttcgactgttacctcgatcccgctgagtcactatctagttgattggttgcccgcatcatcttattctgtattatcgtgtgtgttaattttatgtgagctactgtttggttacttgtacgtaggagacgtggcctacatgaacatatgcaata

SEQ ID NO: 1091 - DNA, 408 bp, Zea Mays
cagtgaagcacggcagagccaattaaataagtttacctcgttagctgccctttcagagtcaatgtcacacccagttttggaaggcaaaccgaatgcgaactatgtacgtgctaggatcagaattcacgtacatagcgattacataaatgaacatcatcgcatagtgctcgaataataacataaaagagtattaacttattacatcacgatgtcatagacatccacatagtcatcaactcaacgagtaaatcaaagtgctaaacgaaacgcagtaaagatagggccttcacaggcagctgactgggagtttgccgccaacccacacctagaactagtcgtagtcttggaactcttggaagtctccttccacggcttcatcttctcctgagcagtggttgcaatgtggac

SEQ ID NO: 1092 - DNA, 408 bp, Zea Mays
ctccaattggatcattactgccactactactttcttcgtgcctggaggctagcagatgtcgtggcacaccaagaggtccagtcgatttgcgctgggtagtcttagtgcgtgccatatctccataagaggggaagatctattagtatagttttaaatatgatgcatgcataatctaataattatggaatcaaccttcgttgatccccaacttcctatatatattgcactctgttatccaactttacaagataaggggctgccagaaagtgataaggtaagaacgaaagaaaatttcaagataagtgtttgaaaattcttttgaagtactacgtaatatctaagaataagggcttcactttgataccagctgtcacggaacctcccaaggtattaggcccacatacagtt

SEQ ID NO: 1093 - DNA, 409 bp, Zea Mays
tgttaattttgtctataccatgtctgtttgtattgctacgactagtagtgaggtcacgagaatctgaagaatcaccctggtatctggaatctcaagtgccaggcaagttgtgcccttgatccacttttgttacccaataatattctttattatcattattcatgcataggtttaattttgatgggacccaatagatcaccctagactgtttatctttttaccttgtttacccctgaatcattcggtagttatgctattgctttacacggtttttgggttaatatttcattatatccatgctcctattattctattatgttatttatgttcatgataagatcattatgttaacgggaacatagagaaccacccgggaaattagtgctaccacaagggtagtatgggatgc

SEQ ID NO: 1094 - DNA, 409 bp, Zea Mays
ggaaagataaacgtacgaccgaaactgaattaaccagtgcgcacgactatataaaaaacaaacttcctttgacaataagtttctaattaaaacatggctgcgcctaggcagcgttattgtgagagtgtaagtggacgtgctgctactcccctcattcccaacatgtatcaagtacctgcattgagtaatgcaagagtgagatgacacatctcagcaagtaaaataatatcaaactattcaaccacataagaacattgttttaccaccacctgattccacaaccttcttattaccaaggtgcatcacgtatacaacgtacaacacacctagttaccacacctcgcaggtagaaaaccacaatagtaacatagtaatgtcacacttcatatattcctcatgaatgcaaatg

SEQ ID NO: 1095 - DNA, 409 bp, Zea Mays
ttggccatggagtaggaatcgataattcaaactcatgcatattttgaagatttatagggactttgaagaaatgacaaaattatgaattagatctcatacaatttcaaatattgagatgatgaggacatgacttgatctaattgctagaactccaaagacctcgtgaagaaaatgatcttcacacaagatgacacctaggataagttgtcaagaaattaatacacgtttagatcaagtttactaaacaaggacatagcttagctttgggtttacgcaaacaaactatcaacattctaccggcacacaggcacaaaaataaacataagttgcactatcggtcaaactaagaagaaccacagaccacataaacacatgtctaaaggacacatcaaacaaagctagaaattgc

SEQ ID NO: 1096 - DNA, 409 bp, Zea Mays
gcgtcattgaacacccgtgtgctggaacttccccaagccaagttggtcacgcgctggagcgggcttcgccatctctcccaccgtgctacgtcgcaagatgtgatctgttcccgagctttgagggattgacgatcaagttttggcggccaagtgatcaagcttttcaagatctacaaggttgaagaccctgagcactcgtttggtgaaggctgcctttggtgcaatccatgctcagataaaggagaagatgtcgaggcggatctctaggagttccatgatttcgacgagttcgaggattaggctagcgacctcccccagtcagctgcctgtggtgggttaatttacgttggctacgtttctattctgtgtactttgattatattatgtaaatgactctagtctgtaatat

SEQ ID NO: 1097 - DNA, 410 bp, Zea Mays
cttgggtactcagccccaccaacacgaccccgtgctcgcctctataaagcgtccgaccctgaagttcgtaccgccccgtcgtgtattcgggtagtaaagttcgctgccggggtatggggtagtgtctgcgccgccttcgacctcgggcgattgtcggtggtggtccgccctcgcggatggaggtctacgcccggggtactcgtgccatgggaatttgggccttgggtgatcgcgaatgagcggcaatttctcgccgaggttgatctccgccgtgaaacagcagtgcaccgtgggcagccccgcactctccaccactactggtaagactacttcctgtgcgtttgccatcgatttgcttcacgaagatcgcgtcgtgtttatgggttttgcgcctggacgatgtgtcgcgc

SEQ ID NO: 1098 - DNA, 410 bp, Zea Mays
agtctccctcttccacccgcaacgacgcctcccttctctttcacaacggatggagaagagcattgttcaaccctctagtgtcttctcgcggacgccagcgcctcgcgcgctccacaagtaagcaatgattatgttcgcccccaagtcgactgacaacaacattcgggcgagtgaacaacgacaagacgacatggacgcaagcaggcgcagtccaacccggtcgagttcgtcgacgacgaggagggacatcacgaaggttcttgtgaaagcgggtttcggtacagtcctcttcgtcgtctgaatgattggtcgtcggatccgtcttctcctccaaagacagaggtcatcgttgtcaatgttgtttgggtcaatgacttgtttccatctacttaacggctacaaaatatggc

SEQ ID NO: 1099 - DNA, 411 bp, Zea Mays
aaatcgccgaaaagtaaaagacaagtgagacaatgatttttatcccgtggttcgatcaaggctacatccacgttgtggtgtcctctttggacaaagggttgcacttaacccctttcaagcaatcatgaagataaacttgagtttcacagtctttctttatcacttatatcccgcttgcaaggaatctccataaattagggtctcttgtagccttacaaaagatcagagttacaacttggagtaaggtagggagacaaagtacacacaaaagagcaaatcgtagcaacacacacaagaaagaagatcacgagttgacaaagtcagaaagatgcaagaacaactcaaaaatgccactcgaatctcactaagtcactagaacactttgctggagagtgtcagagtgttgttgtg

SEQ ID NO: 1100 - DNA, 411 bp, Zea Mays
gtactagcagtgttctgtgcagcgacgacagcagctgtcaataaaggaaagctagcttctgctctggcagtttgatcgatggccacacatccagtcgagagttagttgctttgcctggttcattgtaatctgttgccgtattattattgcttgcatgcacggctggttggattggatccatctgcgctcctagctggacggtggttggcagatgtgatgagacgagaacgagactacgacagtgagaagagagatcctagccaaatgcaaatgttacaactgccgccgccgccggataggcttccaatttcatccgttgcatacatacgagtgctctcatcccatccttgttttttttcctacaataattaattactccttcccgtcttgcgcgtgcgtgcgctctctcac

SEQ ID NO: 1101 - DNA, 411 bp, Zea Mays
tatacgccttgcgcgctcggcagcttcttcggcttgtttagcttcttcttgagcatcgtgggtttctttttcatttttctttatgattttgttggccaattctcggccaccgttcacccaaacatcggagtaaaactttccgcccactaaatgacacaccgggttttaagggacaaagccgggtgcatctcatacatgccaaagaagacaacatatataataacagagtgtatagagataaatgtcacaataaaatcagagtacttattatatagcggaagtcttacaaaagtaaaaggtaaatagaaaacgaactatggatcatccttggcgcaagttaactaggagacgccacctagattgaatcgaaatcctcgatgtgtggctccacttgaaccatatgttcttctc

SEQ ID NO: 1102 - DNA, 411 bp, Zea Mays
ctggaaaggtgttggccacggcgcaaagcaggctgacggcggtgatgtcgcaccggcaagcaatcccgacggggctcgtggcaatcctcgagtggcttggacacgactactttcctccggtccttaaggagctaccgagaacaattccgaggcgcggttgacggttaggtcggagttccctgacggcagcaccctctttcccctcctggcgccgcaatttgtggtacggtggtggtcgcaagaacggggaaagaggaggaagagacggacccgaggacgtggcttcccttataagcgcgaatttgaccaggacgcttcaacggactgcgcgacgacggcgcgccccgccatgcgccgaggttcagttgagggacggagctgaccactagggcccacaaagcagcaacggag

SEQ ID NO: 1103 - DNA, 412 bp, Zea Mays
atgatacttacactactagaaaagcaggtctttaaatgcattctatttttttgcaaacgatgcttttgcagggcaaccaactgtattgtttcgaacagtgggacccatcaaaaccgccgcttgcagaaaagattattggaagcaaacgctttaagacaatttacaggaacatggaagacatcgaagtcgagacattggtatcatatttctgtcacttcatatgacgtgaagtgacacatgtaaaaggacatttctttgaccttgatggaccgttgaaaattcattcggagctcactaattttgagaggcataacatatgaccattttgaaacatttgaaccgattttgtgaacatgaatggatgaaaaaactattgttgtgtttatgtgtatggatgaatgatatatttggg

SEQ ID NO: 1104 - DNA, 412 bp, Zea Mays
gcaatccttaagttagttatctaaaatatgaaacctgacaaattaacgttattaacgtgagtgttcataagcgaaaacaatttattatcacgagaagacgtcgtgtgacccgcgtcatcgacacgcgagatatgtgcgaacgatgcgcagcaaggcgagcgacatgtgtaagtggcacacgcgacgcacgtaaacgacttgtgacaacgcgtgcgaaccgcacgcgtgacacgcgcgaacgacacgcgacaacacgagaataacgcttgatctatacgcacgaacaacacggcgacggcgagcgccacacgtgcgaacagcgcgtagatagcacgcgacatgcgattatcaccagattataattagatgtgcaaaactatatttctaagttgatttttaattaatataaatt

SEQ ID NO: 1105 - DNA, 412 bp, Zea Mays
ctcaccaatgatggcatccggcagagtcccgtcgtcgaggaaggatggccatggcggaaatccccagctctggcgaacaattcacatcttgcccgctatacaccgtgacctccaccaccacacacacgctcgatttgatcccgcgaagcttcaaagccatctgccggtgctggagcgacaacgctcaatgatttcgcccgtggcggatcaatgatggcggctgcactctcccctctgtcccgctacacagggcgtcttggtggttctcaactcgacttcgtggctgcgctggtttcgcggggccgcaacggagaggtggttgtggattatatgcaggtgagggccaatgaccgagtcggctgggtcaagcaacccgatcgatctgttatagggagaagaaggtctgatgaag

SEQ ID NO: 1106 - DNA, 414 bp, Zea Mays
cttaaatctgtgtgtgacactaagactctatgtgagagagagatgggccaagaattaaatgtacaacttatatcatgaaagttatgatataagtaggtttttagttgaccatgtgtaacatgtcaacattataaaatctactataaactatattattaaacctgctctgactggtttctccttgaggtcaagatcagaacaagcaccagctgaattgctaggtgcgtcggttggaatgccaggctcaccagccatatggcccaatagttgtactcgccaccttcttctccacccctatttattaggtgcaaacaacgcaacaagcatgcctcagattcataatgaaccccgaattaaatggcttttaaaaattcgctaacttcaagtcttgtcacacaagacatgcaccatatt

SEQ ID NO: 1107 - DNA, 414 bp, Zea Mays
gtttgattattcttaaggttttcctctatttgtgttctgtttgattattaatacttcgtttgtagtgaaaaaattcatggttattaggataatttcacaccaattaagaaagtggtatatattagggttgaaaacggtttcggaatttttcggtttttcggataccgttttcgattttttccgaccggattcaacaacaacggtatttttcggaatcgaaatcggttgtcggaattttataccggaatcggtatcgaaatcggtacaaccttttaccgaccgtttccttcgattaccgaatttaatcggaatttaccgattttaaatttcaaaattttttgaagatactaaaaaacaaaaatatttcaaaaataaaaaataaagtaggcagtcaaggcccacacttcagtccgg

SEQ ID NO: 1108 - DNA, 415 bp, Zea Mays
gaagaaaagaggagggaacgttaagagatggaggtgaggataatagcagaacgggcgacggctgatcagaggatggtggaaatgttccagtacatgcagagccttggcaccgcacagggtttcgctccgccacctccatttttccctgcagttgaccctgctctgttccatacttctgtgagtatcaaaattataattacatgttggtaatgcatctggtataacacatgcaatctcttctctgtgcagggccaatctagggcggcatccaacaaccctcatgaaaagggttcagcccaacgtagcacgaatccaaccgcccacctctatgagagttatgtttttagtgtttcgaacacaaaacttatgttgaatacttgtcagagcttgtgaacttgtgttgatacttctgaac

SEQ ID NO: 1109 - DNA, 415 bp, Zea Mays
tatccgtatccgttatccgaaaaaaagtccgaatatccgaaaattccatccgaaccagtgttcaccatcttcgaatccggatccggacggatattttccgaaccatattacatccctacccaccagacggtctggtgccccctagaactagaaaccagtcaatcacgcgattctctgtcggtacagtcttcactgtccggtgtgcacgaacagaaggcaaccaaagcctaccaaatagagctccaacgactcctatgtcccttggggctataaaagggacccctaggcgcatggagcactacaccaagcatccggtctttgggtcctcctcatgttcgtcggtccttctgggcatctcctcgtctggggtctgtcgtgtatccgagagaaagggggctcttatgtccgggggccg

SEQ ID NO: 1110 - DNA, 416 bp, Zea Mays
cgcgcgcaggcgccgcgcgggcacggcactcatcatgctcgcgctcactagaaaatttgcaagccacagggcactgggagagagtaccgaggctgccacatccatggcgatgttcagaaacaaatcaaaagaggagctgaatcagtcgacgcatctagacacaggatttggagagatgcaactttttaagtggatcaaaatggtcctcaaaagtttgacccaaagggtgccttctttctaacgaccggtggacgttggtcacacgagcacactcaacaataagttccacatcccgcggagaccaaagacaccaacgaactgattgagaacccttctctatgtgattgtagagattcaacggtccttacacctagagttttgcttgagttagagtatgataacaacagtgaagtaag

SEQ ID NO: 1111 - DNA, 417 bp, Zea Mays
cggccgtcacttgtggcgggttggcagtggccaatgcccaggtccttctccgcttgattgattgcatccggatggataattaacaacgggctcgatgcatacatacatcactgtcacagcagccccaacaaacagagaaattagtagatgccaagaaaaggcgcatggagcagcagcagctgctccggccaccgcgtcgcagtcgacgcgcaccgggcagtaatattctaccaccgtccccgcgctcgcgtccctgctgtagtggtggctgtcctgatggcgacgcccacggccgacgtacggatccaacgaagaggtcgtcgccttctgccattccaggaccaggaccagggcagggtgggtaggatcggatcggtgcatcatctacccgtcgctttcaccatgggcaagtgaaga

SEQ ID NO: 1112 - DNA, 417 bp, Zea Mays
ggaaatagcagacttttgctgcttctgtgccaaggtggttccaaaagaagaaaatcaagactgaagtgcgggaggactcggtcctccacttaagatcttttgcttttagcttctcgggaggagtttgtgcctccctggtttgtataatattactcctatgcactcacttttagtctggtctgtaataaaaataactcaagcttgctttcgaaataaaatgtaagattatgtaattcgcttccgcatttcttcatctccgatgttctgtaatgtctacaagatgggtgagacgttcctggtaaggtaaggaaagataccgaacttgtcaagtagttcaggggcacctacagggttggctgatgtctgtgagacaaggacaactgtaggtgggcctaattacttgggaggttccgtcac

SEQ ID NO: 1113 - DNA, 418 bp, Zea Mays
acatcagctttcttgggcatcttgccacctactaggatggtgcacaagggtcttggtcacgatggttaacccaacagacgtgacctgtttagctctgatcgaactgtcaatcccaacactgccgagcgtcgtactggtcctgaccaattcgtcatcttgctttcctaattttcttagtgttctggcgtagctccatagtcgaccagatcttctccttgtaggtcgtcttcctccatgggtgtcggtacgtcgttggaggtgtcttggtgtagtgcggacggtccggcctcaggggtcggacggtccgcgtcttgtgtggatgatctggcttttatagccagactgtctaccatacttgcagagagctgcacagttgttgttttattttctgtctttgtgaccatttgattttttttca

SEQ ID NO: 1114 - DNA, 418 bp, Zea Mays
atattataaattggaattggaacgggggagtatataattggggactttggtacatggtactcccccgtctcaaaatataagtcattccacggactgcatgcagaggaagcgcgcgggggtgatgagtgagaaagaaagaagacgagtacgagacgaacgagcacgcaggggatgtgttgtgatgtgccgtaaagcccagtagtgctcgtcgctaatgttccagccgccgctgtacgcggtgaggttggcaaaggggtcgctccggtgagtcctcgccgcagccagcacgagggagttgttcgtcggaggcgcagcgtcggcgagcaacctcctccatcgcgccactatccccctcccttggccatctgcccaatttcatggcgcaaagttatacaacaaatatcgtgggaacaatttt

SEQ ID NO: 1115 - DNA, 418 bp, Zea Mays
cactgagtctgttctagatctcgtgtcctttttgcgggatcattaaattgtctttcctcgcaaacgtcatgctgctcatgtttatcatcgtcgtgttcgcaaccgcctctctcgctcggtcgcaacgcaattgataatgaattcggtaaccatctcccgtgatcgctctttttataaatttaccccgccgtcgcataacctcctgtctttcccagatccaaatcgtgcagggcaggcaactcgtcttagcggttaccagccgcaggtgagtctctcctccctcccttcgacgttctctcccatgcgtgctctctctgttttcctcgatcggcggtgtggcatggccaggcccggcgtcccgacgcaggtgcgtgtgggctctgcgcgcgcgacagctggcgcgacggcctgacggcca

SEQ ID NO: 1116 - DNA, 420 bp, Zea Mays
aaaatctgttttttttgacagccacatacccggattcaaacggtgataactttcaatttataactccaaattgagcgcataaatactcgttggaaaggtaaggtaaagttctacatgatacccaaactgatttcccttaattcctcacgaaaaaaacacagaaactgctagactactgctgttcacccaccacctaaaattctggacagcccccctctaccccaatcgcaaacgcaacctctaatcaattaaattgcagcgcaaatgaacaagggatgaacacaaaaatcaccttggattctccccatttccttcctcccttcttccctccaccaaaacgattgaagactcgcaccacgaagacgatgatccgagcggcaaggattggcaccttgggaggaggggattgagagggggggg

SEQ ID NO: 1117 - DNA, 420 bp, Zea Mays
cgagcagcagccgccaaggctgggcggcagcggcgttctggccgcttcccacggagatggcaacgcccgcccgattccctcggcagatcctttgctactcccgattcggctgctctcctctcagctccttatatggtggcttgatcccctggctgctgcttcacgaggaacgcgagttctctgctcttttcttccagttcgctccgctgttgagttcggttcgtcgatctctcgtctacccgtggtgatcctcgctggtagtgtcgggcgagtgtggaggtggtgctgcgcttgttcagcgtggacttcgtgtgctctgttggtgtgccttagcacctgtgtggtgcagtgcatctgatctggttgttgtccaccgtggtctggttcttgggctccctgctgcgcggtgttcctcttctc

SEQ ID NO: 1118 - DNA, 421 bp, Zea Mays
tggaatcggattacgtatctgagaatctgcaccattggactgatcttatttttggatataagcagagaggaaaggtaataagcatctctacacttgcatttgatccccagcagtgctgttgtagtacaaatatgttttggtttgaaataaggatagtgtcttctttttactcttgaacatatatacaggatctgtgaacacaaactgagctgttatttttgccttcttattgaagtgtcttctatctagccaccagttcattatttgactgccgagcaatttgacagctggttcttcgtcttgtgtgcgcggtaatacagtaacgtgtcgtgataacattgtcgctgttggtctcgtggcatcttccgaaggtagatgcgagctgggcctccgctcgatctccttctgattcctgcatgga

SEQ ID NO: 1119 - DNA, 423 bp, Zea Mays
gagattcctggattagagttgaccgacgaggacgccggtcttctaaggggggtggattgtgatatcctggcccaaggcttaatacaattaatagagtatccataccaacaaggtacatcttctttttcgaaagatgtctcgaaagaacctccaagttaagcgtgtttggcttggagcaattttggatggataaccgaccggaaagttttctcgggtgcgcacgagtgaggacaaaatgagcacaaaagactcgtgttggtctgtgaggacaatatatgatcctagagagctgctagaagtaagtaccgccggtccaggaattaacggggtgttataaagcctgccctggtaggggttatttgtatagatgaattgggtatggaatttgtgattttcacaattttacgaacgttttgtacttgt

SEQ ID NO: 1120 - DNA, 423 bp, Zea Mays
tagtaatcataactaattaagttaacgaaacctagacgtcacccgtttcggcccaacacaccttacatgcgacgcatgtgaggtatgttgggccggaattgtccctttattggacagcctcggggtgaccgacagagtccgtgtttatgacaaaggcatgtgctcctgcttagtttcggcagcataacccctgtgttctccaattgcaccatttttaggcgtgcgattggagaacagcggggttatgctgccgaaatttcgcacgaccacatgtcttgtcataaatacgggctcgtcggtcacgcttgggtgggtttaggacctatcatttcctacagatgtaggggcgtgatttcttcgtaaaaacggattgtccgtgcattacttatctaattaagttaacgtctcgtatctagtatggag

SEQ ID NO: 1121 - DNA, 423 bp, Zea Mays
tagacatgcaagcatctagcaactatgctttgcttggtctgaattggattatggttttgcattggtggctagctcggccagtcaagccaacaaatgcagaagcctctttatgacaacaaagatttcaggccatgtgcatatcatgtactgttgggggaaacagtccaaacggttgagatgggatttcagacttgcaagcaagtggtacctggcttccttctttttttcactagaaaaaatgttccttcctgtttaacaaaaaagatagaaaatgaaaaaagcctcaaacaggaacaaccaagcacacaaactgaagatttataccatttactgccaccaaggacttattatctcaccgtttcaacaagtttggtgtagtgctgaaggtactcattgtcactaatgccgcaacggaccagccaa

SEQ ID NO: 1122 - DNA, 424 bp, Zea Mays
acagtaatcgcaaaaagtaaatggacaaagtgacacaatgatttttatcgtggttctgccaatgtctactccatgttgtggcgacctcctttggtcaagggttgcactcaacccctttcaagtgatccaaagatcaaacttgagtgccacagatatcttccttataccaaaatcccgttgtgaggaatctccacaaattggagtctctcatgccttacacaattgattacaaacaaaatcggagtaagtatgggagtagaaatgcacacaagagcacaacacatcaacaacactcacaagtgaaaagagagagcgcacgaaacacaacgatagagttacagctcacaaacgcgttcaaatctctctctaacaaaacaatagtgtggttacaaagattcggagttgtagtgtgctcaaagagtgc

SEQ ID NO: 1123 - DNA, 425 bp, Zea Mays
ttcgaaggcgtggtcacaaagtctctgagttgtagtgtgctcaaagtatgcttggtgtactgctccatgcgcctaagggtcccttttatagcctcaaggggcctaggagccgttgaagtcccatttggaaggccctcgttgccttctatctgcgggtgcaccagactgtctggtgacctttcccaaacattgcctgctgaggtgaccggtgctaatcgcatagccgaccgttggcatgggccaagatctattgctcgcctggtgcaccagacatgtccagtgcataccggatgtgacggaacctcccaaggtattaggcccacctacagttgtccttgtcctaaggatcttagacaatcatgtagatgcacataatcactcgacaagttcggtactgtatcttcatcatttcgcacaagagcgct

SEQ ID NO: 1124 - DNA, 425 bp, Zea Mays
cgagtatggattacagagttctaaagaatgaacattgacattattataaaacggatgccatcctgcatgtgcataagagaattgaggattggggcactaaaatggatcgggtacctagtgaagatgcgaggattatggcgcatgggttcggtctccgcacagattggttgctcccctcgggtttctttaatagtcgcagtttggttgggggcgccgaggatgttccctccatcgacggattgagggacgaaacgaggccgtgtaatccgcaatccgtgcctccttccatcaccgaattgattcccttccatcgtcgcagagcggtagagatttcggggcggattgcggaatgcagcgctacgcggaggaaggggacaacatgcggtttgttgaaacggtgcgtggctacgtgtagggagcacgct

SEQ ID NO: 1125 - DNA, 425 bp, Zea Mays
gccagccagccaggagcatccgacctgaccggactataaagctatgcgtctggtgctcctctccttcttttccttagaaccctaacctccgccgccttcgtctcgagtccgggcctgaggatctcgcccgagccgccgtcctctgcggtgctgtgggctctaaggatgtgctcgtcgcgctcttccaaccacggtgttggtgccgcgctctcccacctcttgatttcccccggccacatgctccttggccacctctgcgccatcccgctggagactatcgtcgtcaccggtattcgccacgacccagggcagtacctcgacaaagaaccgtgcaccatcgtcgtccggtgtccgccgtttgcgcagtgaggtcacgaggatctgaagaatcatcctggtacctagaatctcaagtgccaggcaag

SEQ ID NO: 1126 - DNA, 426 bp, Zea Mays
ctgattaaatcggccaccaaaacgccattgttgatgcagtcccggatgaaatgaaactgaatgtcgatgtctttgctacgatcatgtagcatcgggtttttggcaagggcaagcgcagacttgttgtcgatgtagagcaacagcgcgatgaccttcgtgttcagcagatctgcaaccaggcgtgacagccacactccctgacatgccccggtggcgccggcaatgtagtccgcctcgcatgacgacagcaccaccacacgctgcttctaggactgccagctgaccggctccggccaaggaagaagatagcgccagaggtgctcttcctgtcatctccgtctccggcgtgatcgacatcactgtatctgatcaattctagcgttcctttcccacggcgatatacacacccatgggtttttgttccgg

SEQ ID NO: 1127 - DNA, 426 bp, Zea Mays
tcaaaatcgaaaacaccactttcccacaaccaaacaaaccaatttagacaaagtgtgacacagttacccaccaatcaaacagccctaaaacagccctgagtctcatatatgtcacggctcccttccttccgtgcatgaatgcaccacgctgacaagatctgtccgtgacgccgctggcctgctccttctccgcgacgccgtcgtcgcgcgcgcctttctcagcgacaccgtcttcttgctcctctttctccacgacgccgtcgaccgtcgtgctggtcctccttctccatggtgccactacgctcgtccgcctcaacggcggcggctcactgctgcctgcctgctttttgggcttcgtagcctctcaaccagcaatggcgtggccgagttgagtaggtagactgtactattgcgtgtttgtttttg

SEQ ID NO: 1128 - DNA, 427 bp, Zea Mays
accgagagggattggcgtaggaatttcgtctcctccaggggcgatcccacggcgcgggatgatgtctccggcgagcgattgccacccaagcacgatccgggtttcccccaccgacgacctccacaccgtctgggcacccgcgcgaccctgcttgagctccccggctggctatcggcccgcagacgcaagattctgccacaatgagctggtttccccctctcacgacgactgacggttcttggcagcgcagctttggttcacgtctgtggttggggaagaagaaatgtgcgcacgattggcttgtatagcccacgaatccagactccaggcgaggcgtgcgacgtgaggccgaaatccccgggtggagagccagagcgccgccgcatatggcagtgttggttgtaacaaccctggtgggagaaggtct

SEQ ID NO: 1129 - DNA, 427 bp, Zea Mays
caggtggcaagtattttcacaaaacctcttcccaagaagcatatggaggcaatcttggagctgataaatcaagatattgtgaagacagcgaagaacaaaaagaaagggagaaaggtgacacctgccctcgaggctgtggatgtgggagagagctgagcccctggtctgggcaggtcggtggtgcttttggtgaacaatgtatcctcagatggatagcctcgctcggcgcagctccgttccattcgttcttggtggtacctctgctagctttagcgattataggcagtgccttttgttccgtggcatgcctttgtatctctgcccttttggtttatggtttgaggctgaactgtgtcgtacctcaacattccactgttttatggccctagcttctgttattgtggttctgcagcgtctcttgctgttt

SEQ ID NO: 1130 - DNA, 428 bp, Zea Mays
ctccgagccgtccgtgtaccaccttgtcgtcatccaccgcgaccccgggcacgtccacccgatggtgactcggcgcaccgctggcgttcttcgccccgtcaaccggctgatcctggcagctgctaccacctgcactccaccggacgcatccccagtgccctcctccgttcgcattgccctcgccgacccacattggcgttgtgctatgcaggaggagtacgtggccctcttggccaaccacacctgggacctgttgccgtgtccaccaggcaccaacgtggtcaccggcaagtggctatttcgccacaagctgacctcggatggctccctcgaccgctacaaggcccgttgggtccttcggggcttcacccagtgccccggagtagactacgacgagaccttcagccccgccgtcaagttcgccactg

SEQ ID NO: 1131 - DNA, 429 bp, Zea Mays
atccaaatgccccctcccaaaaagttagggccctcaaaaatgttagttcaaaaatgaataggaatagggtcggatcttaatctgatttgatccttacagtttgtagtgtaaaatctagagcccattaccacccctatgcaccccctctccatgatccagcacccgggaaaatcacaaaggaagagaagcagtgaggagatcgagagagccgtcgcacgtagagagaagggaggagtctcggatcggtgggaggagacagtggcatcgtggcctggggtcgtgccttgtgctcgtggggtcatccgtctcgcgccgcgaattcccagcggtttgccggccgaagtcaaccattagcacttcgggggcgctcgtcggggttggcagttgtcgccgcaccgtggatcgggtcgctcaacatctctattgccg

SEQ ID NO: 1132 - DNA, 429 bp, Zea Mays
agggagggggcgcgttgggcagcggggcttgtcgcacatgctaggggaagaagggagagggactgcgacttcacggtgaagaaaacgaagaatgggaagaagaaaaaatggagaaacagagtttcctcaccgaagaagaagatcttcgccggaggcaagaagaaattcgtcgattgatgacgaaccggaggtccgaaccacgaatcgaaggcacccagacgaagtcctcgacgatacgaacgcatcggtactctcggattttgccaacgacgcatggattgaaagtaattgctcactgaagttttggtgattaaatatcaaacccatcactttgaactaacatgctactgtgagtatgagcacaaggtcacaaagaagcaaactgagagtggtaggagtgaattgaacattctattaatttggagaaac

SEQ ID NO: 1133 - DNA, 429 bp, Zea Mays
ccgcctcccgctgctcatccgattagcctccgagcaaggttaatgtttggagtttctattggttgttgggagatcctcaaagcattgtattatcagtcaaacatgttccaggtattactaaaagaaagcgaggctatccttggttcgaaacggcgcgcgagaaagggacgaagcttcgcctggctgacggaaacgaaggagcgagagaagaagcttccgctccgaggtacatacacacgaagcggaagtagattgtccagcagaacacgagagagaaaaaagacgatgatttgtagttcgtgtgtataggatttgtgggtatttttgtatttgtatacgaaacagtatctcacaactatagatagagaaataatgttacacattaggacacgttttggggccgaggaggaccggatcgtctctatctcc

SEQ ID NO: 1134 - DNA, 429 bp, Zea Mays
caagtataaaccatatagaaggaagggtcgttacctacaaacatcttattaggttgttggaccacctcaagatatggagggaattgaattagcatgttgaatggctgcacaatagtatgtgttgtcaataccaattctatactatgccagaaattccgaaattgaaactcccccagtttggaaaaaacaccactccatgcaatgtatatgtgcatacttgtacgagtaaggcgtcgaaccgttgaacattttcgtggtatgaaattgctttgattttggatccctagatattttagaatgcagatcatatgagttagagaattacatgactatattgactttattttaatgtttgatgaagtggctcacaatgatgtcctgtagaatgaagtgttggctaccacaatgtctagggaacttaaaaactat

SEQ ID NO: 1135 - DNA, 430 bp, Zea Mays
aaacaatgttcttatgtggttaaactgtttgatattattttacttgctgagatgtgtcatctcactcttgcattactcaatgcaggtacttggtacatgttgggaatgaggggagtagcagcacgtccacttttactctcacaataacgctgcccaggcgcagccattatttaattagaaacttattgtcaaaggaagtttattttctttatatggtcgtgcgcactggttaattcagttcaggtcatatgtttatcttcccttgctagtcgattaataatacttagtatgttttagtcatgttatatgtttatactctgttgcccccacttttatgcaatcttgcaaaggggatgctgtcgaaattttatatatggacgtcggaagtgtagttcagtagcattgcgggttgtttgtggaacccggagtg

SEQ ID NO: 1136 - DNA, 430 bp, Zea Mays
tataccctatcatacttcggtaaggtagcaaaaacaacgatgaatgacaacttaaaaggtgacaggtcttggatcactgagtttgactaaggtttctgaaggtaaaatacttatagaattagacagtatgttatacttactcggaggtgtgttttcctgattagttattgtctagattgtttatgtccataaagagcaaggtgaacagaattgctgacataattttaagaaacgagtgatggctatattgtcataacatggggggtcgacagagacgtgcccttctccgcgaccaccaaacaggtctttgatgtggctgttgtgctctctaagaacatgcatgggttccagcttcatctcgcccgagcacctcgccatcgcgctcttcaccctcgacgatccaactaccaacatcctcctaaggaggtag

SEQ ID NO: 1137 - DNA, 430 bp, Zea Mays
tggcctctggcaagcgggggcggatccgcactgtccggtccgcggcagcgatagcacggcccggcgggatccgcgcgtccggtcgttttccaacagcgatgcgcctcgggccgctccttccttccttccttccgggaccgcaagcccccgtaccacgccaagcgccgaaccatgcgtccatgctgtacggcgacagctcactcgcgtccgcgcgctcgtgaccgttgcgcgcgcgtgcgtgcgtgcgtgcggggcatgccgcatcccgcatgcttgcgcgcagaacgtcccgggagaaggagaggccgagggactagtgactagtgagtgacatctcactttggacggacgtcggacgttgcaagtgagtggcactgtggtttggtttcggtgtgtggtgggctgaccgacgcgacacccgagagaggca

SEQ ID NO: 1138 - DNA, 431 bp, Zea Mays
ggaatgtcacctaagggacgtgaaaaggatcatgagatatttacctttgatcttgtcgggtattcagatgttgattttgtcggatgtaaggttgacaggaagagcacatcagggagttgtcagtttttgggaagatcccatgtgtcttgggctttaaagaaataaaattcagtagctctatccatcgtcgaggccgagtgcattgcccagggcattgttgtgcacaaatactctaaatgaggcaaacccttaagccacaaattgaacaagtccctctgctatgtgacaatgagagtgttatctgtatggcagagaatcccgttgaacacagttgcactaaacacaaagacatccggtaccacttcctgagagaccactcacaaaggggagatgtcgttattgaccatgttagcacccacaaatagttattc

SEQ ID NO: 1139 - DNA, 431 bp, Zea Mays
tctgattacttgctggtcacatagttctactctcactcttgtgcttatgatgtcttttgtaggtgactcgtattagatgcactgcacgtaagtcagttgttgggactcgctctccctagcaagatgatccaacgggggagtgagagcaacgtaaacaaggtttcaattcgagatggcaaaagctctgttaatctagcctctcaagggcactgtgcgggggtatttataggtatctgagtgcccagcatcctgagttaaggactcatgtgccctcaggcgcctaggttatccccagaatattcccataaagcagggttacaaagtgtaattatagggagacctttacaaatcaggcctgtaatgcgcagcggccacgcagggcctgttacaatgggccagatcgcacgtgggcctccattttggacgaggtc

SEQ ID NO: 1140 - DNA, 431 bp, Zea Mays
gcgaccgctgccctatgcgtcttcttcctcgattcctcgcgggggtaacgacccgcccgagctgcccgccgaacttcgcgccagctaggttctgcaaccctcctttgccctgcgcctataatacccgagcagtcgttccccttctcctctctgttcgtcccatcaattacgccgccgctagtgtgcatcgattaggagaatgccgtgagtgaagccgtcgcttaccaaatccaaattgcgccgccgccatagtggcaactccgttttgcctgcgctaacactttgggcagtgctggtcgcgtggaaggcagtgggtgcctcgtctgggtggattcacgctctgtgccgccggaatcgcacgccgcagctccacggtcgccgcaggatcacacgtctccgtgggcagggatctcgacgcatcgaccaccggt

SEQ ID NO: 1141 - DNA, 433 bp, Zea Mays
gaaatttcaaggaccatgcatgatggaatgcgggtaaagccgaatgttattgttcagaatccatgctttcaactcagcatgcttcatcgagtcaatgtacatacctcagtttcattttttaatgcacatctcaagtggtagcccacttgtcgaacagcacagtgagccaaggactagatgcgagcatactactaaggttatctccagcatactacatatcttactttctatcacacatcctatttcaaactccactcgacaaacagtgtattctacggtgtaaaatagtgttttgcacgaccattacgtatgatctgttgagcacggcctaaggaccacatactctaatgacaagtccaagatagtactaagtggatagtggtgccttcatctgcatcaaatccgctgacaacaaacagaactattagattgc

SEQ ID NO: 1142 - DNA, 434 bp, Zea Mays
ctagtgcactaaacccacgttcaacccctgctacacgagatgcgattatcgcgatcacatgagggggagtgcttaccagagtatggcaacgcagacgtcgacccacgagacgtgacggctccatggcagatggagaagtccggcgagcaattcacgtcgcccgaggcttcgtgcacccagatttctctctgagcacaacccacaaatacgtctgaacatctgggatcgagtcacttgtgttgagcggcgacggaggtgaggttcgatgacgacggcgacgacccgattcgcccacaactcatagtgatccaacagccgtcgatgattcacacgtgagggtggttaggagggagtggatatgcctcaaggtcttatacttcggtcgagggagaggtgccagcaacccacgcaccagacaaagcggcagggttcca

SEQ ID NO: 1143 - DNA, 435 bp, Zea Mays
cctcctcctcctcctgctgctgctcctcctcctcctcccccctgggacgtctaaagcttgcttgcactttttgcctttttcggaggccacgggtcaccgctaacctccatccatccatttgccgattcacctacacagcaggaacaaacgaggagccctccaaggatatgcgccccgccgcttatacattaaccaaagacttgcctccaatcactcgtgtctacctcttcgagttgcgaggatgcctgcgaatgaccaccatcccaacggcctgctccaggagtcagcccctggactccagcatgatgatatggaaaaccagcagcagcaagtctgctgggagcgcttcctcctaaaggacactctcaacgtcttgctcgtggagagtgatgcttcaaccaggcaggttgtcagtgccctgcttcgttgctgcat

SEQ ID NO: 1144 - DNA, 435 bp, Zea Mays
acatgccgagcacgtcgacgagcgcgtgcatgacgctcaccagcgggagcagcgcggagggagacgacgccggatattagcagcgagccagcaggtggtcatgcctcatcgcccggtacgcgagcctggagttgccgagcgtggcggcagcgagctgaaggtcaccgggtctgctcacgaccaggctgccgacgccaaaagcagcgccgtgtctcctgcagctttcccctcaccatctccatctccggccgttggttcgcctcgccacgaacggcgaacccccacgctcggcgttgctgctcaccccggcgagcgtcgcctgctgcaacatgtacgtgccggtacctcagccccgtcacgacgagctgcagagaagaaatgcacgcacgagagaaggggcaagccagtccgttggtctcctttaattaaataaaa

SEQ ID NO: 1145 - DNA, 435 bp, Zea Mays
atcaaattaacacacatcaatacttattagtttaatccaacacaagtgaaggcattattttgctgacaaatgatatctcgttcgaaattgagatgatctgagtcaagctaaccacgagccgagcaaactaacaagccacgattgtaccccttgtctttctcagtacgaacggaccaaagatcatttcgtcgcagctgtggacaaaggatgtaagcaacaacactcatactctcgtagtctccgctagacctggtctcatggtagctctcaagccgggacacagatgcaaagctgcaggctgcaaacatcaacctgtcaaagtgcggggtccgtgcgccggccgtcacactcctctctctgctaatggttccagctggtgatctatcaatttccgtctttttggtttgtgaacctagagagcctccgtctgcatct

SEQ ID NO: 1146 - DNA, 435 bp, Zea Mays
catgcagcttaacttgagataaccgtgctaccgtggaatgggacgccgttggctgactaattaggaaagctagtggaggactaccttacccgaaagtggcaagggcggtagaggagctgcggtatagggaggttctcaggtcgatcatgctgcgatggattttcggacgagggactcgtatattgcccttctcagaaaccgtagcgggttttctgaaactagtggaactttgtaaaggcctcgtagtgctaccctgccttgtctcctcggtagagatgaatgggaagtcgcgatcccttggcaaatgggtaacacgacttgtggataaagggcacaacctctatagagtctaaaactggtatatcagtcgtgctcatggttaagagcaactcagtactcttgcatgattaattttatggaactaacctcaatttg

SEQ ID NO: 1147 - DNA, 435 bp, Zea Mays
gtttccgaaatcacggcaaaatgagattctgagattatcacccagtcgaagaagatttttcaacgggatgacgaaaatacattgaggatcgagaacgtgtatctctaaatatgttggtacaaaagcaccaaagacgtttccttaactggactgttggtacaccgagatgaagttgtcctactatgtgccgtagttcttaaaaaactaaacaggcaaagagcactagctaatcaaatgaactctacgcgtctgcactttgttttcatgtggccgtagatacgcgcggtcctgttgcgtgctccctgcaccaccgctgcctatattcccatccagctggttcttgttggcgtccagcggagccgcgcctccagctctcgtcctgccaagctgcttgctgggtggtgtgctctggcgactggcgtgccgcgaccaacc

SEQ ID NO: 1148 - DNA, 438 bp, Zea Mays
gtgcaagcttctcgtgagatccatgacactttaaggttgaaattgaaacagcggttaagttttggctccccacatggccacttatcatcgtcgcctatttgggtccttggagcctggaggccacaccagtaggtctcggcaggggagcaagcaagcggtcggtcgccgatggaggatggcagtggaacagacaaagtggcatggcgctgccggctaccgcagtgtcagagggcgcaccaaagccagcactggcaaacacgctcgccgcatgcatgcacacgcctggcccgatcagactggacagcgagatcgatcgatgcgcacggcgctcgatatgatggcgccggcatcgtcgacgcgacgtcgttccacgccgtgtccggagtgctggccggtgcagcgagatggatcactggcgaaaagctatggccggagcag

SEQ ID NO: 1149 - DNA, 438 bp, Zea Mays
ttctgtacaaaataataaaataattacatcatatggagacaacgatctagcaacccaaagttgactgggacacgacggcctagacctctcacgaactcgtcacagcatcctccatacgcctcatcctgcggtacctgttcttgaccaatggggggtgtgagacagcaagggtgagctcacatatgttcatcgctcaacaagttgtggggaattagatgcatgaactcactaaaggtgggagctcatgtgaagtgtaaggcctatcaaagaggatggctaaagctgagcatataagtagataccaacccaaataagtaatagatcaaaactgataacaacacccgcgatgcaatacatatgacaaattaagtttagttccataaattacttatgtgagggtccgagctgctcatgaccgtgagcacggctgatatatca

SEQ ID NO: 1150 - DNA, 438 bp, Zea Mays
acctttaggcttctttccgatctccgggaagtgcggcgagggtttcatggcgatgttggcggctgcaaggccggcgcgccggatagaggcgggggcaggggaactgtcaagggtttaactatgcgaacgcgcactgcaggaatggacgagctcgctctctcaaatcggccgaatgcgctcgtcccaccgagacgccgtcttgctccgtctccctgtctcgctcacgcggacgctccacgcgagcagggcaggccgaggagggcgacggcgcggccgggcgacggcgcgaggagagcgatggcgcgaagagtgcagaacgcgcggctcggcggcggcgcggctgtgcggcggcgcggttgggccgcggtggcggagaacggtgaacggaagaacgaagaagaaagggaaagaagcctttgtatgacacgtgggtcccgc

SEQ ID NO: 1151 - DNA, 438 bp, Zea Mays
acaggcccgtatatggcccagtgcaactgggccgacggaaccaggccaccaatatcagtaggcctccaattatgaattctccatatacacgtggtccatgtatgctggtccaggatatacttggcctccaaatttgtgcattacgattggaattctaggctttgtttcttccttccgtagttccgccaatctcgctagctgaaatgacgccgatctgggagtgcgccgccaccacaaacgctccatcgccagtcatcacgccatcgatgccgagctactatggggccgtgatctcgccgttgccgacgctttgaccgtttgccgcacctggacgttgcaaggtcgacgcaacaagccaatcgagactgcaggtatgtgatcaggaaacactccattgtttttttcctttgcttgcaaattgcaatcgataggcgaatg

SEQ ID NO: 1152 - DNA, 439 bp, Zea Mays
tccctccacactagcgaaccaccccatgacccaatctttctaggacgctagtcatttgtggtggcccttggagcctagctatctaatactaacaaaccactgactagttgttgtgttctagtgctcttcctttcctccttcgatctctctctctctctctctctttctcgctagctcctcctttttctcttctgtagtatcagtctatctctttctatcaatctaatggcatcctagccccttgctgatgatatattacgtatccctgggctcgatctcttgtgcatctgtatctacgggttccagtaagggaggtgctgggccattaatggcgaaacagactttcagtttggcgccatgctcgctgcatctaagaggccatgcaaacagccccggcttttctcctggcttcctcgccgttcttcgcctgagagagaga

SEQ ID NO: 1153 - DNA, 440 bp, Zea Mays
aataaagaaatattggcacacctttttaggcactcatcatgggggagacggaacggtgcccgttgtctgcgtcagccggatgggacgcatggcctgcagcggaattaatgcgatgggacgggaagcccgcgggctatccgttgcggcgcgcgtgcgtgggagttttgagaaatggaaatccgtttcagttttgatttttgaatgcgcgggggctcggataaaatctcggtggattcaccagcgccctttatatatttgggagaggaggttgccgttggttcttaccttgctctcacattccagccttagcccccgctgcttttttcggtcgcggccaaagacagagaggagtaagaacttagcgtacctcgccgccgccgccgcccccttgcttcgccatggccgagaaagtgaccgtccttccaccgcgcaatccgtgg

SEQ ID NO: 1154 - DNA, 440 bp, Zea Mays
gcggttcccgccttcccggtgcccccctcttaggagggagtgatggcggcgaccccgggaggcgcgagcgtcagtggcggccagaggcatgcacaacaacgtcacctccctattctacatgcaacggtgacgccctccctccaactattcttcgagcttcgatgaactggatgccgatgcgacagcgtggaacatccgatccggcggttttggagcatccttctccgacggcctcatctgatccatgtgttatgcattccatgatatttttatatcgaccactgcaatttttatacattccatttgaggattttatgatgatgaatatgttgtctctcgtgtgaccttggtatttctacgggaatcacatttacgctacatctgtcattattttatgcgcaaacttgatgatttttatcaacatctctcactttggctct

SEQ ID NO: 1155 - DNA, 440 bp, Zea Mays
ccgcaagtgccaaattgatttgggcagggactgtgtgtttttgggtgtttgtattacagattgtctggggcctaagcccggacagtactgactcccaggtcgcggaccgtccggccttgtgtggcggacagtctgcgtgtgttaacccttcatggtcagagctctggtgctccaagttgccaggtcttagacagtctggccaaggttggtggattgtttgaacctcgcttttctaacagctctgatagatttcaaacgggaaaactagacgttacttgtacggcagacggtccggactcagggcgcggaccgtccgcgtgtgcgcagaaagtgtgctagttgcacataacggttggaattgagaggtgggccataaatagaaggggagctcgtgtgtgagagctctcttggccattgcttgcacacattgagctcatttg

SEQ ID NO: 1156 - DNA, 442 bp, Zea Mays
agcagaccgggcggctcgcttggcggattagtagaggatgacatagatgatccagtacatgcagagccttgacgttgcacagggatttggtccaccacctccgttttccctccatctgaccctgctcggttccatactcatgtgagtatcaaaattttagtcctacatgatatatattcatctagtctgatacatgcaatctcttctctgtgcagggacaatcagcatcatcaaacaaccctcatggatcgcccagcctatcgtcgaactagtccagatgtccaccttgctgaaatactttgtgcacatgatcttatgtttgttggtgtaggtaatactttgtgaaataacttggtctgaactttttaatattggtaatactttgtgagatacttgagacttacgtttgtgagtgttggagacttatgtttgtgaaacttgt

SEQ ID NO: 1157 - DNA, 442 bp, Zea Mays
gtgaatccaacggccggaggcaacagataccccttcgctgcggtgcatttgcaaaagaaccctcgaacttctatgaaataagctcgccgtccataatggttcaaagagtattacagtccggtccataaacttacatttttgcccccgtagttaataaaaatactagttgtcgtccacgggtttgggaaatctcagaaattaaaatctaaaatgattttcgatgtaaaaataattctagaaaccttagtcctgttgggggtatgcttcgtagccgaagatcctaaaggaagggaacaccttcggcagatcctatcggaagcaacgccgaagctatcacctataaagcttcgacacagtgatagatctcaagacgaaggagtgaaccgacttaaagatgaaatgacttaaaagacccgcgatgttttgtgtcattattgtagtc

SEQ ID NO: 1158 - DNA, 445 bp, Zea Mays
cctccttcaacctcccatcgccgaatcggtcgcgcgtctcctccgtccaaatccaccgtcgcggaaactagaactcgcccaacaaattcggcacgttcgttgcacctcgaccacattgcgcagataaattgcttgcgccctcctccgcacgttcaccccatcctccctaggaagctagaaccactcaccccatgatactcgcacgggaggcgggtcaccctctccgacgttgtgcgaccacaccaacactcgggtcacggtgggggttgcagaatctttgtcgggccgcgtggctcgtgccagggtcctcgccgggccgagcttgtagttgctgcgccccaaatttactcaccggaagcggggttcgtcgtggagtcgcccggtgacgcggactggtgccccggccttgccctaaccctgtacacgagaatctgaggatcatcct

SEQ ID NO: 1159 - DNA, 446 bp, Zea Mays
ggtgggggacggttggttgggccctaggcgacggggagttgcgcctcattccaaatccacgaaaatggagtagtagcacccaatacctgacgacgcgacaacggagcagctccagcgagaagatccgccggtgcaggatgatggctcgcctgcctccagatctcgtcaccgtgggcggtggcgagttctcttggaaggccccccactgtgcgaccttggcatgcgcatgcgggtgggagaggatgaagaggcattccacccaagacctttgtcttcttcaacatcttctccatcggtcgtgctccgcgctagtgggaggacccacttcagttctggtcatcaatccatcctccggagtcagcggtggccgtcggggcgcatgggtggtttgggagggagagagagatagaggaaaacatgtggccgctcgtcaatgggatcgcggc

SEQ ID NO: 1160 - DNA, 446 bp, Zea Mays
gggaggccagagggcgtacggatgtgatgtactccttgccggagacggtgtggaggaggtcgaagtcgatgatgcctcgctcctgcagcttccgcaccaactccaccacgttccgctccgacaggcgcacgctggacctcgcgctctgcgccgcctctagctgccgctgcagctccagaagctccgcgtccatgggcgcggccctccaccctccttcctctctctctctctctctctctctctagactcgccggagacgcggaggacgcgacgacgacggcgacggagagatggaactgcgggggagaagttttcactggcaggtggggccctgcgggtgccggcggcgtgcgaaggaatagttgagacggaaggggatctggcctctgggtctgggggctggagctgcagcggagggccgacaggtgagcccagtgcataaaaat

SEQ ID NO: 1161 - DNA, 447 bp, Zea Mays
ctctgatggactactgctaccccagctacgtaacaagggatgcagagaacatggcagataggtttgtaagtcccttactcgaatctgcacgccggtgatgaactccaagcggcccagccatgcactaggcggatcgggcgttgactacaggcgctagtggaggaaccgcgtccgcgcgcacgtggtggaggggaacgaggcgggagaacgctacagtggcaggggtgtggctggcgctgttcgctgtctcgcgatgcaaagccagcagcggtgttcctacccttcaccgcctaaccctgcaagcagcggcctataggcacgaactccgccccgtggccctgcccacgcgaaccaccgctctgctatccgcaccggccactgcgcaccttctcctttcctctctctctctctctccacctcggttgcgctggctcggtaaaagggaaa

SEQ ID NO: 1162 - DNA, 447 bp, Zea Mays
attatttgggaagagcctgcatggacatatttttttttggtcaactgtgtatgcaagagaagctgagcccctatttatttctgatggatcatgtatatgaaatactacttggactgctattaagtccactgcgcaggcatggaaatctgttgggaaaggcgaaagaggtgaggactgaggacagcagctgggagagagagagagagcgaggaaaatatctatctcaaggcacggaacgacgaatacgaggttgaggttggggttggggtagggtcgttgggggaacttgtggctggctgcagctgctggatgcggccactccgcctcttgccagcctcacgtttcccctcaccacttattcctctccaccaccaccacgaccgcctgcctgcctttgggtcctacgaatgtatagcaaaactctgttgaggttggtgttaagtaggc

SEQ ID NO: 1163 - DNA, 448 bp, Zea Mays
gaagcatagagtaactctacaaaccaaacacaccataaaaggaagcacttccttttctctctttttccccatgggttactaatctcctccgcggatcacgcgcaaagccgcaaactgactcacaaacgccatcgcatcgtatagaaaagaagattaaaaagggaagcgaggaggaaaaaggcttgccagtttcatcatcatcgatcgcgttccacgtaggacggagtatattcatcggagccgttggcctcgaacctctcgctatccatatccatcggttccatatgatgacttcccggcggggatggataactggcgagacagtgcctcctcgtcaggcgatcaggccgatccggagcgcgcgggcggagcagttctcgtgccgcaagcatatatgaggcatggcaacacgccgtcgatcagtggcgttgggaattggaatcttcca

SEQ ID NO: 1164 - DNA, 448 bp, Zea Mays
tccacctcgtcgcagcttcaaaagaggacaggcccctggttcttccccaagtcgcgcgcacctcgcatcccttggccacaccaaatccgaccctgagccacaccagtaaagctctgtgtgcttgtcgcggacagcagtgatagaaagcgaggagagagggactgggggaagccgcctccgtcgttcatcgtccacaatgccgatggggcctggggtcaattgctcgccggtgaagatgcttcgtcgggggaccgcaccgatccgcggatggggtatcgccacgctatgcactgccacggaatttgtgatcgatgacctgtccaccgtcgcgcgcgggtggttcgctgaacgccataggcgggtccaaactcgacgccgtctccatctgcgcctccctcgccaacgtgttcgccggcttcgaccactggatccgccctcaaaaggtgag

SEQ ID NO: 1165 - DNA, 448 bp, Zea Mays
cgcgcggataccgtccgcacctacgacggctgccgggggcgcctagggcccccggggctttggccgcctgcgcgggcgacaatggtccacgccccgagccgatcggcagaccagcaggagccgttccgcatacggccgatgcgcgtcgccagcccccatccgcttccctcccggcaatttcaagcactctttgactctctttccttttcatctttccctcgcggtacttgttcgctatcggtctctcgcctatatttagccttggacggagtttaccgcccaatttaggctgcattcccaaacaacccgactcgttgatggcgcctcgtggtgcgacagggtccgggccggacggggctctcaccctcccaggcgtccctttccagagaacttgggcccgatccgtcgctgaggacacctctccagactacaattcgggcggcgaggc

SEQ ID NO: 1166 - DNA, 448 bp, Zea Mays
cctccttcaacctcccatcgccgaatcggtcgcgcgtctcctccgtccaaatccaccgtcgcggaaactagaactcgcccaacaaattcggcacgttcgttgcacctcgaccacattgcgcagataaattgcttgcgccctcctccgcacgttcaccccatcctccctaggaagctagaaccactcaccccatgatactcgcacgggaggcgggtcaccctctccgacgttgtgcgaccacaccaacactcgggtcacggtgggggttgcagaatctttgtcgggccgcgtggctcgtgccagggtcctcgccgggccgagcttgtagttgctgcgccccaaatttactcaccggaagcggggttcgtcgtggagtcgcccggtgacgcggactggtgccccggccttgccctaaccctgcagtacacgagaatctgaggatcatcct

SEQ ID NO: 1167 - DNA, 449 bp, Zea Mays
tgcccactattgctactactgaggtttctgatgataaaattgaagatgcaaggtaagtagccactgcaagcgattcttttattcatgctaaatcagagccttcgggagctacgctagtagagctggcgaaagaaaatcttctagaaaagcccaggacacctgctcccgaagcaccaccccagggtgatttggactacattgttcgacatgcttcaggaaaacaggtatcaggagatcaaattgccaaagtgcaacactatgctaaggagctgaaatacccccaagggtccttggtatacggaggagacaacgaggatgacttcctttactgtctacctgacagtaaagagatcaatgtttgccgtgaaatgatggacaacatggggtatccaaaggttgagcttggtctgtctgtaatgacgaaggatcagcctcgcttacaatagctt

SEQ ID NO: 1168 - DNA, 449 bp, Zea Mays
gtaagattttttcgctacgcatcatatatgttaagaagaagaaaaagaggtctaaaatagaccaaatcaaaaaacaaaaatcaagcaatataaatgccacatagattttcatcaaaagagactgcagatgcaaacaacacttgtacatacatacacctcttagctaaatgtactaaaacctaattcatttggctccctcatctattcataggcgttttggtcccagagagaaggggcagtaaaagaaaaagaaaagacaaattgttgcagctagctacacataatcccagattcttctgatgtagtgggtttttacagagacatccctacgcttgggtcgaatcgtcagcatgacctacctgggttacaatctggcaatctgtctgtcgtcgctgaaagtagtatctgcaggaggaaaatggttggtagcagttgttcttcattagcaa

SEQ ID NO: 1169 - DNA, 451 bp, Zea Mays
gtgcaatcaaacaatataattatgaaaaaacctaatttaaattcttagttccatgctacaatatccacaaccaaacgggtataaggttttggcgaccatgggatcgaacaagacttgatgaaagagacgagggagctagtagagcagctcgtcacgctttggcccctcatccatatctccgcgacagtcggtggtctgattttcactcacgagcgtttggcatctgtttgtgctggcttgttgcgttgcggcggctctccccgtacggttcggccgcttcccaccacgtcctgcctgccggtggcctcctccttcatcccacaggccacaccgactcacagtcatcatctatcagctcccccttggaatctgctgtaaaaaagaattactagctagtatagtatatatcgtcctcattcaccttttttcaccctccgtggtggaattggaa

SEQ ID NO: 1170 - DNA, 451 bp, Zea Mays
ccacgaccttcttcaaccttcaaactataaccgtaggaacaccatggcacaggggaggggcagagacgcgccctggccgcgctggctggtcacgccgtgtcgaggggtcgagaaggggcaagcggctgcggtggctaggcacgctgcttacaggcgtgtgcgccagcgcgctgagcgagtagggaaggctagtgcatggtgcccaggggaagaaaaccggcgctctgcatgggcagttgccgggggcgcggccaggtcctcccatgacagggcactagggacgcgtgaggccagggcgggcctgggtacgacgtaggcgcacgatgacgaggcgagctcgcagctcgacgagtgcggcgctgcgaggcacaacaaccacgacgagacacagcgggactccggcgcgtgacgacggctgctgcgaggcacgacgtagaggttgcgcggccgc

SEQ ID NO: 1171 - DNA, 452 bp, Zea Mays
cagagaaccaccggggcagaaccagaaatttttcccagactcagggagcgcctgggatggactgcgggtttattcctgaaatccccaggatctcttacgaaaatatgccagggcgaaagggtatcgtctaaatctggtcgttgggtcttgcgcggatggtgcggattagatcgaactgccagcgaagcggtacgcgttcctggccacaggatccaagatctactgtcacaggttcatcgcatcccaattccacctagtcgtccgaccgtgaaccgaccgccgagataaactccgcgaaggggtacgtgctcattctaatctccaccctcgctcacggatccgacggctgacataggctcccatccctattcccctcaacggctcaaagggtcactggagaagacgcaggccacggcggcgccatttgtcaacaaccgcgatcacccgctcta

SEQ ID NO: 1172 - DNA, 452 bp, Zea Mays
ctcatccctcgccgacgctccaagtcactctccattcttgggggcgaaagcatgagcaccaagaaaaggattttgtctttggggagaaagtaagagcccaaagcaaaagaccggacttcgtctttggtataatcttaactcatttcatttatgaccaaaggggaagatagcacttcgagggctctaatgattccgtttttggcgattcatgccaaaaagggggagaaatgagcccaaagcaaaaggaccgcaccaccacctatttcaaaaactcagtgttgaatattttttcaattggtatcctatcgtgttcaaaagggggagaaagtagtatttcaaaaatgatatatcaaaaccctcttgaacactaagaggaggatcctatttagggggagttttgtttaagtcaaaggagaagtgttggggtcgtgcttcggtgcgccgaaggtctc

SEQ ID NO: 1173 - DNA, 453 bp, Zea Mays
tactccatgtgtctcaaaaccgaatgcaactttgataaccgcgtgaataatagtgcggggaggccggagagtctagcttcgttttaatagaagtttcctagaatatatcaggccggagagtctaactttgatacaggggctgcaggttgacaacgaaagttgtcaatattaaagttgttcaggttatacatccgcagtactataacacaagaaagactcggtgtatgtttggttcagtttttttttttttttgacctgcctctacttcggaaaacgaatgagttaaatcaaagtgggttcgactttttcagccttttctctagtacaaatttggaatcagtttggaccctacttttgctgcttatccacgctcgttatgtataataaagagatgtggcaaatagaaaatgaataattaggtgttctaataaatgaaataaaaaatgtttttaa

SEQ ID NO: 1174 - DNA, 454 bp, Zea Mays
cctcaagtgattttgtaacagagtcgagttttggagtttccacgcgaatttacactgcggctgggggaagaacatgaatcttagcggaggcttcgcttcagctggaagaaggtgcggcacgtgaggttcaagttcaacaacctggtcaagaaagggaggctaaggctaaacgacaaaagttatggcgacacggcgaagctggtggctgccacgcgggccctacagggtcgcatgcattcctttgcggccgctcagaccggctccaacaagcaacgctaaatggatctgtactctatatttagagaaagaaacgtccaccgttctctccaacaagggactgtaaacgaatcggtaaaatatagcgtgcgttcgacgaacgctaaatgtggaggatcttcatcacgcacgctaaacgccggctccgtccacttcctcatgtgaacgacgacctcgg

SEQ ID NO: 1175 - DNA, 454 bp, Zea Mays
caaaaccatgtaaagcaatagcatagctacccaaatgattcagggataaacaaggtaaaaaggataaacatactagggtgacctattgggtcccatcaaaattaaacctatgcatgaataagtgatattaaagaatattattggggaataaatgtggtcaagggcacaacttacctgggacttaagattccaggtaccaggatgatcctcaggtgacttgacctcacttctactcgtagcagtacaaacaatcatggtatagataaaattaacatcacaccaatcataagattaaactgtataataatgatctacgtgttgctatgagattgcgggaacgagaacaactaagatcggagttatggttaaggaggtatgatttatggaagatctacgtgattcaaatattaaactatattataaattggttagcatagatcatatgagaggttat

SEQ ID NO: 1176 - DNA, 455 bp, Zea Mays
gcgatccgcagactggagatcttgcaggagcgcgcgttctcctcctctccctgatgacgagcaagagctacctcgctcgctcgctcattcgaccgaccccagaagctagcagcacagcccagaacgcagctgcaggctgcagccttgcaccctgcgtctgcgtctgtgtcgcaccgggcgccgggccagcgaactcccgctggactcgtcgttttctctcttcaggcgcggcgtggaagcggaacgcgcgcggcctctcagcgctgccgcgcgcatgcatcgcgtctccgtcctcctgtcctgcgtgccatgtgccgccgatgtgcgccacacctgcctggccgccgcccgcctgcctccacttccactccagtcgcctgtttcgttaggtaacagcagacgtacgccggtcgagttttacagtaccgccgggcgcggcagtccgtggattgaag

SEQ ID NO: 1177 - DNA, 455 bp, Zea Mays
cgctatccgccgtttcctctttctcccgcgccgaggcggaaccttcccctcgtactcaggtcgcatcacaggccaatctcctcccactcctgcaccgccatagattgcaagagcaagtctagcaaggtgccgcgagctcagcagcgacgttcatggacgcgctctctactgccaccgacggcaacagctcagacccaacgacggcacggcatgccaccgttgcatgaagcctcccttgccttgctgggttcaatttctcttttttgcagctacggtcccagatccaaatcgttgaatgaagcctccccttatcttgttgggttcaatttctcttttttgcagcttggatcagattagccatgaggtcatgggtttctccatgttgatatcgttagtgcacatgaggtgtttgatggaatgtccatcagccatgtcgtgcattgctgctatttttt

SEQ ID NO: 1178 - DNA, 456 bp, Zea Mays
ctgatgggcctgggaacactagagcaaccgtgtattttacacacggcatcacacattcacatttctctgtggccaaacgtgcttccacgccaacgaatgataaaatccttaacgcaccaattgcgttcgttcgctacctcagtacgaaacgaagcaagtttgatcggcaaacgccgtgccgtgtatagcagagaacttagaacccgaagaggtttgcaaggcacgagtaagcgatccatcacaacttcacaagtcacagaccacatcacttgcgttgtgctgcaaccatgagtgagacatgtacgctgaggctgaactttccactagttgaccgtgcgttgcgacggtatctatttgatgatatctgaacgtctagtgataaactagtgtgatagatctttcaaaaaaaattaagtgaacatatggctcacacatcatatattgcagatacttcac

SEQ ID NO: 1179 - DNA, 456 bp, Zea Mays
ttctcacacatctcaaatgatcgactaaggagggggtatatatagtccctgaaccaaatatagtcatttgtccaatgcacccatcgaacacgtctggtgcatccacgtaagctaggcacaacttcgtatgaagagcaatgcgtctggttctgatcgagaaagagaaaattctcctcccctaatgcatggcactattcacctatttataggcgtggagtacatctttagcgaatttacaatcataccatataatatatacatttaaactatcatacacaccgagggcaaagttgtcctttccttctcacatcatgttgactaagcttcaaaagcttcttgtggttttattcagctttatcaagtatcttcatcaagtatgcgcacatagtgacttacggaagcttcttccttatggttcatgtatgtcggtaattttggccgaagcttaccttcggc

SEQ ID NO: 1180 - DNA, 456 bp, Zea Mays
gggaaattagagttgtccgattagaaacgggccgaccagatcgtgcctaggcattaatgaagtggtacgtgcctacctacctttggatcttggatcagcgatgcagatttaaggcgcgaagggatacgtatcatcaaatctcgactgtaatcgagagatccgacggcccagatcaaactgccacacgcattgatctccaccgttcatcagaaattgacgatcactgggtcatctcccaccttctatccaagcacgacggcgtggccagatccatggcggcggctgggcgtggaccgaggaggagagggagaggctggccctccattgccgcagcggtgctgcccggttcgccctcgaaatcgccgtccaagcactctctccgtgtgggacgcggtagcgacatcgaagctctttctctctctgtgcggcaaggagctatcggcggccagattccac

SEQ ID NO: 1181 - DNA, 457 bp, Zea Mays
caagaattgcccaaccatactcttcgcccacagcgaattgcggtcccggggcggtgccaaatcgatggtcagccattccgtggcctccggtggtcctcccctgtaccaaagccatgaccacccatgccatggcgcggtgaagaccccgaccggtgcacgatagctggacgatgatgagtgcacggatcggcaacgacggtggtggctgaagctatggtgtctggcgagatagctcgaatgatgggaagtcctgggttttatgatgtgggtgaagtccagatttgttccgacctcctgaatcacgcgtgcagagatcacgacggagatcacggtggagatcgcggcattcgcctgaggttgttacagagtccgcgcggtgaagaaggtcctgacgtgggggtcccaccggtcattgatgcggtgtccgactagcgccagaggcccacgtgtaagtgac

SEQ ID NO: 1182 - DNA, 457 bp, Zea Mays
gagacatgagaagtgatcctccgatttagagcggggcggcggcagactgcgacccaacactatggccagggcttcgttctctccgatcaagattagattagaaaaatgaaacgtccatgccactaggaaattgaaacggcggtggactgcagtgtaggcactacgagtcagaaaaatgaaacatccaatgcattatgttgccgctcgggccgcatcttaatcgcctaatgggcctcctgtcatgacaccatactgtccagtgcactatatttcttttatttttttcctttttagtttttacatatacggtatatatacactcactggttttacagggtatgccggtgcatacctggcataccctgtaggtccgccactacctactacccttgcccctttcgtgtaaggtagtcttccactagttttcctaattattcagccaagggcgtcccattcc

SEQ ID NO: 1183 - DNA, 458 bp, Zea Mays
ttggaatctactagcgctcacacactcactgcaacgccaagaacagagatagacagagatgaacagtagctgtacataagacaatggacacaggaacttggcgcacacacacctgcagcacacggacgctgcgttttctatgtccttgccgcggtttgcaactgagcagtacatgagcctttatagactgaacatacagagactacaaactccaccagtccactacccagccttcacaccatgagccgcctgactcgttttgctttgcatgaaagcaacctcctcacccgcacgaataggtcatcagcccatgcactagcttcctggccactccttccagcatgcagacgcgcacgtcacggcctccctcttgaccggttatcgacgccctcatctgcatgcatgcagttcgtccacgcatcgtacatggcgagctacatactcgatctaacacacgc

SEQ ID NO: 1184 - DNA, 458 bp, Zea Mays
ttttgatctattattactctagtttggtgtctacttacatttagtaactgctaataaaatttgaccgacttattaaagcaatgctcagctttaacccttatttgttggtcagccttacacttcacatgaactcccacctttggtgagttcatgcacattatttcccacaacttgttgagctataatcttttgtgagctcacccttgcgatatataacccccccacacacacaggagaagaacaggtggtccaggaggaaccttacaacgaggagtatgagcttatctaggtggcgtctcctagtcagcttaatgacgcaaaggaataatatttagttcactttattgttatcatttatttttgtaagtcttccgctatgtaataatgatacttgtgacattttatatctatacactttgtcattatatgtgatgttctttttttggcgcacatatgag

SEQ ID NO: 1185 - DNA, 458 bp, Zea Mays
aaatatatagggcaatgaagagcttcatattgtgttgaacctttgcctataatattaagttgcaaaagagagttttatacttacgacatgctacattttgttatccttatagctggttagcctattgcagaaggtggttgaacttgtactttgagaccaaatatatattgcatacttgatattatactatatttgagcttgtctttcttattctactcttatctgttcttatgaagattagaggaatgtgtttggggtgagtgatttttttgtgttgtttccactgtccatggctatggagaaggagcaaaggaggccacgtagctcgaagatagcgtcagtgtccatgaaggcgtccttcgcaaatgcgacgcttcaaggcatgaagaacagaagccatttttgaagggacacaaaaactgtactgcaacaagacgtggacaagctgaggaagaagt

SEQ ID NO: 1186 - DNA, 459 bp, Zea Mays
aatttttgttgcttttgctccaaggtggtaccaaatgaggaaaaacaagactgaagtgcgggaggactcggtcctccacataggatcttttgtttatagcttatcgggaggagtttgtgcctcccttggtttgtaaaatattactactctgcactcgcttttagttctggtctgtaataagtaacttgatcttacattctatataaatgtaagtttatgtaaaagcttccgcatttctttatctccgatgttctgtaatgtctgcaagacgggtgaaacgttcctggtaaggtaagaaagaagataccgaacttgtcgagtgattcaggaacatctacagggttgtctgatgtctgttggataaggacaactgtaggtgggcctaattacttgggaggttccgtcacagttcttgtgttgtgaacatagccaaaggtaactataacaccccagtgttac

SEQ ID NO: 1187 - DNA, 459 bp, Zea Mays
ccgatcctcccgggatcctgggtcaccaaatcagctcttagggaggatgcgagtccctctaatcagatccgattttaatctccactcatcgtcgtctccccatctcgaggcggcacgaagcctagccgccggttgtacacgtacggcgtggaagccattattggactccaaccacatggacgcgaacgagagtgccgctgccgaccacgggaacgagccgctgacccctaataagccacggagatctggaacttgaggatccgcaccacgaacttggcctcctcgatcgacctcccgcaccgtcgcagcctgcttgcggtgtcgtcgtcgcccctcgtgaaataaatgggggtcagcggcgaggaaaccagttgaggatcccgatgacgggcgacgacgctaatggcggccacgaggtggaaggcggcgacgcgccagccgtcgaccccgaggaccgtg

SEQ ID NO: 1188 - DNA, 460 bp, Zea Mays
cacaagcataccaaggaatcagcttcacctgtgctggccttgtacctcgaagccatttgtgcaaggtcaagggtagggatgaaaacggtttcagaattttccagtattccggttaatgttttcgattttttatctggttcgtcggtaacggtaattctcgaaaacagaatcggtcaccagaaattttaatcggaatcggtatggaaatcggtgtaggcttttaccgacgttcacagtaacggtaattctcgaaaacagaatcagtcaccgtaaattttaatcagaatcggtgtaggcttttactgaccgtttccttcggttaccgattttggacggaatttaccaaaattatacctcagaatttaccaaaaataatttagtccagcccatctcaagcagtccatgggatacggaccagaggccgaccagcccactcgcccagtccaggcctagccgccag

SEQ ID NO: 1189 - DNA, 460 bp, Zea Mays
ccgatctgcgcgctcgcctaggatcccatcgaagctcaccaccaccgaaaagccaggactcgtgcgccggtaacctcgaccgcgaccgccgccgcggtccaccatcctacacgtcgttgctggccacctgggaacgtccgacagttgtcgcgtgggcgctcttcacctgggcgttgttggtgtgagatctggggcagtgggcgtaagccggattggtcgccgtggtgtgctcaacctggcggagctacgccacaccatcacttgttcgcatcttcacatcggcggggacacataccctaggagcttcgcaatatcacaccaagcgtacccgtggcggtggcgggctctgacggtggaggtagaggactggattgctcgccggagtgcaacgagagccttagtccgccccacgcccggttctgcgcgcacgtcgtcgtgatttccggtatgagcccctttc

SEQ ID NO: 1190 - DNA, 460 bp, Zea Mays
ttttatgataataataataaatataatctcatgatatccttgtttgacgaccgagcgcgagcggtcgaggtgtggagcaagcgagggcaaggttgcgcctttgcgcgagcaaccggtgctagagatcctggctctacgactaggcgcaggtgctcgacatctcgacgctcgacggtgttgccatgctgctggtagccattgctaggggcacggacgcgtgggcggctggggcgtggctggagatggcaatgagtacccaaaacccgtatttccgacagattttacccgatatatataagggcaaaaatgggatgacttccttacccgcgggtacgataatggacacaattgtgtacccatccggtagatgggtatgagtatgagtatgtactaaccatacccacgtacccatgggtaatttatacacacctcagtcatacacacaccctacttaaataag

SEQ ID NO: 1191 - DNA, 460 bp, Zea Mays
ctgtgccagtatgcaggttatcatgttgattccgatgagaagaagagagaccgcttccgcaggggtctcaacactaagttgcgtgagcgtctcaacactgtccgggctgatagcttcaatgagttggtcaaccttgccatctcctaggaggattgtattgtagctcaccaggcagagaagaagaggaaggcaccaatgtcagcaccctccgcttagacctagaggttcaggattgtttcccacaatcagagcaggggatttcagcagcaggcaggcagatgggtgattaggccacctcagcagaagcagccaacacccactcgttttctagctctcactccaaggaacaatcaacctccgcagcagcagcagttccgctagggaaatgggaacacgtgcttcacttgtggcaatgtgggccactatgccaagaattgtccaagaaattagcagaggcaga

SEQ ID NO: 1192 - DNA, 460 bp, Zea Mays
gctaaaataaagtgtaatatttgttcttgtcagtttaatatctgatgtatggaccacatgttcactttgatattagatttatttttaagggtatcaaatatgattgtgtgtcatcacaaacacgagcattgtactatctttactattttaaagcacgagtttcatgtgtcatggatggtgcatcatgtgtgaagcacgtagatcaattcctcgtcccctcttctcgcctaccaatgggacgtaatataacaccgtagatgggccatgagaaaccacccaagcgcaacacaacaagatgtcacatgcagcgcaaagctcacgcatagtaccaccttgctagctataggaggacaagtcaccaaacgagctataaaaagggtcgggctcttatttaacgcatacctttcttaacctttttggctaaaataaagtgtaatatttagtcttatcagtttaatat

SEQ ID NO: 1193 - DNA, 462 bp, Zea Mays
ctgcaataccaaactcaagtcgagattcgtgaagactgcaactaatctgacttaaacgtaacactgaacagctaccgaaacactgacgaaacttttttttaccatttagtcccttttgtccattaattacatgattgcgacacacatacaaaattacaaggtcggatccaatagcgcgagtcacaagccggctacaaaccctcatggaaaaatctttcctggacactcacaactacaaacactcatgaaaaatctttccctggacactcacaacgattctattcattggaacacttagataacgctgtcgaacctgaagaagatggagcgtgagcggcaaagactgcgacgaggtcagaggtaggacgtcaagtaaacatcgcggttgtagtttccttccctggcacatggccacacgaccaatagagaatgaggcaccgcagcggatcctggctagagagg

SEQ ID NO: 1194 - DNA, 462 bp, Zea Mays
cttggccgctgcgctcctccactcccctattccccacatcactccgcttttgcggccgcttgtggcggtgccttccacggggctgcggctgcgctccgccggagcgagcaaatatccttgcccccacgagaccctcgcacagtcgcacctctccgacgtgaccggcgccgtagaaccaccgggtcttcccttgtgggattattcaagaacatggagagaaagagaaaccccattgtctttctggatgtatctgtaggtgatgagccagatgaaagaatgatctttgagttgttcgctgatgttgcaccccttgtgactgagaacttcagagctttatgcacaggtgagctgggaattggacacaagactaagaagccattatgttacaagggatcatcgttccaccgtgtcatcgaagggttcatggcacaagatgcaagacagatgatatcgactgttttt

SEQ ID NO: 1195 - DNA, 463 bp, Zea Mays
acgtgaattactgatcctggcacgtacatggttcgcattcggtttaccttcaaaaccgggtgtgacaggctgctcgtgaaacagacgctgttttcgccaaggctggatgcaaccacctgaaaactgtcaataaaccaaccttcggccttttagcatcaaacttggacaacatcccagccgaggctagaagcgtaggtaatatgtttatcactcaaatctagacgaagggtggccgagaagttgctggagacgaagctcgggcactaattaacaagggcgagactgatgaagattgacaatctgaagcttatcctaatagttatgaagaatgctttcgaggctatcttgtaattttgccagtagtcctgaaagatgctcttagagctctttttttgtaaatgaaaaacattatattcggcaaataaatgtcgaagaatgtaatatctttgtaaacatctatgaa

SEQ ID NO: 1196 - DNA, 464 bp, Zea Mays
ctgacctgacaggaaaacagcgccgcctgcccctgctccgactgctgtgccacccgccagggtgaggcttacagcagccaagtccagcctcaggcgccataggaagctctgcctcgcccgaccccaaggctcggcccccgcctcgacctcggacgacggactccgcctcgcccgacccaagggctcggactcagcctcgacctcggacgacggactccgcctcgcccgaccctagggctcggactcaacctcgaccttggacgacggactccgcctcgcccgacccaagggctcggactcaacctcgaccccggaagacggtctccgcctcgcccgaccccaggactcggactcagcctcgccctcggaggagtcaccgcctcgcccgaccttgggctcggaccgaccacgttacaaggggggcccatcataccctacccctagctagctcaggctatggggaa

SEQ ID NO: 1197 - DNA, 464 bp, Zea Mays
ttggttcactattatttaggaaacatgtgatcatggtgtacatatggagtgccccacggtcgtgtatataaggcccagggggtaccccatcattttcattcacatctacctatctcattagcttttctccatccaagagacatcgcttgtaacccatcacatatagatccaccctaggaagtagggtattacgcctctccaagcggcccgaacctgtagaaaattgtctgtctctctcttttgtgcattcagcacaaaccattgagttacaatcaacagcaccgtcctacccaaaagcaccgcaagggtaaccctgggtgtgcggtcgagctctaaacaccgatagttggcgcgccaggtagggggtgtgtcgttgatccaagctagctcaatggccatcccctccaaatgcaagatcgcccttcaccccgggaccatgttctgctttggaaccatctcattca

SEQ ID NO: 1198 - DNA, 464 bp, Zea Mays
gtcgaaggttagcttcattcgctagtggaaatgtttttaaaatacacttaccgaagcaacataataaagagtaatcttcgccacagaaggtcccaaacaaccacgttaacgaaattcattatattataaataatgaacaggggattgaaatctcgtgcgattgcaactagttcatagacctctcctgctcgtccgtcctccctcctccagcacaaagggatctgatctcctgatgaggaagatgagacgttgaccttggcgcgttctccaggggctaccacaaggtgctcgatgcatccagttcgtcctcgtgctccagttcatcgatgcatccagttcgtccgccaagtcgcgcagatgggagaggaggcaggggccggattgtaccaactgctgggccaaccctaattagatatataggcctaaattttttttagcaaccgactatcgaatgtccagctgta

SEQ ID NO: 1199 - DNA, 465 bp, Zea Mays
ttgaaagcagttctaagtacatgagtatgttttgacatacttaaaattttggaccacatatgcaccacttagcttgtttttgcaaatcttttggaaattcttttcaaattcatttgcatttggcctaaggtatagaaatagatttttcaaagatatttttaagatttgaaagattctcccccctttttttaaatgcttttcctttggccaaatagaagatcccctgaataagttctccccctttggcataaatagtttttctcctcttagctgtcaagagggttttctcagaaaagtaccaatttggaagacttaaaagtttttgaaaacagggtggtggtgcggtccttttgctttggcctattgatttctccccctttagcattaatcgccaaaaacgaagaaacctggaggcctttacaagaaagatatgaatttaagtacatgagttgggcaaagaggtct

SEQ ID NO: 1200 - DNA, 465 bp, Zea Mays
gcattgcatgcatgcgtgcacgcgcgctcattaaaagaagaccgcgaggtagttcagtctccacgcattgctagcgcgatagcgatgcagagtcacgcacaggacggaccgcggacgggaagatgcggcggatggccgggccggccggcacgggcatatgcacgcacaggacgacgacgcaggcccgtggacgaagggagatcgagagggagcaggcgcacgctgcgtcacatggctgcctcgcttttgccacggctctgatggatggaccagctgctagatcgtgaattatgatcgctggttcgtcgattcgatttcggttttgcttagacgtgatccgtcgctctcgctccccccggccggccggccacaccaaacatggacctctcgctgtcttgctaagttatttcctcatccgtctctggtgcgtttttttatcggaattaaacctatgcgccattgcca

SEQ ID NO: 1201 - DNA, 466 bp, Zea Mays
cccacacttccaggaaaaccgtgctcaacgcggggtcgcaatcgaccgacgggagtccgctgtcgggggtcaggttggaacgaccaatcctgtcggagctcgacggggaggggcggacccggccatcggcatgagaggaagggagctcgggaatgcgatccgggattctatgtgcgattacaagaaaagggagaagaaggagctgtgcagtgggacccacgaggtagtggcacaagggcgcgcgcgacgtgtggagcctggcggctagggtttgccgcgtcgcaggggaggcgcgctggtgggcttgctgcgcgaggggatgggagatgtgggccggaatgtgaaggtgtggcccatcagcgggttttcttctttttttcttttctatttccatttctattttctctcattttcatatttaggatttggatttgaattcaactatgaatatgaattttgtactcaa

SEQ ID NO: 1202 - DNA, 466 bp, Zea Mays
ttagtttccgtgggataagctagtaaatgaaaaccataatacaaacacgctgaatcttcaagcccagcaatcctcgacaaatttccatagataactaaatcctagtataatgaacaagccttaacatgacatgagcgacaaatcaaacactccatactctcccaaaagcacatcactcacaaagaaactcgttgcaaactgagcaatctgttacctcagcacagacagcaccatggactttgaaggaaatgaaaatttagcctggtcagctgccagaaggaccaaagaaaggtgtcaagcatgggctggtgttattgctacatccattgctccccagcagtagctggtgttattgctatatccattgccccccagcagtagcatcacaggtgcggcagagcaaaaatccagctggtaggcttcagcccaagtgcgcaactcaacaggcaagagatggcaataaatc

SEQ ID NO: 1203 - DNA, 466 bp, Zea Mays
tgtgagtgcggggctcgctgctgaagaccggcccacgagcgcatgaacgaccgaacgcatgtcgagtgtgggtttttcggtggactggcctaggtacgctgacaaatggtatcagatcctaagcccgtctgtttagggggataggatgtcacgaaccatgtgtagtctgggttagtaccacctcgcttgcgggaggggatgtagccggcttataagggtgagcttccctcctctccccgcccgagttttgagatgtgagtgcagggctcgctgctaaagactggcccacgagcgcatgaacaaccaaacgcatgtcaagtgtgggtttttcggtggactggctcggaacgctgataagaactcaccgtagtgaaaggaccaggacacgctgggtcctgcatgcaacaaacatctgaaccccatgtaattagccggcacacgccttaaccacttgaaaaaattcttt

SEQ ID NO: 1204 - DNA, 467 bp, Zea Mays
gagatggatcgcgagaggcgcgtagtggtggcggtttctgaggtgtgcgtgtggcagctgctcccgaggggcgcatgacggcggcgattctcaagtggcgcgcgcggccgcggctccctaaggggcgagtagaggctgtggctagaggcgtgcacgggaagcgacacccccctgatgtgcgcgtgaaggcaaggtcctcctacctccaactattcttcgagctccgacaagttggacgtcaatgcgatagcgtggatcgtccgacgacgacctcctccgatccggtggctttggggcatcctctaacgacgacctcatccgatcaatgtgttatgcattatgtgatgtttttatgtcgatcactacaatttttatgcattccatttgagggttttatgtttttgaatatgttgtctctcacgtggctttggtatttctacgggaataacatttctgctacatctgcc

SEQ ID NO: 1205 - DNA, 467 bp, Zea Mays
agaggtgttggctaagaggagtaacataagagatatagatcattttaggaatgtgttgtccaagagttatgcttagtattgggcctctactcatgattgctagagaacacatccaagtgtgagagcggttcttagtatgttgcattgagatattgcatcaagtggcacgtgttgcaagctggtggtgcttgttactcttgtaggttgccacctcttagacggttgagtggttgtggctctatgaaagcccatgtgaaatgtgtggttttggaaaagtcgttttgagaggtaccttgattactgtgtggacgcgaagagtaacactagtagagcaaggtgtgaagagcgtcgagtggttcggtcggatcaagtgctagagctcgaatgtaagcaatccacgtgtaagagtgtgacttgtagttcaccactagcaagaggatcaacaacaaccttaggcttgtctcaat

SEQ ID NO: 1206 - DNA, 468 bp, Zea Mays
gttaaatctcctcacttcttctccggatggtttcagttctgcttttccctctcgcccgccctagatccgctgggatctgagtctctgtttgatgctgctttccaagccccgccatagatccgctgggatatgagtctctgtttgatgctgttttccaagcctgaggagttccggccggagtggttcataggcgaggagaagagcgtggacgcaaccgtcggcgggaaggcgaggagaagagcatggacgccacgcgacgtcatacaatcgcattattgtttggttggtactctaaagacgcctctgtttctaatttattgcctgcagaatcatatgctaaattagaaacagacgcttcgtttcttcctaaatagaaatactaatttactggtttagaatctagacaagtgaaccacacatctactatgggttcgactgtttctatctactttgaattttttattgttt

SEQ ID NO: 1207 - DNA, 468 bp, Zea Mays
cttgcccaaagctttggtcagtatatcagcaagctgatctgcagtgggaataaattctgttttgatgctaccttcttccacacagtccctgatgaagtgatgcttgattctaatatgtttgctcctgtcatggaaaacaggattctttgccaaagctagagcagatttattgtctactctaagttccaccacctcaacttctcttcccaatagttctgcaaacaaccttgacaaccacaaggcttgggttgcagctgttgtcattgccacatattcagcctcacagcttgacaatgcaacaactctctgcttgatagattgccagctgaccagactgtttccaaggaaaaacaaacatccagtagtgcttctacttgtatcaatatctccagccaagtctgagtcactataacccacaagtcttgccttgcctgtcattctagtatagcatagcccatgatctagagt

SEQ ID NO: 1208 - DNA, 469 bp, Zea Mays
tataagatcataaccctttaattgtaactccgatcttagtagttcttgatcccacgatctcgtagtgacgcgtagatcgttattatgcagtatgttcttatgcttgatgtgatgttaattttgtctatatcctgtttgtttgtaactttgtattgctacgactagcgtgaggtcacgaggatctgaagaatcatcctagtaactggaagtctgtaatctcaagtgtcaggcaagttgtgcccttgatccacttttgttacccagtaatattctttattatcaccattcaatgcataggtttaattttgatgagactcaatatgtcaccctagtctgtttatcctttttaccttgttacccctgaatcaattgggtagtttttgctattgctttatatgattttgggattaatatttcattatattcatgttccaattattttgttatgttatttatgttcatgtcaaga

SEQ ID NO: 1209 - DNA, 469 bp, Zea Mays
ggaagggtgcacgttcgtacgtgtagcggcaaggtgcgccctgaattggcttcaacactagcagatcggccctgcagtggcctcatcactagctagatgcctaccactggtaccatacaggcttggtgctcgatatgatgacaccgtttctcctcggcgagggtatctgctgtggtatcggatcaccgcctctgggttttcagatctctcggggtttttttaaggccatgtctgtttgatcttaaaatcataaagattgagagggattgaagaggattttgacttgtcagggatataatctccctcaattcctatgaattagcaactgagtggggagtgaggacgcgtgcgtgcggtgcagccgtgcagctcggcgaccatcacttccccctcctgtagctcgccactgactgctgatttgtttggatgtctatgtattcatcttaatctatgtatatcttaatctata

SEQ ID NO: 1210 - DNA, 470 bp, Zea Mays
actacaacactaaaccgacacctagacaagtgcacacagtatttgaacaagctggcacaagctaagaaaaatcttgctcaagggagaaggtgatgatggtgacatcgagtccgtggaatttccaaagtgtgtggtggcaagtaattaggcacatggtcacatactcacatggaggagatggaggagagggagagataggacccgagagaggacatgagaggcacatggtcattatattttgttggctgtaactgtaagcctgtaattgttggttgcaactgttgctaacctggcatattttgttggctccctacaactttgtcctgaactcctgaacctgaagtcctgatctataattgttggctgcatcactgcgtgtattttggttctagaactgaaactctgaaagtatggaattatggattatggaatggaactattatgaactataagtctataattggtggctg

SEQ ID NO: 1211 - DNA, 470 bp, Zea Mays
ttcgttccgagttggacccttggacagtcgccgtccggcggcggcgggataaagtccggtgccaccccaccaccaatgcaacgctgagtagccgagtccgtggcctcgaggtggagaaggcggcggggtcgccgacgcccgacgacgaggacgaaacgggtgggaggaccgcgaggagcgctctacaattcgaaagccgcggcggagccaattcaggggacgggaagttgaattctatcactgacccccaaagctccctggtccctacacacacaactccgtctggtacggaccatgccatttggctcctcccgatctgtaagggcgacacgcacctttgcctcgccttcaacttggctgattcagctggtttagggcggctgaaatttggtttactgcaccaacgtgggcaagatccacaaattaagcatccgaaaacaaagcaatccttactgaatgcacaaaatcac

SEQ ID NO: 1212 - DNA, 470 bp, Zea Mays
caccaaacgatttttagcattttaacagcttacagcctacagcagctttttccacagctcacagcccacaacaacttttttcacagccacagcccaaccaaacagacccaaaagctctcttggagactcaaaaagttgcacgtacccgtctctctgccatcacagggaactaagcgagtgaaaccccgccgtcgctactgtccttcgccggcgtcgtgactagactttccatgctgaaacccgagggcctgttgggcgcggacaggcttcggctcccaccgaatttggcgaatcttgccccggagtcgagcaattcctcgtcgtggtgctcctctactgcggcagccgctgtaccgcgtggtcagtcctcgtcgtcgctccagcccctcgacgagcaaggcacaaaagatccgggtgttcagtaggtggagactgctgagcaggagctcgttgaaggcaagttgtgccct

SEQ ID NO: 1213 - DNA, 470 bp, Zea Mays
cttctcccctcgcgtgtggcgtggacggtatacctgctccgccggaatcctcgcgcgggctggttgaccgcgagttccgcgggactcacccacctatgcgccgtcgggggggataaagggggagcacctcgtccccacgttctcccttccatccgccggctttacacaaccagagagtaggggagagaaagatcgggcgctgccattgccgtcgttgactctcatctccatcaccgctttgtgtctgtgacccgatccctggtgttcgggtgtgggcgtggatcgttctcggggaagaatccgggtgcgtgggtcctcggggccgggagaattcctcgtcgtcgttacaccgccgctgcggaccgcacttcgccgtagcctgcttccgccgccgttctgtgcatgttagccagtagctgaggatcctggtgcccagcagatagaagttgctgagcaggagctcattgaag

SEQ ID NO: 1214 - DNA, 471 bp, Zea Mays
ctcgctgctcctgccttcgtcctgctcgctcgttgttgcacgcatgcccaagcacgacccagtggtgccacgcccctgattgccttcacctatcctctgcatcaccgcaaccatgctactgatcccacgtcgttgtcgcttacacacgctaggttttttttctttttcctagtgtggcgaacgctgacgtaatggactccttcgccacgggcaaggatcccatagtgtctccctcggcagagattttggcatccaggttagtctaggccatccaagtccagccttcaagaagattatccatttaggtttctagggctcagttagatcgatcgatgcgtagatcatacatcttcttttatggactcggttaagtttgttgtctattaaggtcgctgcttagaatttagggcatttttgctcgaacattgttgtttggaagtcaacatttgcctcaggttgacatgaatgatg

SEQ ID NO: 1215 - DNA, 472 bp, Zea Mays
catgagtattatctccatgtggagataatgcttcggaagacgaagatccttaatccttaacgattgtgttgccttgttcttgattcatagcatttgagaacaagtaaccaacattggtggccatctccggtgaacctgaacgaccaccttcggcaagcatccaccttcgtcatgccgccgaagaagacaacagtgccaggggctgctgtcacacccggttttaagggacaaagtcgggtgcatctcatacatgcgccaaagaagacaacatatataataacagagtgtatagatataaatgtcacaataatcagaatatttattatatagcggaagtcttacaaaataaattataaatataaaaggatctaaaatacatccttggcgccagaaagtcaactgggagacgccacctagatcgaatcgaactcctcgttgtctggctccttttgaaccacctgttcttctcctg

SEQ ID NO: 1216 - DNA, 473 bp, Zea Mays
aaaaatagaaccatgcaacaaaaaatagcctaaccttgctcaccaagaaaactggcttgttttatatctggtcgtacattgcagtgtgcaatatatctttgttctatatcaatggcaacatctaactgcattccgcaatttgaacaatttgtgaaaattcatgcaagaggccaatagcgttaaatacatgcacgttattagatacagaaagaaacagtaggaataaatggggaaaagaattcgtgaaaaacataatcatctttttgaacggactcaactgacttattctcattagtgcgttcattagtttgatcctctctttgataaaattagaaacttaaagtaccccggaagacaccttgatcgttctctcggctttcataaccagataccgttgtctcatccaattccattttatcgccataatctgaatcttctcgtccctctgcgataaaccaccaacgtcaagtcta

SEQ ID NO: 1217 - DNA, 474 bp, Zea Mays
gctgggcggccaggcgctcgagcagcgaggcagcggcgctcgcgcacggcggcgcccacgcgctcacgcttggcagtagccgggtggcggtggttgctcacccgtgctcggcagcaacaaggtggtgcccgctcggcagcagcaaggcggtcgtagccgctcgcccgcgcgccttcgtgcggtagcggcgagacgacggcgctcgctcgcccacactcgtcagcagtgagacggtggcccccactcgctcgtgcaccttcgtgaggcagcggtgaggccagtgctacgacggctgctgcttgcttgcctccatgctagtacagcgactacgctgacgctagccttactactgttgttgtttttttaatgatgcaggaaaataaacgtatgtatcacacatgattgatcgacgtgtgtgtcggcgatttaaagtcagcggcaatcatgtgtgcaccccatcgacttcgtgtcggc

SEQ ID NO: 1218 - DNA, 474 bp, Zea Mays
ctcttatgcacttgtgtgttggagctcttagaaatgtgcctctatgcttggaatatgtttcttgtgctccacacactccaaatggccggttggaggggtataaataggccccaatccaaaactagccgtttggacagagagcagacttttctgtctgcggtcgcactggacagtccggtgccctgccacgtcagccgaccgttgagagctgctgccgccgaccgttggccagactgtccggtgcacaccggacagtccggtgcttcagctcccgagagtccaatttcggagctctctgcgtagtctgtccggtgcacaccggacagtccggcggcttcacaccagacagtccagtgtgccaccagagcgctggctgaactgcccatatcttgatttcttcaatctttttccttaggctcttttggtcttgagtcttggacttgtgcttgatatttgttgatcttctaagcgtct

SEQ ID NO: 1219 - DNA, 474 bp, Zea Mays
ggtgttctataggtgtgccttcttgggtgtcccagcattactactcccttgttctcactgaagatttggatgtcttcgtggcgcagattcatcatggtgagtagtaggtcggtcagagtgtcggtggtagtcaatttcaggtcttgggacgatgtggtgggttccttgatccttggccaagttgtgcagtgccatgtgggggtgatgatggaggtgtatggacctagctagaacgtatgaagtaattgacatgaattctatcttctcaaaacgtactcctgctattatatccttttgctctgtagaaacctcttatgtgaacacacatagaatcatctctcttcttctgcttcgagttgcatctgagtcttttggtcccctctacgcatgcagtttggagacaaaatgaggagtgcctcctaacgtggtgcatgcgaggttggtggcacgtcgccggccggaggggaatgctcc

SEQ ID NO: 1220 - DNA, 475 bp, Zea Mays
aactcattcttcgttatcccaaattgtatattacaagagtcatttacatttgtaccttcgttcttacaaaaccaaatatgaaggtatggacgaaatagcttcgaagtctaagcgatagggttatctcgtagacgcaaaaaacacccttatgtgtggcactgtacccctatttatagtggcaagttacgacttcttatgaatttaaaaatatgttcacaaattctatacatatgagctacaaatcttgtgaggttaatatatatcaacttttcctctctcgcgacgtgccaatcaaccttctagaatcttctcgtctccttatgtttcgtgtgttcacgcttcagagacaaagctgaagtcttttagcttcgtcgcttccttatatgttggtgcagacgaaggtagagcctgctacctgtagatgatactagaagcatgtttaactattagcataatgtttcgaggaccttcggca

SEQ ID NO: 1221 - DNA, 477 bp, Zea Mays
ctcgaatatgcaccatggatcatcacagatagcagattagcagaacagaagatagtgagataccttcatactggcatgtgagccacggatgcgatggccatgcaccagcgagatgtggcggtcctagcaacacagtccatgtgtggcggctctgctctggcgagatgtggcggccctgtcctggcggctagcaggctgcgattgcggatgggggacggtgaaggatgcagtagggtgggtggcggcgggccgccgccggatctgcgagtgggcgtggtgtgtccgtctgggtgtgacatatgtggtggccctagggagcaggatgtggcagccctgtcgagttgcaaccgctgatcggtggcggcggcggatgtgatgggcagccgatcagtggcggcggcggatggttgggaacttgggagggatcgatggtgacggtgtgaggacgtggtctgggagttctctagagagttgaac

SEQ ID NO: 1222 - DNA, 478 bp, Zea Mays
caatgattcatttattattatcttcatcaaacatgaataagcattaacaatattcatattacaatggtaccttcggcttgtcaaaaggtgagagggcgagaattgcgcgagagcgattacaatccagcgtgaacaatacgatgttactgttcatctatttataggcacgagatgcagcccagataaaagtacatttatatccctagtaactgcctataatcttaacttgaattattgaggactataaggtctttagcccctttcagtcatcttcagcttgagcttcgtcaatatgataagtcgaaggtccttggcttttagcttcgccgaccactcttcatctcccttcattccatcataagagaagttcttcatcccaaagccgaagcttcctgtaattattcataattatgctgaaaacatatggttagtcacattttctgaggatcaagtattcaagtgtaatagttatctcaac

SEQ ID NO: 1223 - DNA, 478 bp, Zea Mays
atcaatgattcatttattcttatatttcgtaaacatcaataatattcatattacattggtaccttcggtttgccaaaaggtgagagaatgaggatggcgtgagagtgattacaatccagcgtgaacagtacggtgttattgttcatctatttataggcacgggacacagcccagataaaagtacatttatgtccttggtaactatctatgattttaacaagaattattatgactgtatggtctttatccttcttcagtcgttatcatacttgagcttcgtcaacatgtccagctaaagtcttttggattctagcttcgtcgcccaccctttatttccattcgttctgtcatgagagaagttctccattccaaagccgaagcttcctataactattcataattatactgaaaacatatggctagtcacattttttgaggaccttcggaagaggaatgcccccaacaggtcccatcaaat

SEQ ID NO: 1224 - DNA, 478 bp, Zea Mays
cgacgctgaccgagacgatgcgtggtgccaagcaccgctccacgggtgcgtcaccgaatcatgggacgcggatggcttcgaacccatggaacatccgaatgggacaccaatcgatggtccaccggcgaactacagcctgggcgagagcggggcggatgcatgggggacgggacaacagatgcatggcggggaggggacgcatggtgacgtcggtgctcggggaagatggcgagggagccgtgcgacgaagcatctagcagggttgaggtctcagtcggcttgagcgctacggtttatctgttctatctaagcgccaggtgtagatttggaacagaaaatagcttaatcgactcaaaagcaatcgggtctatggtcatgccataatagcggcgttcgtgtgttgggagtgttatattatatatctattatctaatagaatttaatgtgagcacctaatgctatcacgacttcaactttt

SEQ ID NO: 1225 - DNA, 479 bp, Zea Mays
gcggtagccacggctcctcgacccggacgcgtggtggcggcggttcctcgatccaaagtagaggtggtggttcccaggtcagtggcgcggtggctccccgatccagagggcgagtgacggcgggcccctgtgcgggcaagcggcgccgtccccagggccccaaggcggcgacattcccgaggcggcggcgcccctcgacgtgcgagtagcgatgacgacgcatgaggtgcgaggtgcacacaacgacgatcgcacgtgacatcctccgatctggtacagttcgggtggcccgagtgacgacctccatgtgttcttgtgtcgttgacgacgtcctccagcgactaccacctccgattcgtgttgtctttcgattattatgttttatgcctataacatgcactatttacgctgaaaactgtacaattttatgcttgaacacggagtttctatatcagtttattgcatgcatattttttgca

SEQ ID NO: 1226 - DNA, 479 bp, Zea Mays
tttgttgaattacgatcatgttccattattgttattgttggtttaattattgttcaagataagattattgagttaaaaggaacatggagaaccacccaggaaaatagtgctaccacaagggtggtatgggacgtccttggttgattaattaggaaagctaatggatggtggatgactaccttacctgaaagggcaagggcagcagaggagctgccggtatatggaggttctcagattgatcatgctgcgatggcttttcggacgagggattcctatatcgcccttctcagaaaccgtagcaggttttctgaagctagtggaactttgtaaaagcctcgtagtgataccctgcctcgtctcctcggtagagatgtatgggattcatgcccccatggcaaatgggtaacacgacttgtgtgtaaagatgtgcaacctctgcagagtgtagaactagtatatcagccatgctcacggtcatg

SEQ ID NO: 1227 - DNA, 480 bp, Zea Mays
caatatacgagagttcaattctatttgcaataaatcaattgtataccttaaggttttgctgtctccagaacttactgtttgcactgtgttcttgaggaatatcggccgatacagaggttcgcagggaggtcggatggcgtgcccaggtagccggatgggttcacttgcgtgcacagacagccggcggtgggctcagggcatctggcgttgggcgcgcaagctagcagggttaggcggaggcgcgggcgcacgcaagccagtcggcggcggccacacgcagggttaggaacagggtgcacacagggtaaggctgcggcgcgcgcaggccagcgggcggcgtagcctatcagcgaagacggcggctggagaacgcaggaagtggagagaagaacggcgggggctcagtgagatcggcccacgagcgagatggaagccacctcgccggctgtgtgggtgacggaagctagggtttacgctgcc

SEQ ID NO: 1228 - DNA, 481 bp, Zea Mays
agcagagggacccgaatcggtcccatccacaagtatatatatgagtggtcgaaccatcacctgcgctatttaagtcattgagaaagtagccaactcgtatgagaaagtttgttgccaaggtcgccagaccggagcaactccgtcattcgtcgtcaacagcatgccgcccatgtcgaggagttgccaacatgtgccgcatcgaggtcaaggacaggtaccacaagataaggatcatgatgctgtgatgagttcgtgagaggtctaggtcgtcgtctcacaatcaactatggttgctgcatctttgtctttgtatgatttaattatttgactattttgtatagaactacattatatattaatgatgtgacattcgtttctgtaccatgagtcatcatatgtgtgagacttgatcctagcacacatttgattcgtgcccgggtttgcccccataaatctgggtgtgacagaagttgtatcagag

SEQ ID NO: 1229 - DNA, 481 bp, Zea Mays
cggagtgattacaaaagaaaatgattaaaaagaattacaatttaaaatatataaaatatttataagttttaaaatacatgctagcttaagtgacaatactcaatagagaaactaaagacgggatatacttatagaagaaggtcgagcccaccggcacttagcaccatccacaacagaacaaaattacaacctgaaaaacaacagggaataaaaccctgagtacgcaattactcagcaagacttacccgactaaagaaaagactctcaaggatatgctagtttgatgggaatcaaggtaaggcttaccaaatttcaaagactcagttttgcagaaaagcttactagtagtggatccttaagccaaacttttacttcacaagttaagtacttctcctgaatctagattcgcttgatctagagcattcacttgtcctatactagcttcattttagtatctttagtttcacttgttatctacgat

SEQ ID NO: 1230 - DNA, 481 bp, Zea Mays
ttttgcacgtacgtcacgcgcagtcctcctcgtacgtcaggccaaggccaacatgcatgcgaaggattgtcgtgatgacgtcggtgtttgtctccaccagcatcgtccacaggaacggcccggcgacgatcgagcagcgcgctgtcgtcggctctgtccgccgcggctgcatcagctcggcgaaggccgaccagcaccgcccaccaccgtggaactacgcgctcacagggtcccgcagcggcaacgactaaccgggtatggaccaccaagccatgaagcttgtctgtctgtgtccgagcaacggctctgtccgacgctctcgccggatgcaccatctcaagacgcacgaacagcggcgccgacgtggacaatttgacaccacgcgcacgagctcgattgtatatacatgcttatatttcctttgtttatacttttttcgcacacgtgctctttatatcatctttcgtagattaagcgagaa

SEQ ID NO: 1231 - DNA, 483 bp, Zea Mays
aagagaccagtcccctttttctgaagaaaagcttatattatatatattcaagttctaaatttctttctgaagaaatgttatgaagtaattgacaatagaacaaaacttcttaatggtactgatgtaagagtctttacaggaagttacagggagggagctgacataaattgttgtgtccaaagagcgacagaaaagtagcaccggagtcgggccaccattggcgtatgctgccggagcccgaccatccacgcccacgcccacggcatcccaccgggatcaacatgcacatgtcctgtcatttttgtaggcaagcgcgacgacgccggagatcgactatcgacgcctgcaattttatggtgagatctgtcggtctaatctaagggctagtgtgttggggtgctggcgcaaaccccctgttgcgacgacggtggtggcaacgacagaggcgaccactaagggtcgcggattcatcggcatgcattg

SEQ ID NO: 1232 - DNA, 484 bp, Zea Mays
gcttcaaacaggggaataagcagttcatatacatggggtaaaatagtgcagactaatcccttcaaacaggggtcttggttcaaatttctggaacaagctgacatcggtggctggggtgcacctccacctcgcatatcgactccgtcgcggggaacgtggggaaacgtgtgccgccggtcaccatatcccgaccatacgaagcaactggccttaacggatgaatttgctcgagtctgctgccgcaacctccatcaccaacgaagacggctctcccgctgccgcatcctaccatggctccacaaagaaaacgagcacgcgacggtgggaatcaacgcaggaaaccacagtgatgcgcgtgcgcgagtgggaaccttgctacacgcaaatttgcaggggataaggctgcagatgcggggtggcgaatagattggggaaggaatgacgctctgttgtaggcggaaagtgaaccggttgagccccaaag

SEQ ID NO: 1233 - DNA, 484 bp, Zea Mays
acaacaaccactatttggctcgaccgaccctccttgggctggccggtttgcctcttagcccgcctagccaacatgggccaccaacgcctttttggaccgcccctgcctccacgagcctactttggctagttatcccttggtcatggccatggctggccactggccgttgttggctggtcgcagcttgacattactggccacgactaactagccaaatttttctcttccttagacatttcatgcatgtctccaatgcacataattgccatatgcaatgatgcttagtccgaaacattccgcttagcatcttcgatcaaggacctcatcctctttaaacttagtcctggacctagtttccatacctagtccttttctgaaactactctcgaaaactagttttgtcgcccctagccatattttgtctcaaccaacacctgcacatgaacaattcgtgcaaccgagtatgagcacaagtttatgattt

SEQ ID NO: 1234 - DNA, 485 bp, Zea Mays
ctcccctcgcgagcaatcggcatggaacgcccactgtgaccgtgacccacgacgccacccgatttcgcccgaagcttcgaccctggcggaacgacgacgtccccagagcagcgggcacagcacaagtatatggcggcggcggatctcagcatggcctcgacggtgcccggcaggatggcggcgagaaatttgaccagcggcccaaaatttcccccactgccgaccatgcgcacgatcaacgcgacccggccatcacgccagacccactcccaacaaacgcgaggcgggcgacgagtttgtctctcttcccttcactgcttcatggtggcggcctccacctctgtactacggcgagccctccatagcgtattggattttcctggtgacggcttcggaaaggagcggcgggaagcggctggcagatgagagaccacggcttatacggatgtggaggcaaaatcgaactacttggaagaattctcacc

SEQ ID NO: 1235 - DNA, 486 bp, Zea Mays
agaatacgatgcaaccaggagatctcgggacccacgagcgcacgtaacttctcctcgagtagaacacttggttttaccattgcccagtggctctttcctgaggaagccaccactggccgaccctctccttggcctataaaaggaagaggttgcccctagacgaacagatgcacacacaagcaacagacggacgccaggcgatagaccgacgaacaggagaaggatgcaccgacaaggacccagagcccggagccccccgccaagtcaagacttagttagggcttcaccttgtaatccttagctctatccccaccacgataagagacttaggagcatctcctctctctcgtccgtttgtaacccctactacgagctttgatcatcaatggtggcgttagtgcaaaccgtcgactattggaagtagagacgttctgcgcgaaccagtataaatctcgcatccaccatgcacactgtctggagtctgga

SEQ ID NO: 1236 - DNA, 486 bp, Zea Mays
aaaacaaaaaaaatggcgcgattgggctgttcgggagtcggaaaacacttgctacatgtagagatcaaattggctgggatagcaacttagtaaatttaccaagttcatttcaggagccgttggagaggggattttatgataattctccaaattacctgtttaggaaattctttaggcaactactggagttgctcttagcacggtaggcgagagatccggttagttgcaacagaatccgagcatcgtgcgggaaaaaggaattagttcagcggcgctgctcccgccgggtgaccacggggatgggaagacactgacacgcggacccgctgtcagtggtggcgcccgagagcaggagcgccgcaagaccggccatatgggtccactaggcggtgagaaagaatacccaggcacacgcgctacacgcggctaacagcgcgggcctcgccagtcggccagtgaagggagatgtgctggcgtggggtgtag

SEQ ID NO: 1237 - DNA, 486 bp, Zea Mays
tattaccagaagttcagccagctggtcaaatttttggaacagtgaaggcaaatgattcatccgaaaatcaatcaccaggcttgaattttgaatactcttatctatttcatcaaatatggcagctaccaccctgaatacaatctgtaaacatcataatagtattcataggaacatatactaccaaaactgcaaccttgggcataagaattagtggtggagataatctaggatcaaactgaattacctcctctctgtctccccgataataagaaatctgaaaatattttttgtcagttcatagaattcatttatagaacaaaacatgtagtgatccttcttaatcatccagaagagttgagcactttttccagtaaaatttgctgccatatccactgcttctgaaaactacaatgtaatcaaaattcaaaagagatataagaatgtagataaatatttgttgttaaagatagaagtacccaatatata

SEQ ID NO: 1238 - DNA, 487 bp, Zea Mays
gggtattccatgtcgacaatatcaaacacaacctgttcagtccttattttgtggacaaaattcaaaggttactagcattgtgatcttgccaagtgctacgatcggtcttcctccgaagccacaaagagggtgcgtagcatcatgaattttgtcctctggctcctgcatctgtctgaaggccttagcgaatatgatgtcagctgcactgcctgtatcaaccaaaacattgtggaccagaaatcccttaaagacacaagatatgaccatagcatcattatgaggataatccttgagctgaaggtcctcctaggagaaggtaattgggatgtgggaccattttgacttgttgaagggtccatgcaccccaacatgttgcacccttctctgggcctccttcttgtgcttcttgttggctggctctgagcatgagccgcctgttattgggagcaccagcttcgtagccgaagtagcctcagtttggttgccg

SEQ ID NO: 1239 - DNA, 488 bp, Zea Mays
ttcaaacaacgatatctcctaaattataactccgaatcgagcgcataagtactcgttggaaaggtatgacaaagctctacatgattatcccactgattcccactaattaccccacgaaaattcccagaaatccctagaactactgctgttcacccactcacaaaattcctggacagcacctctaccgattcgcaaagataaacacataatccaattgattgcagcacaaaaacaacaaaagttaatcacaaattcaccttaggttcttcccttcctccttccttcttccttcctccaaactccaattgagatcgcagccacatgacggagaaccacacgggagggctgcaccttggaggagggggagaaatggggggggcggctagggttttgggtggtgagggctgcaaaggtttgaggaggaagaagatgggagagggggggcgtccaagagaaaggggaggggaaggggcggctgcaacaaccca

SEQ ID NO: 1240 - DNA, 490 bp, Zea Mays
cacaaatttaataagtattaatagtgattacattatcgaagtttcaaaagcattaacaatagtttttagtgcagcggaaataactaacggagaaaaccgagtatcatggcgaagcctggccacgctactcctcctggtcctctcctgcggaagcagtaacccactcgaccgtctatcccggtggcagggatgaaggctaagtcacaccatcaaccaaatcaaggaggtacctgcaaaaattatgccacaagcaaggctgagtatactaatactcagctagagttacccggtgtgaggagtctactcctctatctctagaccatgaagctgtttggctgaggggtttggtttgccaaaagcactagctgagtctaaaaacaagttttagcttttcaagttctagaataataatttaaactagatgagagcatatctattcatacatggtatcaaacattatatcaatcaacatcttttgccagtaatctca

SEQ ID NO: 1241 - DNA, 490 bp, Zea Mays
atcggctgcgacacggctgccactggcattggcgttgcgctgctgcttttatttatatacacaaaggggaatttaagcgcagcgcagcgcggttggtcaatactatacgatcaagggaagcgtaccgacgatcagacgactaattgctgcaaataaattactgactaatcgtggcctgagcaggagatgatggccactcgcgctgcacgatttcgtcaataaacaacagcggaagtactgccaaatggaaaagctagtggaaacaccgaaagctctacctttgccgcctacgcatttcctactgtcgccgggaggaagaagaaaaaaaaaaacctgcgcagaatcaatcgtcgagaattcggaattcacaagggccaagaagaagaatctgcgtacgccctagcaagtgctacgtgcaaaaccattcatgcatcttcttaactggccaaaaaaaaaagccatgtgctgcaactcccaactccaagcaaac

SEQ ID NO: 1242 - DNA, 490 bp, Zea Mays
aatataccctgtgctctggataatctgtcccagagttgacactgccacttcccttttactaacagcacctccatctaaaagagaatccacaactacaggcatcagctcaggaagatattgcctcatagcaaagccaccctataacacaggacatattattaaaagctatgccattacgagaacacaaacaccacaaatagaggaacagatgaagactaaccactttggccagttctccaacagtggcaagcactcccgcagcaagagcattattagcatttggtcccgttccttcacacaatctagtcactagcgcctaaaacaaaaccaatataagaaatcaaatcgacatgataaatacaagtactgatttcacttcttgctaaccttgtgaactggagcaatgtaaggaagaatgagccgcgcgcagctcctaattaaacaacccaataatctagcactttcctctctacacttgctatccatactg

SEQ ID NO: 1243 - DNA, 490 bp, Zea Mays
cctccctgtcgtcgacgtcagttcgctgcctgtctcgagaacgcggggggggaaggggaatggaatccaccactccagcaggcattggaagcttcctctctcctccggcgacgcgtccggactcttgagtctgagggggcccaagcaacggatatatctcaaatctgtgccgatggatgaagggaaaactccaaattattgctcgggtttgggagatgtcctgctatgctgtgctggcgcacctctggaaccacaggccgcctgcaatgcaaccgtgccttgcaaggcttctggccgggctggctacaacgagacatgctgtctctagagctgcagggttaaaggcgcacgataaatggatcgtcgtttattatataatataatggtgtgatgtgtttgtaatggcataacatcttcatgccccttcctccagtgatgtccttgaataaacatggaaacaaaagagaagaaaataatgcatggttcaagg

SEQ ID NO: 1244 - DNA, 491 bp, Zea Mays
cctaacaatggcattgggggtcagctggtgtaggtagatttcaaacttcttcaaaacttcaccaatcatctcataaaggggaaccaaagtcctgccttgaagaagctcttgaagactactacttcatcctctttcagctctggaatcgtctcctctccagcgaaacaaaccaattcatcatcattttctccaaaatatcctagtttcttcattaaaactaaatcctctgccttaactgtgaatctcccaaattcaatatggctgggcttaatcggacataggatactatcatcatcctaactttcattttcacttttagcttcaaccatggtctgttcagcttcagcattatcaacatctttggcaatagtttcttcctgcacaactaacccagaatgcctcacttctgagatgggagctatctcagaggttccatcctcatctccctcgcgtgtcacctaagcagtagaccttactctggccatttcggt

SEQ ID NO: 1245 - DNA, 491 bp, Zea Mays
gttagatggtgcctcactttattactccacatacaataatcttcaccatcaaaatatgatggtttgcctaggggtacataaagtaatggagcacgctttgaaatacgaggataacataggggcatctttctatacttcttgcgctcatggtgcttagaagtaatggacaattcggagcttgatgtggagggtgacgaagagtcggtctcgtagtagaccaccttcttcatcatcttcttcttgtcacctctccgatgcgacttgatggaggaagaggattcctccttgtgtttgttgccggactcccttgagagagtcctccccaagcttgcggcctttttcgctggtcatgatctccctcttggcgtgatcttcagacatcacttcgagttggttagactcttaatgaagcactggctccgataccaattgaaaagtcgcctagaggggggttgaataggcgaaacctgaaatttataaacttaaacaca

SEQ ID NO: 1246 - DNA, 492 bp, Zea Mays
ctaatttacactaaatccatcttaacatatgtggattgagattaatactatagtacccaaacaaaacctaaaggctcgtttggtgactagaaatcacgaggggattcattgcaatgaatccacttggtatccagacctctctcacgcatgtttctttcgtcccatgcctgtggcacaagttttcagcttccgcgcagtactgttggaggatgcgactgtaagtggttgattctttgctgaaacatttctgcgcttctagagttgtcatcagcataaaacgatgaaagatgagaattcctgcttagggatgcttggtggcttgtcaatgagatgtaagtgattcacatctatatcagctggtaggtggaaaccaatttccctccagaatgctcttgcaaaactaccgcgcatgacgatgtgccctgccatttcttcttcctggccacactcatcgcatatatcactatatagaatttcctgttgggggctttt

SEQ ID NO: 1247 - DNA, 492 bp, Zea Mays
ccggtggccgcgaggcggtgaagccagagcgaggaggaaggcgacggcattggccagggcccaggggaggtagggaggccccaccgggccgccggagcaggagctgccggctcagcccggcccgcgcgcgccactgcatgcggcgtgttcccccgcagctgggggcccaaccgggctggaccgtggtccgtggggctcgcccgacgcctggatcgaccgatcggcatcggtattggctcgtgcccgcatcagatgtgcatgcattcgcgtcgcgtcacgcggcgtacgtacccagcatgcatatgcatatatgcaatgcaatggtcccagtcggtcggctggtccgagtccgacgaacgaaggaacagagcgcagccgcagcagctgggcccaggctaggagttggcatgcatgcatgcgccacagtgcagttctgctggctgccggcgccgcgcgcctaggcctaggcctagctagctaagctacctactg

SEQ ID NO: 1248 - DNA, 495 bp, Zea Mays
cagggaatggtgccaatttggcagaaactgaccaaattgggaattagattgaaaatgaggatgaccaaattggaggaaagttcggatggtgaacatgaacttgaaagacctaataatatcacgccggatcggaggagtctagctatggagatagtgctggagaggaagaagggttttgagggggtccatgctcaccacacgtggccaatgtcgatgaggctgtcataggggtttgaggggattatgcacaaaaattgacagcagaggttactatcaattatctgttgggaaatttgggaaagatttatgtagacatagttggagtggttgatcatggtggtggatctgtccaaatggcatgtgtgatcgcagagaaggatgcaaaaaagactaataaatcatctgacggggaatacacataggtgaaggaactctacctgaaagtaaccacatataatctttgtgctcacaggtcagtgcaacaaattattcaac

SEQ ID NO: 1249 - DNA, 495 bp, Zea Mays
gcaagaagtttggtatcaaggtctatgaaggagttgtaccgtttgagttaggatttggttactactgcgactgcgactattcttatggagatctttgacaaaggagacccatgaacgtgtactgtactttgcagagttacgctgacaaatccaaaagctcagtgaacgagcgtcaccactttgcaatgaaccgtgcatgcatgggcaaaacttgccacgagatggtactccaacaatgcaacaagcagaagcagagccggccgccgtggggtcaatacagcggttagcccgtcgattcggggaacgcagctgatgctgtatccagccggtacgcacgtacaatacgtcgtcgtgtacgtcttcatcaaccgccatgtccatcagatcaaccaaagctgctcaccgccgatggatagatccgtgaccggccggaccttattgcccgctgccactgccgtgtcgcaggcgtagggagccacaagctgctgctgtcac

SEQ ID NO: 1250 - DNA, 495 bp, Zea Mays
tataaagatgtagtacaatttataaaacgagagatgaatttagcatttaaccaattagctaatgagttgtgtttaggctgattatgttcaatgtgttgttcatgatgtttgcgttaggttcgtttaatctagaaaaaaaaccgtgattattgctcttagtcgtacgttgataactagtgttttctgtaggaaatagtacaacgcctcaccggtaggtgtttaattcaccgtcgtgtagccttatttaggtttgtgatattcttgtttatatgcattcatgtgcattatgcaaatcatttaggtacgttgattaaccacgagatgcggagagttgagtcaagtcgaccccaagcgtggactactccgcatggtgaagctgatggaccaacctgaagatggttaaatcaagcgaatgttcggttgagggatactcgtcaagcggatgtcatctaacaaacactaacatagtgtttattccaggcaagccccggtgca

SEQ ID NO: 1251 - DNA, 496 bp, Zea Mays
tttctctgagtagttcgcaaaaaaacctgaatacatagaaacaatgttcaacagtgaatgcaggaattttgtgcatgaattgagctgggaacaaataaagtatacttcaggttcaggggtagtggaaactttttatttgaatgctggaccaaagtgtcattcaataatcaatatacatggtcatgtgctgaacctagccatccagcaacaaagaaagtgatcctctcctcaagagtcaagactgctgaaggcattgatcatataattatacttgtgtgtgtgaaaagtttcacacgatgattatgatgtcttggatgaatcatcatgttctggatttttttttggttttgtattttgttactaactgcttcagctgcctcctgaaattctcaagttgcatgactaatccaggagcatcagatctctaaaagaatgtaaaacaagaattgaaagacttattttatgtgctgatttctaacgaaaccattagttttta

SEQ ID NO: 1252 - DNA, 496 bp, Zea Mays
ggtagaggtatctcaggcaggcacgcagctagcgcggcgttgcagttgcacaggaaggagcagccagggatagagaggatcgaggaccatttgtccgtgtggttttgtgctgtgcctgtatctgtggctgtggcggcacttatgagaggaacagacggtctgatgaggatgatgacgatgaggactgagatagtgcgcgcgtatgggtctgggcgtggcccatggttcgcggggaacgagaaggggcatgggcctggacatgaatcatgatgacctttggttccttcctgcccctaggtggtgtacgccgggctgctggtcctggaactgtgccacaagccactgggccttgtgatgggctacaataaccttttatagtccaagtagagagggcagtccatgtaaaggcgagataattgcatatttgggactctaaatattgcgcttcgcacaaatgtcattcgaaagattttcttcgtaaaaaagggactacaaa

SEQ ID NO: 1253 - DNA, 496 bp, Zea Mays
atgatgcgcatggattgtttctttgtttttgacatattggaccacattttgcaccatatgttttgtttttgcaaaaatcttttgaaaatcttttcaaagttcttttgcaaatagtcaaaggtaaatgaataagagtttgcaaggcattttcaagttttgaaattttctccccctgttccaaatgcctttcctttgactaaacaaaactccccctgaatgaaatcatcctcttagtgttcaagagggttttgatgattaaagttgaaaaactattttctcccccttttgaactcaataagataccaactgaaaaaatgctcttggaaaatactaagtttttgaaattggtggtggtgcggtccttttgctttggggctcaacctttctccccctttggcatgaatcgccaaaaacggaatcattagagcccatttgttgactattttctcccctttggcaaatgaaacatatgagtgaggattataccaaagacgga

SEQ ID NO: 1254 - DNA, 498 bp, Zea Mays
caaactacgggtatacggtacttagggtatggcggacccgacaatacgctctgcagccaactttgaagaccgagcagcgcggaccacgacgactggcggaaatactaacgctggcggccaaattgccgagcaatagtgcctaacccatcattccagccgacccacgctagtctagggaaccatgacaatgaatgcagggccttaccagcgatggggcgccgacattgttggacgcggtgtggtggattcgtggcagaagcggggtgtccggcgagaaattgcctccggtttcgtggattagcctcctaattgtggttacgcccggcttccctggacgatgacgatcttactcggcccctcgccgaggacggaaaccacacagtgacgagaatcacctacggcggctggtttacctccgtgggcacggcggtggcttgcagcgggggtcagtggcgggtatgtggctggtgtcgtgagaagggaggaagaccaggctct

SEQ ID NO: 1255 - DNA, 498 bp, Zea Mays
cgcgctcgttatccggctggcgagtgggaccaagaccttcccctgttcctcttcccctttccttcgcaaacagagcccgctcaacggggatcacgggcgggcgaccttctgcatgggataaatactgcaccagggccttcatcgttggtggattaggggggactcgccgcgagaaagtgaggccgtgggcaccaacgtcttgggccgtcgccgtgcggagtgagattgtgagtgccaccatcatcggtgacaggattcacccacggtcgggcctcaaaagttagcctagtttgatcgccggtgcctctggagcgtggtggcgtcgtccctgggtgtggatagtgctgcgcggcagcggaatcgctcgccgacgttcaccaccgccacagattccacctagtggtgtggtcagcactgctaccatccctaaccgccggcgagcaagccactgaggatcaaggggttcagtaggtggagactgctgagcagaagctcgtt

SEQ ID NO: 1256 - DNA, 499 bp, Zea Mays
atatgtctgtgatgattttagcctttcgataaaaagggatgccggcatcagttcaatgtatgggcattcttggggccatatacacttgtcggtattatgatgccgagtgctttgagtaaagatataacctggtggggcgcccagtgttccacaaaaggattaccgggatgcgccatattcaaaggtatggtcggctcttacttatgtgcagctgctgtcaagtgctgggaacaagatctgtggtaaaatccggtgtagggcacatttgctggcctccttgctccacttctttttaccacctgtgccccactgcccccgatactgggaaagttctcttcgtactttgtttttcttttgcgtcactatataatactgtgttgtgagcctctcaattttctgggcattcattcatgctgttttagttatacaaaaaaaaaggctctatcatgctggaagctggaacacaagatgtgttgaatcattgtacactttggctgcg

SEQ ID NO: 1257 - DNA, 499 bp, Zea Mays
agtggccaatgacaaggcaaccatcttatcttcagtcccgcttcccataaaaagaagaaaagagaaaaaacaaggaacaatatagatcagaagtagatcattccttacactgagtaacacagtaagttgtccagttcaatgctatgcagatctatactaaaaaaacttgaattattaatggtttgcatgtatacatctgccatgtggggggcaatgtaactcccttaaacaagcatcaatggtttaaactgctagtcatgtgatgatcctattattgcacatgggaaagcacataaaactatgattatatatgtaaggttaccattagttcactgaatcacggttgctgctcagatttttggggctaccagctgcctatctatagaagtaaaaggctattactacactacaacacaattgagaattagcccaaaaaacaaaagattctttttcctgggaccaaacaaaaatggatgtagtttgtagtggctgatcaaat

SEQ ID NO: 1258 - DNA, 500 bp, Zea Mays
gtccaggcagccaccaatggctgagttcctccgctccatttaccggagcgatctggggggtgggggagcggcggagccaggagctagccagctgattgtgaactcgagccgcagctcgccatcatcgaaaccggagtaaaccaagacgagattcagttgtgctgaggtctgcatagaagtataaagaggcaaggacgaaaagggaaccgaagacgaaccagttaccaagggagagacatggagcacagggtgaacagtggagcgtggggtgccatttttaatttgtaaaccacttgaccggttatggcctgaatttcataaggaccaaagtagcggtaggatataggttgtgacagaccctggaagtcaccgaagattgagcacaaggttgcagtttcaaccaaactctatctatcgtccactgcaaattggtgttatgtacgataattttgtcagcataactttccatatgtaatattacctccgtttttgaatattta

SEQ ID NO: 1259 - DNA, 500 bp, Zea Mays
cgccactctccctactcccttcctctctctctctctctagctccccatgcagcagcaaccccctcccatggagctggcgaccaagccctcccatgctcctccctcaccttggcagctctcccatggcgtctcccccttctctacggcagcaaggtgtaggaccgagagatgatgatcgagccagtaatgtggtgccaaccacaagatgccgtggtggacgacctgaagaatggacttaaccagtggatgctcgccaagcgagcacctcctcccccagcaaacactatctaagtgttaaaaattaaaggcaagccccggttttatgcataaccgtttatatatgctattttactacacttaatgtttgaaggcttgtactgtgcacttaagtgtaggagttgactgcaaccctagttgcatgatctcaggaatcctattgagatggatactagtatgctaggtcgagtagctgctttactaattagggatctcggtagaag

SEQ ID NO: 1260 - DNA, 500 bp, Zea Mays
ccgacgactagtgcccggtggcggagctccgtaaaattaacgtcacaggtcactctacaaatataatgatgtactactccgtcttttcattttcacaatttagttcaaaaatgaactaggagacgataactatttaagaacagggtagtaacatttaaatcaatccagtggaactatgacaggtagggaatgtggatcgaacatttgggaacaattacttacaataggggagaatcacgggtacattgtagcagacagtcactgtccattggccaggaggcactccgcccttgcctatgaataagaaaaaagggaatcagattgaggaagttgtatagcttgggagaagatgtaatggtaggggcagatttgtatgggcggtggcgtgatgccagtgcaggtcgcgcgcgcgtcgctgctgcagggtcgcagggaggctggaggcggactggcggaggcagatgtcggactagcggtggcagatgcctaagtcagagccc

SEQ ID NO: 1261 - DNA, 501 bp, Zea Mays
gcacggtccgccctctcccggacgataccacggccgtggggaccccacatcctatcataaagcgcccctgcggtgcgctttagcacatcatcttcaatctagaacactccatgatcgaagttctcattcgcccggtcgaagacttcgaaatgcctacatccctctcgggacaaggcattcacagccccctcgcaggtaacaagggatgcataggacataaggtctgttgcgatggacgggagcgactccagctccacctgcaaccacctaagaaagcgaagccccacctcctcccccaattcgtcgaagggagcggtctgcacgccgagctcacggtacgcatacacgaaatgtgtgtgcgcccgctcgatcccagcgcgagtggaggactccgtcttctcgcgatggctgcagatgttcctcgactccaactccatgtcggcggcacgcttgcgagcggtttcagcctccgcgcgggcggcctgagcttcgacgcgagcg

SEQ ID NO: 1262 - DNA, 501 bp, Zea Mays
cgacggcggattgcagactcgtggtgttggtgccacgcgcgaggatgcggtggcggcggccaatggaaggcggatgcaacgtccctttgccgacaatgagccaccgcgtggcgtgagtcggtgtctgtcgcctgacgaagacgcagcgttcaagaacaagaacaatagtatttcagattagcaacacttcatcttcagagaacacttcttcgtcaatagggagtatttcgagactcgagagggctttagaagaggaagaaaggatatggcagccgaagaaacgtttgacaggttgctgctaaatgaattgtgtggcaacatgttgtgttcccgataaaagagatggacgtggaagagctctgtacctgaactttttgctttgagagagagcaatttgtgtatctgaactttgacgcagatatggcagaataaaaatggagaggcgtattattaatctttccatgttgtgcattttgaaatatctctacgatggagtctcta

SEQ ID NO: 1263 - DNA, 501 bp, Zea Mays
gtgcccaacgtctccatgtaaggacgcttgtgccctcaagcacctggattatccccagaatattcccataagggagggttacagactgtcattacaggaaagctattacaaatcaggcccgtaacacgcctgtccgtgcggggcttgttacaatgggccgaatcccacgtgggcatccaggtcgagtgaggacgtgggatggagagacttcgtcgtaggccttcgtcttgcagcgaagagggcaaaggggtgggccgcgccggtcatcttgcctccgctggtgcagtgagtgacgaaggcctggagcgaagggtagcgtcttcgccttcgccccaacatttgccctctgagggaccagttcgactgagtcatctggtgccgaagacgtcgctagatggtggagaggctgccctcgctcgaagtggttccgcgggggtttttgatgtgaccgttgacggacatgtactgttggactacgggcttcctgaagcgtcgcgtcct

SEQ ID NO: 1264 - DNA, 502 bp, Zea Mays
accacaccgctcggcacttgcgcgaggcctctagtccagctgcagagatcgaggtcgtcgtcgtcgttgtcgtcggtggtgctcggccgctcgttaagttcgtgcgtggcacgcgcgcgcgggtgcggctgccggcttgccgcgtgagcggtcgctgatggagccggctggcaagtctccgcacgcaagccgacgacgtacgcatcgcgagacgcaatcacccccgggcgggcggtggggtgtcgtcgtgtgtgcggccgtacgtggagctcctgtgcgatccgcacagcggccacgacgactggagtaggcattcaagcgctggggcatacctgtccgggcgtccgtcgtccgatggccctggcccggctggccggcacgcactgtgttggaacgagatcgaactatgcatggtgcgcgacgtcgacggaccgagggtttgggggccacgcgcgtgcgtgcgtgcgtgtgcgtcactatttgcccattgtttggcgtgcca

SEQ ID NO: 1265 - DNA, 503 bp, Zea Mays
ctcccccccacgcagcaaggatcgagaagaggaggagcaagatggattgaagaggaatagaggatcaaggagatgttctttcccatctcttcttgaagattttcttggggaaaccctaggtggctacactccagatcatgcctagtacatttcttcttcttcgatgaaggcaagtgaatgtagtggtggttgcttccgttctgacctgttatttctattgtctacactctaatattcagaagtattggattctttcatatttggactctatggtgatgctttacttgcttgcattatactgatgctcaatcatatattgatgatggttatgattcgagtatgactcatgagattaattcacacccctgaaggtaaatgaagtattatttgaggttggtattgtatctgaaggtaaatgaagtattatttgaggttggtattgtatctgaaggtaaatgaagtattatttgaggttgtattgtatgtgaagaaagtgaagtata

SEQ ID NO: 1266 - DNA, 503 bp, Zea Mays
gcttgacacaggtatccgcacgttaatccttattccaattttgtctcatagacaacgcatccccatggatccgtgtccatagaccatcatcattcttattatcaaaaatggatacaaccaattcctgacctcgcgcgagtgctagaaaaatcactcgacttctaccgagatcctgatttagcatagcagctactcgacctagcatactagtatatatctcaaaaggaaccctgagttcatgcaactagggtttcaggcaactcctacacttaagtgcactgtacaagcctacaaacattaagtgtagtaaaatagcatatatatataaacggttatgcataaaaccggggcttgcctttaatttaacactagatagtgtttgttgggggggtactcgcttggcgagcatccactggttaagtccatcattcttcaggtcgtccaccaacttcatcttgtggttggcaccacatcacttgcacgatcatcatctctcggtccta

SEQ ID NO: 1267 - DNA, 504 bp, Zea Mays
cttgtccgtacttccttctcagccgtaacaaccgtgcgaaatcgtcgcgcgcgacgtgaatcctggtcggtttccttccctccttgaccgatggcacggggataaattcggtgccggatgacctacctgttaagccacaagcgagagacatagagccgtcgtcgtcgtgtgtgagtcgcctgccacgcatgtcctatccaccgagagtgagagaggactcgccgccgccatccattggtaaaggcacttgggaatccggagctgaaccgtggagctgcacagaccacgcagaacgtgggtgactcatcctcgggcgtgattgacgactggtgtcgggggaatcgctcaccggtgaccacaggccgcacctctccgcaggcagagcgcttcactgcatagtcgtagacgggcaagtgaatgaggacacagagactcagcaggtggataatactaagcaggagctcgttgaaggcaagttgtgcccttgatcacttatatttactc

SEQ ID NO: 1268 - DNA, 504 bp, Zea Mays
tatagagataaatgtcacaataatcagagtacttaatacatagcggaagacttacaaaaataaaagataaatataacaggatctaaaatctatcctaggcgccagaaagtcaactgggagacgccacctagatcgaatcgaactcctcgatatgcggctcctcttgaaccacctgttcttctcctgtgggggggtgtgacacagcaagagtgagctcacatacgttcatcgctcaacaagttgtggggaataatgtgacatgaactcacaaaaggtgggagttcatgtgaagtgtaaggcttatcaaagagaatggttaaagctgagcattgcttttaatgttggtcaaaattttattagcaattactaggtgtaagtaaataccaaaccataataaataatggaacaaaattaataacaaatcccatgcaaatgcaaatgacaaattgaatttaggttccataaattaatcatgtgagggtccgagccgctcatgaccgtgag

SEQ ID NO: 1269 - DNA, 505 bp, Zea Mays
aggtaaagggttgtgggccattggatgcaaagatagaagtcatctgaggcgtcgtttctttctcccacaaaaaaccctaggtggccacccctttttttcccttcaccccccccctcttggccgccaccccctttctcccccttggctggccgccccctccccctatggcagccatcctccattgcttgctcccccaagatctccccctacgcagcaaggatcgagaagaggaggatcacgttgaattgaagaggaagagaggatcaaggaggtgttcttccccatctcttcttgcatattttcttggggaaaccctaggtatgatgggatccttgttcctccctgtaattatgtgcttttggaggtggtggatcatggggattaaaggattagaggttgtattagatgtgaggttaggttttgatctcgaatttagttttctgcagcatggcagattcgacagtttctgttcataccagttttccgtgatcttagtggcctcaaa

SEQ ID NO: 1270 - DNA, 507 bp, Zea Mays
cggaagtggtctgtatcaacaaacggggaggtgcgatgtttcccacggtagactgcgctgccggaacccggaaggtcaccgcgccgcgacgctggagcaggaccctcccccatcagcgcctcctcatcgacatggctgacgcatccaatacggcgacgagcaccggtcaggaaggtgacgcccgacgcacctatattgtgcaagtctagttttattctcgttgggaagcataacgctgtctatgttcgaggcaaggcatcctgaaaaatgcgttaacctttccttactgcacaatttttagttcttcattcaaatgcgagattgacgtatatgttactggttgttgtcttgtcctgcagaactcgttaacttttccttagcgtacagattttattctgattttcagtcaaacgcgagattgatgatgtacctgttaatgttttttttgtgtttcgtccagtgtttacaattactagtgatcaggcttgttttgcatatagaatgcgt

SEQ ID NO: 1271 - DNA, 507 bp, Zea Mays
caccctaatcccataatcgaacgcggatacactatgtgtacaccaatgcgaattacatggagaagtccttaccgtgcgccacgcgagcaggagcactgaccacggcggagggcggaattgcggtggttcctctacttcggcgagaaattgccgcgcgactgcccaagttctggggggtaaggtcatgacaccattgggacacctctacgaccctcccaagccatctatcgaggacagagcgactctggacacaagccgtcgacggcgctcttccgcttttctctcttcctgccgctcccgagctccgactgcgtcactcccctcccgatctctctctcacgctcggtcgcgggtagcatgcgttgatgggaggaaaagacggcagcccaagcgcccagtcttatagccccgaggaaggccgggcgaggattccgccggtgcccaccatcatcgcgcggtcgttgcggtgaacctgtagagggggagatggcgctggggaagtgtggg

SEQ ID NO: 1272 - DNA, 508 bp, Zea Mays
ctgtattcaaccttcatagaaaaggattcaacctataaatcgcaaacacaattatttgcattgtgcaattgttattttttgttcaattatcagttcagttcacagaatgggaacgtcttgttttgttcatatactaatcgcatgcttttatctgagtacgaattgagtggactacgatgtggcttcaaatgcatgaaaggggtggatatcaatatatcatgagatcttaatgcctcaacaaactctatatttgtgattgcacctctgatcatctgcattgctgcaggccaaacaatggagtactatgttagttacagggctttaccagtatgcttccatatgtttatcatcatgctgatgtcatagaggcaagaacctttcagcgcaacatcaagaaggaatacatccttttctttgtcttgtctttatgttttcctggtacctctgtatattatttgattttattcaataagaggataaaaggatctcttatgagtttgaattggcc

SEQ ID NO: 1273 - DNA, 509 bp, Zea Mays
aagatagagcacactgcagcatgttagtctaagtgtctaccatacagaagcaggtgaaagcacattctaatttctaatatattgaatccgaacataacgcagtaaggtctcagatcgcacagcctaaacatcaaaggatccgtcgacggtaccacaaacaagcagaaaaatgagcgcgtgcaggtgtccccaagatcataatcgtggcggtggcggtgccggtgccggtctcgcctccggaccagcactcgccgaggttggggcaccgggcctcctcgcagacggtgtggagcttcagctcccgcagcttggccgagtgtttggaggagagacgggccggggtggaggagatgaagcgggagggcgcccgggtcaggggctcagggcccgggttagggacgccgcgaggtgccggcagccgtgcatggctgctgctgcggcagcagttggtgaggcgtcgggagtccgggaggacggagcgggggcttccgtctgcttgtgtggaggac

SEQ ID NO: 1274 - DNA, 510 bp, Zea Mays
caggcggcggcggcggctgcttctggaaaaagatccggagtcagatgcttggctcctgcatggtgcgagggaatatccactgctcgtcctcggggagcggtgctcgagtcgctgtcgcaatcccgtatctgcgggcaacagttcgtggttcacctcagccaagattcacgtggccaccgttttttttttgcttcgcttctgattgaacgcacaaaactgaggctcctttggacgtagctgcgagctgcgtgaaccgagtgaaaatcattggccggtttccatctttttcttttcatgtgatatacacgcacaaaactgagtgtcctttggagggctactgtacagcagtctctgctacgctgttcgtggccaagattgtgttctccagggggtagcggatattcggcggatgcggagaatctcctccgaaggtgggtggctgctgggcgcggcccatcagttttgtggtcctgactaactttttgtacttgaaccattagaacgcggtgt

SEQ ID NO: 1275 - DNA, 511 bp, Zea Mays
ggagtttccgttgcatgcacgcaaattttggatgacattttcgtttctaccgcatgcgggtaaaaattggatgatagaaatcgcgcaaagcataaatccttgtagaaagttgcataaatacctccatcgtgcatcataattaatggaaaacgtcctaatatacgcccaaccaacaaccccatgcataaacaatgattggagcaggtcatcgccgaagtgtgcgcctccggagagccgccgccacgcgcgagcctccgggatccgccgcgcacgcctcctggatccgtcgtcattcgcgcgcgcctcagggggccgccgctgcggcaaggcctctaggagccgtcgtcgtcgcgcgcgcctctgggatctatcgtcgccgctcgcacctaggagaggtcgctgccgcccctccatcctcagatggcctcaccgtcgcgtacctcaggaggccgccaccgctgcgctccctcaagaaaccgtcgtcgtgcttgcgactcaaggagccatcgcc

SEQ ID NO: 1276 - DNA, 511 bp, Zea Mays
tactcgacctagcatactagtatccatctcaaaaggaatcctaagttcatgcaactagggtttcagacaactcctacacttaagtgcacagtacaagcctacaaacattaagtgtagtaaaatagcatatataaacggttatgcataaaaccggggcttgcctttaatttaacactttgacagtgtttgctgggggatactcgcttggcgagcatccactggttaagtccatcatctcttcagatcgtccaccaactacatcttgtggttggcaccacatcacttgcacgatcgtcatctctcggtcctaaatgagatgcaggatgcatatgtatgaatatgataaaatatatcacaagataatcccaaaatggacggtagcgaactaaacattaaattgtaagacaccgcgacaactgtacgcaagcgctagttatctatacgtcatcgggcatacatagtcaatcatcactggaaaacaacaaacacttcctataattttctatagcaa

SEQ ID NO: 1277 - DNA, 512 bp, Zea Mays
ctaggactccgcaccataatcaatcgcgggggaaaccgagacgaccacggcggtggccatctactctatcctggcggtctctcttcgctctctcctataatggcccttgcatgaggatgcaaaaaacaacgtttttttggaagaactagggattgggagggatggctcggctgtcgtataaatacaccgaaggtgccgagtcctggccaagggggacgtcagttaggtggttacaactactcgggttgttacgatctctggagcttctattgatgtccgtttcgcagcatgagatgaatcacgacgtgagcaacaggagccccacgcgcactccgcaatgtgctggcctgaatttgcatgatgatgtccttgcatcagcatgacataagctccgtctaggtgaataaagaaagtggaaattcacgtctccaatgtggtacgtctggagtagtagttttatcttttttttctcattttccgatttcagttttaaatcccaacttcaaattttt

SEQ ID NO: 1278 - DNA, 512 bp, Zea Mays
gatatatatcagctggcatgcagcgtacacacacataaagatactaatcctaagatcaagtccagagtgttttccagtacgacatgatatgatgcaatacatagatacggtacaagaggttaactgatctgatcggatcggacatttatatcccagctgtggcagcatgcaatgggcattcttcagtttgttctgaacggccggcagtaatataatggtgatcttggagcctcatgacaaacaagaggagacagcagcggaaagctagatgcgttttgagacagtgcatgatgcttcgtcacgtacagtatttgtaaatgccaactgctcgtgtccatcaaattgatgaatgggctacggcctacgagtacgtcgtgtcgtatacagggagcgttgaatctgtgttgaccccagcacggtcctcctccatcagtccatctccttttgggtgccggcttcagctgtagccgtacgtcgttgctgtctgtcatactcaacaatacacagagcga

SEQ ID NO: 1279 - DNA, 512 bp, Zea Mays
ttgtgcatggtgattctacttggtgttgagttttttttagttactcgtatacttgctgcaatttactgttcaaaagaaaagaaagaagtcctgaacacgtggttgtgtaagcacagttgatttacaatgtcctatttgctgttgttatgtttacttgctgagatgtgttatctcacatcttgcattgtttgatgcaggcatctaatttctgctttggggaatagagggatgtagcagcacggccactacacctttaataaaggaaccaccatttattaatgttgttaatcagagttggacaagtctagtgaattgctttattcttggttgagcggttattttggggtggactgagttcttatcccatttgttttacttcagttgggtcataattacgttttaccactcttgcattacagtttctactatgtgaattatatgtctttatatcttgtatgtgcgtcatgttttcccctccttgttatgctagttttcaaaggaggtgctgccgg

SEQ ID NO: 1280 - DNA, 513 bp, Zea Mays
cggggacggggatggggagctattccccggcggggaattccccgttgccatccctaggcacgacggcgggtggcggcgcgtctcgacggcctacggcggcagaacgcgtagacatctgatggctcggtggcggcggatggcgctcgggccaggagcgggcgagcggcacgccatagcgcgacggcgtcgtgattgtcctcgtcgatttgccggtgccctgtctcctgctcgtggagcatgaaggaagatgaaccgtcaaacaaaacgccaaagctgcatgatcctctctctcattcgttctccgtgtggatagtggaaacagaagacgaagcaaacacaaaacgctggatcgtgaagaggctaatggggtgggtgaggtcttggtggacatggcttagggtgtgccgtggcccacctggacccacctgtgggtccgcccctgccaatggggttgggagcactcacgtgcttatcaacttctgaatatctcgtttctttttccctctaaggaat

SEQ ID NO: 1281 - DNA, 513 bp, Zea Mays
gtcgcgtgggttagttgggccgcaattggagtttcggcccattaaccctcccaaaccctagccgcctccctcctaaccccctccccccatgtgcagccgccccccccacttctcttcccccttggccgcccccctgcccatctcctcctctctcaattcttgcagccaccaaaccctagccgcccccctctcaattccctcctcccaaggtgccaatccttgccgctcggatcatcatcgtcgtggtgcgagtcttcaatcgttttggtggagggaagaagggaggaaggaaagggggagaatccaaggtgatttttgtgttcatcccttgttcatttgcgctgcaatttaattgattagaggttgcgtttgcgattggggtagaggggggctgtccagaattttaggtggtgggtgaacagcagtagtctagcagtttctgtgtttttttcgtgaggaattaagggaaatcagtttggggatcatgtagaactttaccttacctttccaacg

SEQ ID NO: 1282 - DNA, 513 bp, Zea Mays
  misc_feature (512)..(513): n is a, c, g, or t
gagtagtcaaaggttgctttcgtcccccctgctctcggatagcttcagcgctgccttagttatttcttgcagatcctactcctgccatcgacgcattcaaatagcctcacgctctcaccagttcagcttgccctcttgtccccttcttgcttctgtgagttttggtgatgcgaaagtatttctccaaactttcatttcacatttgctgttatttccaagattatgaagaaattataaagtgatcgacagccttctttggaggccgcttcatgctttccgtgcgctcctgaagatgctagtcccgtgattttactcgcccaagtaggccccttagttcaaaattcccggcagcgttactaggagctcttttagcttcttaggggcagctgcctagccatatcctaaaggagacaacacttcttggtgattgaggaacgttggtgtttctggacaactggagatgtactcaggccagcaatctgatcaaggtcctagtgcaaatagtggcagann

SEQ ID NO: 1283 - DNA, 513 bp, Zea Mays
cttccgaagcggtggaagcgattgagcccggcccggtgaaaggcattcgcgccaccggtgccaacaagctcgaagagatcctctacggcgtgctgccacaggtgatgccactgctgatctcctactccctctatcgcttcgaatccaacgtccgctcggcgaccgtcgtcggcatggtcggcgcaggcgggatcggcgtcaccctgtgggaagcgattcgcggtttccagttccaacaaacctgcgccctgatggtgcttatcatcgtcacggtcagcctgctggatttcctctctcaacggttgcgtaagcactttatctgataagcgaggcattgatatctatgcacttgtctacacatccgaccagctacccaacacgctatcaagagatagccgcaaaacttgagcaggagcttcgtcaacactacccgctgcgggcgactatcttcccgccgagcagcaactggcagcgcgctttgaggtgaatcgccacaccctgcgccgcgccatc

SEQ ID NO: 1284 - DNA, 513 bp, Zea Mays
agagtgtatagagataaatgtcacaatcatcagagtacttattacatagcggaagtcttacaaaataaaagataaatatagcaggatctaaaatatccttggcgccagaaagtcaattgggagatgctacctagatcgaatcgaactcctcgatgtgcggtcccacttgaaccacctgttcttctcctgtgggggggggtgtgagacagcaagagtgagctcacacatgttcatcgctcatcaagttgtggggaataatgtggcatgaactcaccaaaggtgggagttcataaagtgtaaggcttatcaaagaaaatggttaaagctgagcattgcttttaatgttggtcaaacttttattagcaattactagatgtaagtagataccaaaccataataaataatagaacaaaattaataaataatcccatgcaaatgcatatgacaaattgaatttaggttccataaattaatcatgtgagggtccgagccgctcatgaccgtgagcacggc

SEQ ID NO: 1285 - DNA, 515 bp, Zea Mays
ctatgcatatacacgaacaatgtccaactaaaaacaacgagaagttgtcttatagataatagaaactcaaactagaactgaccaaggtttaaaacttgacaaagacgacaaatagagctagccaacccttgtgaaagatcttgcagtcctatctgtttggtgtttctaacacttgcccaactggaggttggttagtgctcgatctgggaagatttcatgacaagcttaaccctcgttgcccatgagggctaccaagcacctcgtcgtcaccgctgccttcctcctcgctgtcgatgtcgctgccatccctttgctcgatggtggtggggcgtcctgtccatgctcctcccagcaggtggccaggtgctggacctcagagtgatagcgtgggagcagaggcttccaccgtgacgaccaatgatcctcctatacgagcatggtggctacatcacctacggtgcgacagcgtgccgtgctcccaccgcggtaccactgtactggctattacaattaca

SEQ ID NO: 1286 - DNA, 516 bp, Zea Mays
gctgacacgtgtgcaagccttgctctccgctccccgcgcaggcgaaggcccgctgcttgtggcccatgacataagccatcgggccgagcctgacgtaaagccgtgtagcccctgcatttattgaggagaggacgcgccgccttccactgcgctgacgggcgatgtgccctctcagcatttaatatgtcccgtcccatccgctggcatgcggcgtcaaggtcatctagcaggcggcgtgcatgctgggtctgctggcgaacagtgcgcccgtaccaagtagtgcactgtgttatcccttctacaagaagcctctcctacacgccgaagatacacagatctcggacgacaggacacaagaggattgccccggcagcaaatatttatagtcccaaatgttatattctctatgtccctaggcccacgtgtcgggcttagtacctttgtgcatgccccccttcagctataaaaggggaggcatgcgacgttacgagactcagacgcaatctcagactcgct

SEQ ID NO: 1287 - DNA, 517 bp, Zea Mays
ctgagatctaatcgtgactgttggatacgatccaacggcccaagcgacttcttcttcctccctctcactacggcgcccgcactacgtctcgacacctaggtgcagccgaccgcgcgccatggccgacgctctatcgctcacagagaaaggaaataaaagaaagaaagaaaaatagagctcaccggaggctagtgcgtttaggaggaattgcccgccaccgttggccagcggcccggcaccaggatgcacctgcgacaacccccgtgcatgttctggatgaagccggacctggacagcggcaccgcggttccgccggcggcgcttctgcccgaggtggtgtgcgtccaggcagtgctcgaccagcgccacaaggagtgcgtgcgcggacagcgccatggcggccacggcatcccgccatctaatctccccggtgaattctcctggcggcggtgctgccccattctctctctctctcgtctcatctccatggcgaggctctcggcgtggcacaggggcg

SEQ ID NO: 1288 - DNA, 518 bp, Zea Mays
ccggtgagtaattattggcatatctttgctctaacccaacccaacatctgtggaaacgacggcgaggacgtgatgaacatgagatggggacattactggcacctaggatcgtggaggcgctaggccatggcatggcatgatccatggtagattccaggctccggtgaggaattgtcaagccgccacggccacccgtgcttgtttccggtgttgcccatgattacctccttccggtgaacccctctggtagcctgcggagctcgacacgacgtcgatcgtggtggttgacggttgcggtctgcggtggctgctaaactcgattctccacgcacggtgcccctcacggtggttgtgggcaatctacagagctgggatgggagaggacgtgcccgcaacgcggctttataggcctccgccatgaagatgatttctaggtcgtcgcaatgacatctcagattctatgcgcggtggttgggttttcggtttgagccgagcatcgcggggaaggggaatccctg

SEQ ID NO: 1289 - DNA, 519 bp, Zea Mays
taggatttggaggatcaaatcttaacgaagtcatctaggatacgattccatcagggtataaattaaaatacaaggccccccaatgattcattagtcttggatatccgcttgaaaaccaggagccagatatctaccttggcaacggtgccaacgcctcctgctgtcatccatgctcggctgtgcgcatggtctggtggcggccgtgtgtcatcctattcttttgccgctcgtcgttgcactacctcgccatgtctgcaacgctatggaatcgccgcgcaagccgctcaaggtatgggaaccgatacttgtggtaccacctcgtgtcgtgttgtccacattaagcaatggcgccatagtagatgaaataaatcttctctctgctattagtcatagatcggccagtagcttctcgcaactcttgaatctagttttctgactcaccatctcgctcctcgtccggctatccctgtccacgatacgtcaataagttcgtcactccgagcaccggcgaactcgccg

SEQ ID NO: 1290 - DNA, 519 bp, Zea Mays
tgaacacaaaaatcaccttggattctccccctttccttcctcccttcttccctccaccaaaacgattgaagactcgcaccacgacgacgatgattcgagcggcaaggattggcaccttgggaggaggggattgagagggggggcggctagggtttggtggctgcaagaattgagagaggaggagatgggcagggggggcggcggccaaggggggagagaagtgggggggggcggctgcacatggggggagggggttaggagggaggcggctagggtttgggagggttaatgggccgaaactccaattgcggtccaactaacccacgcgacagctcccgaccgcaacgcaagcgtcaaaccaaataaattctactgccctagttgtgaatgttttccacaaaatcccaaatccccaaaacaacaaccggatgaggaaaaaaacaaaaagaacaacccccaacttctcttctttgcaaaccgggtatcacactctacccctcttaaaaagaattcgacctc

SEQ ID NO: 1291 - DNA, 519 bp, Zea Mays
gctggatgttggaccactatgctgttcaaggtctttgacctgatcacttacctggtttctatcgacaaagatttgagttgatctacacgcggttcttcatggcaaaaaaaatggctttcggaacaggtatggggtgcgtgttcacgaaggatggtccaaggtccaaagcctgtacgcaccaaggaagaatcttgggggggatggagacgagcacagtgttattgtatgaagcaaaactagagctgctctgatttggaacacactgttttctgcgtagtgagtggagtgtggggcaggattaggatacagtgatcgccacccagatcatttggcattggtttgtgtgcgtgttggaagagcaggtgacaccacgaaaggaaatctggtggaatcccttatccttggggattgctggtgtcattcaaagtacacttctagtctgctccctcaaacttttgttgcaattagtgtattgttaactgttattttcagtgagagaatcatatgaatgccttattt

SEQ ID NO: 1292 - DNA, 520 bp, Zea Mays
gtccgtccaacatatatcagcaaattaatccaactcacctcatcgatcgaggtgcatgctctgcagccaaatcaagggcgcagaaaggaatccgagcaaaacaaccgcgcatggtcagggcacgcaatatatgaaaaccgagattctggtccgacatgcatgcaatcgtacgtcaggctcatcaaattttttaatgcattgtccatggagatagatcatggacaagggacgatggcatgatctgcgatgcatcgatcgaggtgcatgtgcatgtgcatgctcatcagggttttgattctccgatccgatcctctagctcatcatcgtcagagcgcgccagcagaagataatcttgattttaagacagcagtttcgcaagaagatcatcgtcaggctcatcaggtttttattctacacaaagaagaaacggttacccatctctttctcaggcgcaatttcacaagaagaagctggcagacaattagattagcaccgcccagaacatctgacatacacaatg

SEQ ID NO: 1293 - DNA, 520 bp, Zea Mays
ctactagaaagtagaccatttctgctaccagacattgatttgtaccccggtatcaatatctgggtaactttgggaaggagtatatatatatgaaccttgcagcaagcattgggtagtcaaacaaagccctacagacattgatctgtaatccctatatttggtgagaattacaatggaaggaagcaagtcggtcctgctcttgatggtgatcctgggaagtttgatggttcctgcacactctcggaacgttgttcgtttttgcaaatgtcaaaaacagacctgcaacatgggagcactattcgacgctgtttgttactgctgtccaggcggcagttgttattcgacgatgcaggattgcgcaccagcttgccgctgcgacaagctttcgcacgccccactaaatgtaagggatcatgaatcggtcctgtgatttattgcaaagaaataaatgaaaaaagcggtggcatttgttgatgtttgatataaatataaatggaccagcgtctcgtccgggtctgcg

SEQ ID NO: 1294 - DNA, 520 bp, Zea Mays
cctatggagttccacaagtcctgcatctgcctacctgttgaggactttgatatctctatattctagtgtgggccattcagacactattcagacaatcctttctagggatcgtaatactgttgctggtataattcctccacatcaattgcagaggaggtgctttaatcaactgctttatagcacttacagatgcaaagagtagtcgattgcacacatcaggtgatagctataggctcttgtaccacgtgtatgtttctttatgctggtttgtaaacgagatgtttgtactttgtactatagtttttgtaatcagtctctctttcaagatttacgtctcatataaatagtatgtgcattgtttaattcgcatgtttaacggccagaaatgaacccctggtgtcaattggtttaccctggatgcttaatcggcaaaataaatttctctctttcatagagtttagtagctctttctgttagtaaaattgccactttgcagccatataaaaacatttcaaaccct

SEQ ID NO: 1295 - DNA, 520 bp, Zea Mays
agctaaccagctagaacgaagtgccgagcgccgtgcgccgtgcgtgactacacacaggggggaggaagagcgacgcgccagtgcctgctgtggcgagcgaagggagtgtcgtctaggcgtccatcgtgcgccgccgccttgtgggcctgtgaggaggccgagccgctaccccgtcgaggagaaggaacgccgtgagcaaaggccaagcagccgaggggagaagtcgccatggcccgtgtgcgtgcgcggaggccgagcaccgaggggagcggcggcggaggacctgagtccggacacgagctacgcttacactgggtctgtacgccgattcgagatctgaaaatgaagagaaagaagactgctactactgattcgatagcttttttttagcaacagctgctgcaaaaaagaaacaatctgcaagtgagacattgacagtagctacttaattatgtcaaataatactttgacattttgagtgttgaacaataccattttatgatatattctttgttgcgtg

SEQ ID NO: 1296 - DNA, 521 bp, Zea Mays
gcgactgcgactgcgactgcgtcgtcgtcgactgccaggcatgtctgccatgctgcctgcagtcgacgcgtccacagcgactgctggagtaccttcctggagcccttgacccggacacacgtcgcttgcggacgacggtgccaccacaccacgcacgtactacatacagtacacggtcagcacgttctgaatataatacgcactctgttccaaatttataagttttttttatatagaattatgcatgttaaaatatatcaggtttcattggatttatataataaaactaatagtgcttatttttatacggaacggaacggttcctggtcaagtgaaatttcaccatgttttggataaacgaccatgaacatctatgatgtctgcggataaacggggttttccttcagtccatgtgctgtacgcctgtactacagtctacagtctacagagcaaggttttggctggcctagggaattgcgtggcacatggatggggcccctgtcatgttctttcaaaacggc

SEQ ID NO: 1297 - DNA, 521 bp, Zea Mays
tttattttttgtcagaatgtagctagtttgctttgtgaggtggcggagcagccgagacgaaggtaggttaggttacatatacaacaacatggtgagttgttgagtgatgaatgatgatgatatggagagctcgtgtccttgtctcgaactctgcgtctccacctctcctcggcgtcctgtttgcatgcaccacggaaacatggaaaggcatctagaaggattccgaagtgcgcgcgctcctacataccctttggagagctcgacagacggacggcatcgggtcgcagttgtcgataaataaaaaaaaacacgcatggtatcaggatggcatcgtgctgtttggctggcctggattggacagcacagcctccccctacctacctacctccctgcaagtgcaactgcatctgcgtacctaccgctttgtccggctctggcctccagcaagcagcgtgtggtgtgctgttgtgtgtctagaagctagcgctagggggtacactcctaggggctatggagcagca

SEQ ID NO: 1298 - DNA, 521 bp, Zea Mays
gtagacttggttgcatttgagcctcatcaactctaacatgtggtcaaattacagttgcaatacaatgcctctgccaacaacatgtgttttggtggccactcccatggccatggccatagaagtcaacgactcttgtcattagtgcctgatctgtggcaagtcaggccacaccaccatcaagtgttgttaccagatggatgatcgtcgtggcaacgacccttgtggtgatcgtcatggccacaccaccatcaagtgttgctcccttagtgatcgtcgtggaaacgatccttgtcataacagaatgaatctttaacggccttcgcgtctacgctctcctacatggtcgaccccaactagttcaacgatatcgatgtcatagatcacatcacaagtgaccttgattgcctagctgagcaggattagtaccatggcagtgacatagtgcaagtgggcaatggttcatgtttgcaaattaaacacattggttcttgttcgatcaatactaatacatactctcttgc

SEQ ID NO: 1299 - DNA, 521 bp, Zea Mays
tgtttacgttacctgtcagcgacagcaggttatggactacagtacagtcgaggaagaggcagtctgaaattgattgggtattcagacagtgacttagccggtgacattgatgatcgccgcagtactacaggtgctatatttttcttggggggagtccagtgtcatggatgtctcagaaacaaaaggcagtggccacatcgtcgtgtgaagcagaatacatggcgagcgcagccgcggcagctcaagcagtgtggctgcagaagctacttgaggaggtcgttggcatccctgctaagccaacaattattctcatggataacacggctgctattgcgttggcaaagaacccggttcaccatgatcgaagcaaacatattgatgtgaaatatcattttaccagagaatgtgtggaacgtggtgatattgaattggtgcaagttgggactgatgaacagcttgcagatacgttcaccaaagctttgagcaggctgcgtttccaggagattcgcaggaagattgga

SEQ ID NO: 1300 - DNA, 522 bp, Zea Mays
cgctcaacgcataatcgttacataaagttgcataaatacttatatcgtacattataattagtatgggctcaaccaacatctgcatgcataaacaaagaattggaggaggacgtcggagcaggacaccactgagaccaccggatcagaggagttggtcatcgaaggacgccggagccacccacgcttcgcgtggctgccatcgctagagacggtcgcgcctcgcacgaccgctggagccacccgcgtctcccgtggccgccactgtcgctaccgacgcataccgcgcctcgcacaaccgccgtcacaaccgggccaggggtgcgccgccatcgctcgtctgcctcgacagcgctgtcgtcgcttgcctgcctgcctcaggagcgtcgccgtcactcggtcctggaggagcgtcgcagccgccgattgcccacccgcctcgggagcgccatcgtcgatcctcctcctcggggccccaccaccactcgcccccaggactaccatcgctcacacgcatgagggaac

SEQ ID NO: 1301 - DNA, 526 bp, Zea Mays
cggacgcctggagccagccagccacccgcgtccctacgcgccgtcatcctcatccccacgcaactgaggcaagccacccgcgccgccgccggcccgccgtgcccctggctccctgtgctgcgtcctgatcctccctggtatctgtgctgcgtcctgcgtccgccgcgccccatgcgtcccgcgtcactcgtcagcccgccctgtgcagctgcgctgagctccgccctgctctgagccgcgggagcacggcgcgtcgcccttcaggttcgcggacgtggaggagctcggtcgtgcgtgcgaggtcgtgtgctgactgctggtgcatacagcagagcaaggcgctcaggagtcagaccaaccatgggacatgtggtgcgtgtagatgctagagggatcgggatcgctggtcgtgggcaccgcgcccgtgccgaggttcctcgagcgcttgtgtgcggaggattcgtgtacatcctgaacatatccttgtaaaatttacttggagaattcacttggagcgcgcttgaat

SEQ ID NO: 1302 - DNA, 527 bp, Zea Mays
tcaaagattacccacatagagatgatatggtgatctcgtgtgttataaagggattcgtagtccacaatgtcttggttgacacgagtagtgtaacagacatcatattcgcaaaagccttcaagtagatgcaggagttagaagataaaaatccaagactcaacttatcctctctatggcttcagaaggcaataggtgttgtcccttgaaaaattggccatgcccatcaccttgcctatgttaacaatacaagaacaaaagaagttgtgtttgagatagtcaacatggagttcccatgcaatgcaattagtgaaagaggaacactcaatatcttcgaagcaattttgcattcagcttctctctgcacgaagataccaagcaatcaaggagtcatatcagtgtatgaaagtttagaggctacaacaagggcagaagggaccttacaagaacccaaaatcgtctacaatattgatgaagccgaagtgcaagcttaaacattacagaagaaaatcaaagaaaaagcatctttg

SEQ ID NO: 1303 - DNA, 527 bp, Zea Mays
ttccaagaggatctttcatgtttataaccttccaacaatccccaagaacacatattcaaatgatcacccaaaaaaccaaaagaaagaggtaagcaccttccaaaggtggaccacttgatcctaagtaaaccttaatatcaacattatcatagaagcaaaacaaacaatatattaaaaactaaggcatcctgttgggggccttctccaccgaaggtcctctaaacaaaaacaccttcgacaggacaatacaagcaggtgtaacatgaagatataagctgaagctacgattgaaggagcttcgacatggtgacgtgctaaagacgaaggacgataccgacttaaaggggaaaagactgtgtagtccctgatgatctgtactgtaaatacaattggttatcagagacatggatgtaattttgtccaagctgtatcccgtgcctataaatagatgaacagtacccccgtactgttcaagttgaattgtaatcgctctggcgtcactcccgcttctctaccttatgtcgagc

SEQ ID NO: 1304 - DNA, 527 bp, Zea Mays
ggccgccaatcatgaggacgagcggaaagccccggcggcagggtcatcagcggggcggccaggtggaggctcccgagagttcgagccgaggcgaggggcccgccgggccgggcgaacatggtgtgcgtcgacgtcgcggccaggtcagacgggcttgcagcttgcttccagacggttctcggcatcggcacccgcgcctcccgcacggccgggaactgcccggttgcctcctcgcgcggtccgatccgttgccgtgaacagctcgcgtcgtcagtgatgtgcacgcatgccctgcaagctgactacgaacaccgtgccgggagcgacctgcaggttgcagcctgcacagtaatgctgcacgatgtatcccttttcctgcttccgatccgttccctgcatgattcttcagtttagcgtgcgaacgtgtctcgatcggacatcaccacatgataggatcaaggataatttgtgcacacagttcctagatgataggatcgctagggcaacattaagagcttgttcggtta

SEQ ID NO: 1305 - DNA, 528 bp, Zea Mays
cacacttctctcccccttggccgccaccccctgcccatctcttcctctctccattcttgcagccaccaaaccctagccccccccctcaatcccctcctcccaaggtgccaatccttgccgctcggatcatcgtcgtcgtggtgcgagtcttaaatcgttttggtggagggaagaagggaggaaggaaagggggagaatccaaggtgatttttgtgttcatcccttgttcatttgcgctgcaattaaattgattagaggttgcgtttgcgattgggtagagggggctgtccagaattttaggtggtgggtgaacagcagtagtctagcagtttctgtgttttttttcgtgaggaattaagggaaatcagtttggggatcatgtagaactttaccttacctttccaacgagtatttatgcgctcaatttggagttataaattgaaagttatcaccgtttgaatccgggtatgtggctgtccaaaaaaacaaattttcagggggatgaacagcagcagtattagcagtttc

SEQ ID NO: 1306 - DNA, 530 bp, Zea Mays
gggtccagggtgcagcaggaccggccaggagtggacgtgcagcggccgaccgaacaaggccaagttgcgacgcgacgaccctcctcgcgtcgtggccgcttctccatctcacaaaggatacggatcgtggcgccccgagaaagcgaggtccagcggccgtagcacgggcacggccggcgatcgggacatgctcgggccggcgggaggtcaacgcgtgcgcctaaaaaagggcgctcgctgcgacccgcgtagaacagaatttactgctaccatgcgctagcgtagggaggggtcagcagcagcagcgtttgctccaccaaacccacacccccggcgatcgtcggtaggtaggcgcttgacctgtactgcccgctcgatcgtcggttgcaccagaaatggcacacccacccacccacccaccctatcccaacaacacggtgacgagatcaaatcgggggtcgagacgaaaggcgggggcgatcagcttcagcaggcccgtcgtcgattcggaagcgatcggcagtaggtgc

SEQ ID NO: 1307 - DNA, 530 bp, Zea Mays
atcttccacgcggacttggtcctcgactgcctatataatctagcagccgcgacttcttgggccatgccatcctcttcccgcaccgcggtggcctcctctaccgtgaactccatcctgctcgctcgctcaaggagcactaccttggggtctgcatgatgatgccgccatcgcccaaggtccagccccggtgactggtcagggaggatggggagcacgtgaggaagtcatggatggaagcatcgggcacagcgacaatcggtgcgtcggaattctgtcatcggtgtggtggtaccacggcggagtcgtcaggcaccgcggccagctctttcggacctcgtcgcaggtaaatctgcggtttcaatatgtttactcgatgctctacgccatctagcacttgtcgtgctccgggtttggatttctatgtgggccatgcgctttcaccgacaatgccgctccgccatgtgtgtctgacactctgaccaccatcgttgggcaaagtcatgttgggggatcatcccagtgaattcgtc

SEQ ID NO: 1308 - DNA, 530 bp, Zea Mays
cgacgatgtagacgacgatcgacatgagcaggccccagctgctgcgtgacgagaccgcggtcgcgcccacaagaacaacgatgaatgcaaaacaagcgtgacggaggtccgatgacttggcaattttggaccaagcgagcagagggggagcacatgcttggataggttcgacggtaggcacacgacgaatgagtgggccggtggccagaggaacacgcgccagagatcaagatgatggccggcactgtagatgccatggagttgaccgtcgagcgtaggggaaaggaaactggaggggcagcgttgccagcatccatggccggcctattgaaggagcagaggagagttccatcttccatggcggacgtgcgtggaccttgaacggaggagcagatttggcggccatggagatgaggagtgggaggagatggggctgggcgcgagctgggcgagcaccgctagggagatgggcgcactgtcatgggcgagctggagggagctccggccgggcgctcggccatgaacgggag

SEQ ID NO: 1309 - DNA, 531 bp, Zea Mays
ttgacagtcgctctggcagttatcaggaacaagctggcgatgaaggtgactgggtgcgctgggcctaaacctgaagcacacacgctctttcagcggcggtaagaaggaagtaacaaaactgtattatactagcatctagctctggttctacaaatattggtaattctccagtactgcagtacatgaacatataaggccatatattcaaagaggtgatggtttcttactgtcatgtaccgcgtgtttaattcatactggtgactggaaagaggaggaggcagctctctaaagtcacaactctgaacgtatggcttttaattgtctagcagaccagcagtgcctaagcttggtcgtggctttcttgatcacaaagagaaagctctctgaggaataaggagggggggcctcgtagacaggcgttgtgtaactggttctgatggcactacagtatataatttctctcaaacatttccaccactctactgtatgcacagggtgtcattattcctcagcttctgtatgaaaaggttt

SEQ ID NO: 1310 - DNA, 531 bp, Zea Mays
cgcacctcgcgctcctctagtcaattccttcccccgttcttaggcacttcgtgctgtaactgacgccggatctccagcctcgcccgccgccctggtggctctacccctttacatataagcatcttcctagaccactccctccatgctcggcctcgcctcggctgcgattcggactgcgctctggccagccatggttcgccggtaaactcctccagtgccggccatgctcgccctcctcgccgagatgttccgcaccgtgtgcggtcgaacgccgccaccttcaccactgtcatgcaccggctcgcgcggggaaaagcaatgtgggtttgccgccatcggcaaactgcgaaatcactcgcgcggggtccttgaacaccgacctgggagccttgtcaagatgcggggagggtctccttgggcttcctggactggattggaggctcggggcttcgaaatttctcgtcgtcgaccttcttgccgccgtagtgtcgctcgcgccgtgggccgtcctcgaacccgccttctccctcg

SEQ ID NO: 1311 - DNA, 532 bp, Zea Mays
tataacttagtcatcccatacaaaaccgcacaaaattgaacttgcttaaattggatgtcaacatggcgtgtcacattgaagtcacttgggtcctcaaacttgacatgtttgtgtcacttttatgtccaccaataacgtgacatgttacatcagcaactactgatttaagcaaaacccgattttgtatggatcggacgtatttcgcgtgcagtaacgtttgtgctgcttcaggtttcaacgtttcgttcgttcgcctgtcgcttctacgagcaggaggctgtggcctcggtcggctacgatgacgtacgataccctaatcctaataattgagctcggaaagcaagcagggacaggaacttttgcttacagtcacagagaaccgtgcacgctaacactactacgtccaccgtccacggcctacgactacgaattagcaaaacaaaaactgttaaatctgtgaaatcctgaagctccgatcgtctgaaaaagagagcgacgttcggcgtggcgactggcgaccacacgattagaa

SEQ ID NO: 1312 - DNA, 533 bp, Zea Mays
gaacgaaatgacttcgttctattgtatctttaaactaaacaaaaaattagaatgacttcgttttacctaacaaatacggaggagaatggttttattctcgtaatctcccgaccaaactacaaaaacccaaacaggacacgcaccttccgtgaacttctcgtgtcgcagattcgtgaagcagtagtaaaccacatccacatgactgacgcgggggttgcatgattctatcaggcagataaaaaaggcagcatcacacttcacacgccttgttttctcgaagggaatggctagaatatgacggacacattcatctcttttccctgccagccgttcgtttttttattggccaggtcgagtttttagatgcaattttgccgatgtcgacaggttttagctccacgaagcgagaatcgtttccgtgcctacacattctattctggcaccggttcccgaattgacacttcgcatctttgcctgcacaccaaacaacaccgacgtgacacgcaaccacacagaaggagacactattgtag

SEQ ID NO: 1313 - DNA, 533 bp, Zea Mays
tggtgtctcttgctttgattacaagtgagttgaaaacaagaatagaggaagaagaaaagcgatccaagcgcaagagcttgaaagaacataaaagtctctctctagtcactaatttatttggtgtgattccggacttgggagaggatttgatctctttgtttgtgtctttgaatgaagtctagagctcttgtatgaggtttgatgactgaaaattggatgcattgaagtgtggtggttgggggtatttatagccccaaccaccaaaataaccgttggtgaaggcttctgtcgtatggcacaccggacactatctggtgcgccagccacgtcattaggtcgttgggttccgaccgttggagcttctgacaacgggggcaccggacagtccggtggtgcaccggatagacattgttcactgtccggtgcgtcttctggcgtctgctctgacttctgcgcgcgcagttgcactgttcaccgtagcgttgcagacgaccgttggcgcggacgaccgttgctccgcttggcacactgga

SEQ ID NO: 1314 - DNA, 533 bp, Zea Mays
cgccgccgtactctcccctagaccatcgcgccactcgaggccgaattggtgtgcatggagattcgcctgacgccactgaagccgctcatcgcatcgttggtcgggaagggtccctagtcttcgagcaattcatcgcgggaaccggtcgttcactgtcaggccacaggacggcgtgggtagggctctggttcgcgtatatatctcacagtgagtgccccttcttccatttcgcctcagcctacggatcgatttagggcagtcgcacggtatttcgggtacctggacgtcgatgctttgacctccgtcgggggggggtacttaccggcgttcgtcgccgcggtgcttgtggtgcaacctggccagcacggggaagacgacgacgtctcggccgttagcttctggatggacggcacagatgtgtcggtagcttaaccctccaccgtaaacaatgaggaccatcgatctacacatgtctagctaagattagatctagtgattgagtggcgtcgcgtgatcttgttcgtcgatctcgg

SEQ ID NO: 1315 - DNA, 533 bp, Zea Mays
ggcctttcctcgccgcggtcttcttcctcgcacgaatcgcgccccgtgggcgaacctaacagcctccgcgagatcctcgccgcgaccccaacaaaccccccaaactccctagcaccagctgccaatctacccgtccgattcgcgcggcatgaagccttggtccgcaccccgatcctgttaaaaacccgacacctcacctgcctcaccaaaccctagaattccaattccgtcgcgagagagacctcaccgcctcgccattgactgtcgttgcggcatcgtgggcctcagaaagtgctagggcgtttccccaaccattctgcgcaagtgagaaacctcgggggaaaacaatttcaagatcgcgcgggctctggcgcaagatcgacgggaggagagagaaaaagggggcgttccgtgcgtcgttggtgggccctgaccgcacgtttggggcaccacgcgggtccttcatcatcacgttgggcaagctcgtcgtcggcatctagatcctcgtgaggtcacgagtcacctgaagttca

SEQ ID NO: 1316 - DNA, 533 bp, Zea Mays
cacgattctaatttattctaagcgctaattgaagcctagacaatatcggatccgagaaggaggtcctcacccgtgattgaagcgaagtcgagttgcccaacggcgcgaggcggctccacgacgatgaacaactcccggcgagaaattgttgtttatctaggccctcccacggtgaggggctccaacgcgcttcttcccccgctccctacgctccctctttggtctggttcgcagggtcaaatcggcggtcggatggaatttctctcacggcggcgctctgctctcctttcctctttttttggcgcgcacaaccgggaacaacgatcctacgcaggtgcctgggtcacggtcttaaaggacgggtcatcgagccaccagctggtggagcggttagttgaaactgccatcgagattcctgggattggatcaggctgagcttcgccgcgcgcaaggtttccgtcgggattacaccgtgcagtgactggcagcaggggcccgaagatcagcgttggcgcgagaacgcgagtggctac

SEQ ID NO: 1317 - DNA, 535 bp, Zea Mays
tcgtggcctttcctctgcatcccatccaagcgccgccccatagctcacttttccttgccccgccgtgccagcatcgttaagggcggatattgccgccgccatagaatctcgggccgtgactagccaaagctttaggcgggagttcaattggattcgcttggtcgcggtgaaggttgccagcgacgtttctggggcgaatcggggcccagcaccttggatttctcgccgttgagttgcagtccaccgcgtaccgcactgctctggagccagggcacgactcgacataaacctagcagtgaggacacgtatcacttgaagagcaagttggtacctggaatctcaagtgccaggcaagttgtgcccttgaccactttttacccaataatgttctttaatatcatttattcttgcataggttaattttgatgggacccaataggttaccctagattgtttatctcattaccttgtttacccctgaatcacttgggtagtttgctattgcgttacatggatttgggataattatttatca

SEQ ID NO: 1318 - DNA, 536 bp, Zea Mays
caatctcatgtcgcgcgtgtgcttcgggagctagataggattcgccttggggttgttagaatacgatttcttgtgactatataaatatctcagagctccctctcgtccggtcacaccaaaacatctagaaaacaccatcaccatagcagagagagggcacgttgctgccataggagaagcacccgaccgcaaccatcgtcgctcgcccacactgccagaattcgtccgacgatccattcaagaggaagcagtggacacaaggaaggcgtacggagtgattcgggggcgcaggtgttcccaaaccatcgtcgattgctcatcggagctctggattggtgggcacaccataccacgtcgtggcaagcgacttcgcaccaccaatcactggtcaagaacaggtaccataggatgaggcacatgacagatgctgtgatgagttcgtcagtggtcgaggtcgtcatctcctagtcaactatggttgctggatcgttgtcttcatatgatgtaattatttaactattttgtacagaactccg

SEQ ID NO: 1319 - DNA, 536 bp, Zea Mays
aacaagtcgcccacgcccacacagaaaaggcagagagaatgccataaagatccaacctttccgaggcggaacggcggcggcggcggcggcagcagcaggcgcggggactcacggagccggcgccaaacccgaggcaaatcgaggcgcggagcaatccggatcgagccgcattgggccgccgcgccacccacgcccacacagaaaagcagcgaccttttcttttccctcccccaacgagagcacacccggagcaaacgacggcgtggagggagggaggaggagccgttcgggggcagcgcgtcacgttagggttctcgccgcagcgggaaggaggcgggtgtggtggagggaggtggccgcggccgcggaatccattaatgccgcctgcgtgaggtggggtggggagaccggggttgctggattggagcttggagggagggagggaggggagagaaaaggagaggacagaggacgcctttctggcttttccccctctctctcacacacacacacacgctcgtactcctcttcttctc

SEQ ID NO: 1320 - DNA, 537 bp, Zea Mays
gcagttttcagcggtccactgaccaagctatttttatccttccttccattgacaaccagagaaaatgagcatcctgtgtgatccacagtccatcaaaatccgacacaaaccattggtctgctcccttgattacgtaaacaacgtggacttggaatattgatttggagttaaacaagtgataggccttagtggctgcagcttaaatccatggcatcggcatacaatattttatctctatgtattgcagctgcagtagtccgaacggctttaatccagccatgtctcctgtgacactagctaaaaagattggattgctcggctaatagtaggtgacaaggttgtttggacggcgacgttcacatgctggcccccgctgggattgtggttgtcagttgtttctcttgcttaaatggctcgggctggtggttaagacctaaacaacaacgattcggtggggggtgttatcgatgcgagcctttggtagaggctgatgtgattctgatttctaaaatgtgctcatagtggaggaggttgggg

SEQ ID NO: 1321 - DNA, 538 bp, Zea Mays
gatacagcttcagcttctggtggccagaagccgcccagaagctgaaacaaacagccacgtagtattctttgtattctttgtttggatgcatcagcttttgttttggtgtactaatttttcctgtttattgggtaaacacagccatagaaggaatacaaaaatgcttcttctgtctatgtttaccagaaggaacacaggcctcgcgacactaggtttaacagatatttagggaaattaaagggaggtgttggagtacatcttatttttttggaacaaaatgtttaaagacgtcccaatttctaattattgggtgatattttttaggagctcttggagatgctctaaggatcgtccttggcgcaagtcaactaggagacgccacctagatcgaatcgaactcctcgatacgtggctccacttgaaccacatgtacttctcctgtgggggtgtgagacagcaagggtgagctcacacatgttcatcgatcaacaagttgtggagaataatgtggcatgaactcgcaaaaggttggagttca

SEQ ID NO: 1322 - DNA, 538 bp, Zea Mays
tttcgtaataagaaggttgtggaatcaagtggtggtaaaacaatgttcttatgtggttaaacagtttgatattattttacttgctgagatgtgtcatctcactcttgcattactcaatgcaggtacttgatacatgttgggaatgaggggagtagcagcacgtccactttcactctcacaataacgctgcccatgcgcagccatgatttaattagaaacttattgtcaaaggaagtttgttttttaactagtcgtgcgcactagttaattcgcttcatgtcgtatgtttaacttctctttgctagctgattaataatacttagtatgttttgtcatgatatatgtttatacactgttgccccctcatttatgcaattttgcaagggggatgctgccgaaattttatatatagatgtcagaagtgttgtttagtagcattccggggtgttggtggaccccggggtgttacaacatggcattcattcttatatatatacctatatggttatatttagaaaacgaagaagagatcaaagtg

SEQ ID NO: 1323 - DNA, 538 bp, Zea Mays
ctggactcagactaatagttgaagaattattggctattaatctccctccctccccatccccctctctttgaacgtcatgtgcaggctccatggatgatgtactaaatctgtttgttagtcacagtttgtcattaaccatgttttttgtactctgctacgcataatacacatatattgtggttgtagcaatggcctagggtgtgcatgaacacatttgttgttgtattgggctaattgtgtcaatatggccctccaagctagggctgggcagatttacatcaacagtgaagaactgaaccgaaccgacattgaatcactgaaaatctcgattttcttggtgttcggtgatcagttcgattggtgatcctgtgaactttggtatttgggtgtggcttcggttttcataccacgaacatcgacaaaccgagccccctccctccgccccgaatttgacctgcaccgcgtcaatccatcaatgatttagcccattatcctagggcctaggagccacttattccctcagcctgtgacttctcca

SEQ ID NO: 1324 - DNA, 539 bp, Zea Mays
accagcggtgtcctgttaaatcaaccagccgccaccctttctttttctcccagccgtctctcccgtggagcttctccttctcccacacgacagcaagctggggatctcctccctctcccatggcgccacacaccctcccctgcagcttcccctgcggcttggcccctccttcgctcgggcgctgagcaggaggtccccatggccgacgcgcgcccctgctcgcgcctccacggtcgtcaacgccgtcggggcatcggctccgagctcctctccggccatcttcctccctctgctcctccttccttcctccaatgtcgaccgaagccatggaaccgaacccgagctctccatctctaatccagcgcgcagggcatttctcagggtctgagctcgagcaggaccgagagaggatgatcgtgcaagtgatgtggtgccaaccacaagatgcagttggtggacgacctaaagaatgatggacttaaccagtggatgctcgccaagcgagtacctcccccagcaaacactgtctaagtgttaaa

SEQ ID NO: 1325 - DNA, 539 bp, Zea Mays
ctaatgactggctgaaatcagtggaaaagatgctcaatatcgcccaatgctctgatcaggagaaggtgctctatgcttccggtcatcttactggcctctctgctgattggtgggactcgtacactgctgctcatgatgctgccaatactattacatgggcaaaattcgcttcacagttcagaaactatcatattccggctagcttgatgaaaataaagaagaaggaatttctatcactgaagcaaggcaacttgtcagtcagtgaatatcgtgacaaatttattcagctatcgaggtatgctccggatgaggttgctgatgatgaaagaaagtaggagcacttcatggagggactcattaggccactctagtaccagttggtttctcacaccttcccatctttgcagaggcttctggacaagactatagtcgttgaacacaaacatgttcagctaggcaagatgaaaaggaaggctattacctagggacaggggagcagtagcatccaccctcgctatgttccaccctaaggtacacaa

SEQ ID NO: 1326 - DNA, 539 bp, Zea Mays
tgataaagctggtggcataatgtaacactccaggttccacaaacaacccggtatgctactgtactacacttccgacgtccatatataaaatttcggcagcatccccttttgcaagattgcataaaagagggagcaacagagtataaacatatatcatgactaaaacatactaagtattattactcggctagcaaggaaagataaacatacgacctgaactgaattaaccagtgcgcacaaccatataaaaaaaataaacaaacttcctttgacaataagtttctaattaaatcatggctgcgcctggacagcgttattgtgagagtgaaagtggacgtgctgctactcccctcattcccaacatgtatcaagtacctgcattgagtaatgcaagagtgagatgacacatctcagcaagtaaaataatatcaaacagtttaaccacataagaacattgttttaccaccacttaattccacaaccttcttattacgaaggtgcagcacgtatacaacgtacaacgcacctagttaccacac

SEQ ID NO: 1327 - DNA, 540 bp, Zea Mays
ctttgagccgtcgcaacggatgtcgtgaacctcaccgatagctccgtgtggggggaagtcgttagcgaaccggtcctgcgtattttccccacgtctctgcgctataaagccaacgcccagctgacccggcaccctcaaccaaccctagtcgcccgagtactccacgccgcgcgcgccattggcagaggaggagaaagaagggtgccgccggggaagatttctgtgtaaactcaaattggggggggcgtagctggtcttggagcttctggagatcaccacgtgcctgcttgtggcctcggcgagtggagattgtatcggctgggccgtgaattgctcgccagtcttccatcgtcgccgccgtaccacgaaccaccgcggccgggagcaactacgtctacaacttggtaagaaccaccccaatccgctccgcgttgatgtatgcatcgtgtaggactagtcgattctaggtatggggcggtggtcgccgcggtggcgagagtgccaccgcgggatggtcggtgccgccacgactacgtgcag

SEQ ID NO: 1328 - DNA, 541 bp, Zea Mays
tatccgtcgtgcccacgggttccataaatagatatcggtgtgacgtgacgtgacgtgacgtgacccctgcaattaacaaatcaatcaagccgatggtgctcggaggaagctggattgccaagccacccacgacagcgacgtcgccgatcgccctgctgccgcccggtctcgtctcgtgggcgatcgatcgatcgatcggtcggtcggcgggcagcggtacccgtccggggtttaattgcgcgtggccgtgcgatggctccgtcacaacagtcccccgattgccgatttaaacccacgcaatccgtgtatccgatttcccccgtccgagatcagattctccgacaaccgaataggcagcaatcgccgacgatcggacatcgcatggatgaggatgagcacgccaccagcggagcgtcagatcagatcctggcattctagtgacgtcatgcatagcgacgaaactttgtcagacgtataaacacacctcctcaccaagtctctttgaatataaacatttatccacgaataatctcatctaaaa

SEQ ID NO: 1329 - DNA, 542 bp, Zea Mays
gatgggacaggatgggatacagagaggccaccactcatattcagctatggctacttggtgctttggtctgacattcagagtttgacgtggttgacttctttatctatgagatcaaggacacaatattggatggtcttcgtgctcgccgtcagctgccatatgctcattatctctgtcacatctttgcgcagctgatcaggcctcctcagttccagggcaccctcgaggcctctcgcctccagttcggttcctatcgtccagcccctgaggacccaatcccaatgctagatccagtgtcagatgttcgggctaaggatgagaccttcagacagttcgagacccagggtgctgttgctgacacttctttagatgatgatgagggccttgggatcccgccaccgcctcctgtgccacgtcgctcacatgatcacgaggcgggtagttctagtgttgctcctgctacccctccagctatggatcctgctctggccgttatacttcagtcacttacgcaacagcaggctcatttggcagcagagcag

SEQ ID NO: 1330 - DNA, 542 bp, Zea Mays
cttcctcttccctcggcccactcttctccaacactcgctcgacccagcctggcatccgcagtgccgcatccaccatccccttctctgcacacctataccctggtcagctcgtcagaaccttcttctccccgtgcggtctccgtaacaaccctgatcgagcgccgcgggccacaacaaaccatcgccacacatcttggggatcccacagttggatagccaactctggcttcccaaccgattccatgctaggtatataacccatggccgatgtgccccatggccatgcattcgggtaggagagcaactcgacgccgcggtcgtcgttcatcacctgccgccgcgaagaaacatttgctacatcggtgattggtggccagagagagaacgtggggcaccacaagagtgtaacacacccgtgcatggactcctcgtgtgtcgtggctttatggcatggccggaatttctcactacgatgtgtcaccgcagcgaagacacgtcgtgtcgtggccaggctgccttacgcctctatctcaggtgagtcc

SEQ ID NO: 1331 - DNA, 542 bp, Zea Mays
ctgcgcagcaaccaaggtttagtaacacagacaaaattccctaactaccccatacacactaagccacctgcgaagacccagtagccgccgcggaatcctccgttgctggctccgtcgccgccttcgggggatcctccgccatcggcacagtggccaccggcgagtctccaccagacacagcagacgcaggggcggcgtgggaagcttgaccggtctccgggagcgacgctgggtcgacctcagcttcggccaccaccgggtcggcctccgcttcgggcagcgcgctgttcagacgtccgaagtcctccacatcctcggcacgcgccatctgcaacacagcgcaccaattcagcacacccgcatacacccacattcaatagcacaaaacgaaacacaaactttacctgatccctcgcccggtcagcccgttccctaaccgcctcccgaccgtgagggccccacatccggtcgaagagggccccccggcgtccttcaccacagggtcttcgaccttaaaaatctcacgcccaaaatcttcatcg

SEQ ID NO: 1332 - DNA, 543 bp, Zea Mays
gggatcccagttacaaccgaccgactcccccgggccgcggacggcaggcgtcgccatgtggacgagagaccccgccggaaccgcccaaaaccgcgcaaattcccgtgccgaaagcgccgcgcagaacacttgtcggccgccgtctccgggtgggcgcggacagatgcgcgctgcgcacgccccggctcctcgggggaacacccgtaacggtggggcttcccgttggggcccccggcgacggcgacccaggactaggataggaacgacgattcggcgaggctacggactagggatggcaacggggaattccccgccggggaatagctccccatccccgtccccgcgacgaaaaaacttccccgtggggatccccacgaacgcttgcggggagcatttcttccccatccccgttccccgcggggataaatctccaacggggatccccatccccgtttaaattacaattaatacatacgtactttgctattgatgttaaatattgtcacttatacacattgtcaaatataagaaatcattatgcat

SEQ ID NO: 1333 - DNA, 543 bp, Zea Mays
ctcggacgccgaggtagtgaagaagatgttgcaggttgttccagagcgcctgtcccaggctgcggtctcccttgagatgttcctcagtctgaacaaagagtcgattgaggaggtcgtcggccggctgcgcatgttcgaggaacgctccaagcccaaggaggtcacggatgccatggggcacctgatgctctgcgaggaggactgggaggcccgtcgcacagtgtaccatgagcaggagagctttgggagcggatctcggtccggcagccgtgacaagagtcatggacgcgaacacggatgaggcaacagtggtcttgatggctagaacacggtggccaggcacaccggtggcggcaagccaccccgggagatcgctgcaacaaatgtggcaaaactggccattgggccaatgattgtcgtgggaagaacaaggatgcggctcatgtcacgcaggtcgaggaagatgaacacgtgctcatgtacatcactgccgacgccgaggtaacatcgccgatatgtcatgctcacatcataggtcatcgc

SEQ ID NO: 1334 - DNA, 545 bp, Zea Mays
tagatgcgatgaggcgacccaggcggtggtggtggcaaacatagcggcgtgttgagttaggtgaagcctcccggctagccctttatacaccacaaggtagatcagattgtgaatctcccgtccggccaccttggtaaggtttgttttgatctcgcatgacgagcatccattcttattatggagatagcggtgaatgtcagagtggccccacctaacctcggcgcagactgaaggagaagcgaggcctgctggccagagccgcgtggcttagaggcggactccgcatgaccgcgacgtgctcgatgaagaaggcagggctaacttcctagccccagtgtccagtgaacctagaacaatgcgcatgcgagcacccaagagaccaagcagtgggcctggtgtgtcattcactagcgaggagatgagtgggctggcaagtgggtcccaccggtcggtgcaacagcgagtgcggctaaaaggagaaatgggctaatgtgtgcacgagaaggtggggtagttgggccgagcggcaccagattcggcccagg

SEQ ID NO: 1335 - DNA, 547 bp, Zea Mays
cagagattaaaaaaaacgacgtctccgatcgaccggtgggcgtgcagggccagccgccaagtggcaggacggagccatgtcatccacaccgcccagcaagcctcgcgtgcccccgtctggggccaagaataatgcgtgtcaacttcagggcaagccaataatgctcgtcttttccaacggcgatgccacggcgtggcatgttggacgagcggtcgctgtgtacagtacagcgtcatcgctcaattatttgtctcgactggcttcgtgtagtcgttttgctgcgcccttgggaccttggtgttgttgccggctcgtgatggcctgcctgcatgcatgcatgcaccgtgacgcccatacatgcgaggcacgcgacgcccttggatgcaggcaatgacgcctttgctttgggccgcctgtccgtttgtcattttgcgccctcgagatttctaaattgctaatgatgctttattcatttggcaccgtaggtaaatttagttaaacataaggttgtttgatttatggtaaaactagaatgacactcttgacg

SEQ ID NO: 1336 - DNA, 547 bp, Zea Mays
gttctctttaatatatgagtaatacgagactacaactatatattatttatagcttgacttttttttattgaaattgaacacacacaacccaagtggtacaaattcagctattggcaccgaatctccatgctgcatgccatatgacagctctggtggatacgatagctcccgtggagtgggcggatgtgacgtgtgggatcaccgggtccatacacaagcaacccaacttcacgtggagccacaagttgcaaccacggtccgcgagatgacgataaaggccgtgcgccgccggctgcccgaagaaccgagatagacaacggggaccggtggcagcgaagcgaaaacgcacgacgacgaacgccaagtcaccgtccgatccacctgatccggattggcgccggatccaatcatccaaatcgcccgtatcgcaacccgtgtggcgcgcatgacgtggcgtgacaacagcaaaggaaaacaacagacacaaagatgccccggctggaaaatgaaagcgccaccaccggcccacctcagaggtcggactcgg

SEQ ID NO: 1337 - DNA, 547 bp, Zea Mays
gcccgctcgacagttcctcgctcgaaccactctcaccaccatgtggcccacctcatcagatcctcccctcgcaacgaaatcaccggatttggcggcggagcgcgattgccgcgcgagctggtgcgactacggatcagtccacgcctatatctgtggccatgatcctgactccatcccgtccacttcttggtactcctcgcgtccaccggaaggtcattgggtgtgtggctggccagagtgcgcaaatttccccagcatcgatccgccattgccgccaggagtcctcgacgtcgcgtccgtgcatctctctgccttccccgccggtaatttcgtttccctaaccaagacaccgccctttgttagtagatgttcataccacattcaaatttgactcgtgtggcctctgaaatttctcgtcggtgtggtgaattcgccatgaaatcatcctcccatggccggggctccctactgcgaatcatgccctcatttcatcttgcgctaatcagagctggggtttgtcaccgggtgatagggcatgggattccgg

SEQ ID NO: 1338 - DNA, 548 bp, Zea Mays
gagtaccaattaaaatgtgtcgacgctgatctaggcgtcaatcactgtgggtgtaccgtctggtggtgccctctgcggcggcacggacggcccgcaactctggaccgaacggtcctcgacctaggcgcaggagcggcaccttctctgcgtcacaccggacggtccatgctctgagatggagggtccgcgatggcgcatggtcatcttcctccttactggaatctagacctcgcccctaggggagatcttaggatgctatgggttgacatgtcacccggggtgtccccaaacgatgtggagtcgcctaggaattaatcgacaattgaggtagtgtatcttgaatggacaactagaccttgccacccccgagagaggtaagatcctatggtcgtttcaggatcgacaggtctcccaagatggatctagacgacgtagagtcgaataggggtagaggtgaatatgcgaaaagctatagctataactacgctacatctactcctatggcatgaatgataaagaaaataattggttcgattagaatgtgttca

SEQ ID NO: 1339 - DNA, 548 bp, Zea Mays
gcgaaacgtaattcatacaagcgcgaacatcaaagaatgcattttaccacgtatcggggtgacgacgatgcaacccatgggacacggcggctccatggtgaccggagtgctcgggtgagccgtcccatattctatggtcctcatgcaaacaccgagacgccttgaacactcttcttgtaccgcggtgaagtctccaacgtggattccgatggtcaagcgccggtgtaggggaaccctgatgcggcggccaccatgactcccaatcgtggaggcgaacctcagacccacggttggtcatcccccgcaccggagcaatggcaacccataccgcgccatggcgaagttcccaggacggttctcagaaactggacgacgcacgcggcttctatggcagcgagctccgtcactctattatctccctctctcggtagctcgggttggcggcgtagccctcgacggcggctcgtacaacacggatctagggggtgccgtaatgggcgaagggaagggttctccttatatggacaggcaccggccgaataaacggc

SEQ ID NO: 1340 - DNA, 549 bp, Zea Mays
gaacttcaatatatatacatgcatatatgcatggaaaataaaaaatgaatcaaataaataaaggaattctgttaatttagactaaaatatctccttcctacctctcatacctaactaatccaatcgtttgtcgtggaccatgaagcccaacggagcgacaaagtccacctcaatacctcacgacaaaaaaaaaatctccaaaccctattgtagtcgcaccatgacagagccaccagatgcaccagccaccaagtcgtggtcacatcttgcagccccacgtgccatggagacaccagcacctccattgagatatcgtggctccgcggcgcagctaggtgtccagacttgactgactaactgtcattgcattgcatctagcctcgttgttgcgtcgtatgtcgtccgtcgtccgaggcttcaatccaccgtagtcagggcgtcaccgcatgccaggacagacaaccaggggcaaggtcccatcgtgccaatgtccaagcctacccagctagtggccacctgacctgacctcccctgctttgctgcttgcag

SEQ ID NO: 1341 - DNA, 549 bp, Zea Mays
tggaggagcaaggcaaggcaggcagacttcttctctccccagtactgctttcagattggatgtatgtgtgtgtgttgcagtggaggggagaggaggagagctctaggccgggctctcaggctcttcagtgaccagcaggtccacattctgcagtcacaccacccggcctctctcatcaatttgcagtgcagtcccatagtaagcgagtactttgtgtttgtgcaaagcggtgagtttcctgccagctgcatgtgtcaaggtgtgtgtgtgtgctcctgtcctggcttccccccttcctgtgtcctgctgcatgctgccctggctgcctgcctttttcactcgacgcatcgtcctctgcacgctctttgccaccaccaccaccacccacgtcgacctttcttctttcacgctcgatacaacgcaatgccgttaaaccactgcatcatcaaacaaaaatgcttacacaagcgggttttgtgggcatcgaccgtggtggttggagagaagaatgtgtttacgttcctctacttattaaatgtagtagtagta

SEQ ID NO: 1342 - DNA, 550 bp, Zea Mays
aggttcctccatgcgaatcgggcgcgtgtacgtttggagcttggcccaccctgtccttgccgtacgagctccccgaaaattaatgtgggtataccgatttggccaagggattattggtggccggagatacgtattctaaactatatctatagtaatctacatctacaatctacaaaaatacagtaataataatctaccttgttgctctacagccgccgcctcgtcgcggactttgtttttcttgttgctccaatctgcaaaagtgccagacacatgcacggaggaaatagatgatgaatgtgttctgatgttgtgttgtttatttctatccggttgtggtgcatataactgaatctgaatgtatatcgtctgattatggcatttgcttgaattaattgtgaaatggagcagcatcttatatcttaccgtgtatgctctcgtcacataaataataatcctcatgattggttcggtctgtccgtgcgtacgttgactagcctctaatttctgtttggatgtctgtatgtgcgtgaccacacttgtatgtgcg

SEQ ID NO: 1343 - DNA, 550 bp, Zea Mays
gcggcggcaacggttgcgtgcgtgcgggcccaacgcggcggcgctgaccgacgggcggatgaagacggcgcgggcgggcagatcagacgcgtgcaggtgcagtgatggccgacgtgcgaacacgcggttgggcgcgttcggtgcggacgggcacgacgctgactacacgcggctagcggacaatgagtccgtaatgaatggacggacgagacaccggtggtccgacgcggacggatggacgacgaggaccataagtcggggcatcgtcgtcctcgagatctagcccgtcacaggcaacctcacgtgtgcctcctcccatcccactcgatgcgcgtcgccagcgtcgagatcggcccgcacatggtcaaggccatcaccgcacgagccaccatgctctttatggcccgcgcatggtcgaggccatcaccgcactctgggagaagggcgacacatctagcggcggcttgcactgcatgtctggagaaagcagacgcggacgtcgtaacatggttgaagaggacgccgccacaaggattcgagactggggagg

SEQ ID NO: 1344 - DNA, 550 bp, Zea Mays
cgcgccaagaccctactggtgcctaaaaatcccaaggcaccgacccctgcggctattcacaggcactcctttcgcctcatagagagtaatcaccatggggagagaaggtagaagggagtagaggtctagggcgttgccgacgtcgtcttctgccatcacgtcatccagtgctcgtgtggaggtcctggggaaccaacgtgccgtaagggacctgggcgaacctctctcgtgcaaggattcggccgggctcgccgggaatttctcactgacgcaagccactgccgtggatcgagctctgctgtggccggagcgctacgcgacagaccctctggtgaagagcaggtggcctcggaggaacactactacgaggagtttgacgaggtctaggagtcgtctcccagtcgacttaatggcgtcaaggaaataatattagttcattttatttttatcagttattttgtaagacattctcgttatgtaataatgtttgtgacatttatctctatacacttggtcattgtatgtgttcttcttctttggcacatatgag

SEQ ID NO: 1345 - DNA, 550 bp, Zea Mays
  misc_feature (549)..(550): n is a, c, g, or t
cccgcgtcccctcccgtgcaagccgccgcctcctcctctcgttcgtgaagcctcctctccctcgcgcacggtactgccacccaccacctccacctcgcactcgcgcacccaccgtcgcccgccaccccgctcttcctcaccccctcctctgcctcgcgcaaagcacaccctactacaggcggcaggaccgcacaacttgccccagatccgaaacggtctcctgtctcctcaactcacgcatgacgacctcctcagctcccccatccgcatctcgcgaagctttggtagctgagcacgcagcggatgggcggacgttgttgtttcgccacatggaggagacgggccgggcggtggctaaactgcgaccggaggagatggggaaggcgctgggggagtcgtcggaggattctgatggcaaagagagtaatcgctctcattgttgagttccgtggcatccaggaggacaagaggagcaccatcggtggggaatcaccaaggtggttcaacagatggtgctagaatcacgtatgtccgcaatgggatcacgcnn

SEQ ID NO: 1346 - DNA, 550 bp, Zea Mays
cctagatggtggagctggccacctcgtggcggcgcacccgccgaagaacggcaaaccagcgtgccaaggtcccaactacatctgtaaccgtgctacgatgctcgcaacgcaacgatcctatcggttggctttttacctgggatgatgaagtgatgaccccgacccgcggaaccgcgcggtgcgcagcggcatcactactctgacgacgaattccgatcacgccagcccatttccgagcccgccgataagccaaacgggttagaaagacactggtgatcacatccatggtctctgcaaggcatctgctccattcctcctcgaatttaactgcaacggcatcctttatgtctctgcgctcttccttcggtaatggccgagattttatgtaattgatggccaagggggtgcaagccggtcacaaatttgtactctgttgtagagccgggtgggggagaaagaatttgttgggatttgtttaacagaacacctagatttccggttggttgtggcggtgctcacgcgcggttgaagaagaacaggagcgcttttg

SEQ ID NO: 1347 - DNA, 551 bp, Zea Mays
gcatcggaacaatatctccctaatattcataatatcccaagctgatgcccaggttcctggattgtatcgtaattcctcaagagccaagaggcttttacgctgcttcttgtcataacattttggaaactaaacaggatgcaaagtaccgaagctgaaagagaataattaacgaagcacaagcagaacagatgagaagacaaagcggacgagggcacgtacggcagagcgcgcagcgggctgccacgtatgcagcgccatagacaaatacaccgtccggccggtggagcctagctggcggcgctgactcggtcgacagctgccgccatcgagcgaacttctggttgtgcggcgatgcggtgcctagcgcccgctcgccattttgtcgagcaaaaaggggaggggcgtagggtgaaggtaggtgacgcgtgtatatatataatttttcttcatatattgacttttgttcaccccactcagattttcatctcccgcacaatactccctaaattctccctctatactccattacatccataaaatatcattttctg

SEQ ID NO: 1348 - DNA, 551 bp, Zea Mays
ctcgactcaatattcgcaagaacgacgacaggaacaggaaggtggctgagcgggttgacggtgagcggctccgacaggatgaaggatggagcgactgatgatggcgttggggaaattcatgagcaggcatcaggaagcggctcggcgagcatcagcgtggagctaggaacagcatccaggcgagcggccatgggaacagaagcaaaggcgcgggtgctccggtgccggcgagtgcggaccagacgaagtcccatgactatggcttggtgtgctggtgtagaggagaaccgagacgctacgatgaggagtctggccggcggagaaacacgaccacgccgctgaaaatgacggcgtacaggagctgctcatgcacaaatacgagggaggacgaagcagggacgtgagcagctcggtgcggtggggagcagtgatgcgagcagcttgacgctgatgatgaaggccaggacgaggtcgtcggcgctgatgtgttgagtacaagggcaaggaggaagcaggaagggacgcttggcgttgtccggcctaggtgagcg

SEQ ID NO: 1349 - DNA, 552 bp, Zea Mays
gaagattgcagataaggctacagcaagagcaatggctaaagacgcgttcattaacaaagctgcttctggctggattcctgggctattcaacagagaaagagggagcaaaaaatggtggtccaaggaagcaagctaatccgaaagatagcaagtgaagcgtttggccgggcgtttgggtggtgcccgagagacaggcgaatttctgggtgatcaatgctggaatatggattctggagttggagatagccttttcttttggttgatgtcttgaatcagggccttttgttttgcgcctgtctgtcgtgatctggttgtaaataagaaagtcttatgctactagtcgcaggtcgaactttatcttctatcctaggccctctacttatctaggttgatagtgtaaggtgtctagatagggatctgacctagttgctatctgtcggatcgtttgatcacgatggatgtcgttgttctaaactttcgtatttcctaatgaaatagtgggcttcgccccttcgtcaaaaaaacatatataagataagatgttgttggaga

SEQ ID NO: 1350 - DNA, 553 bp, Zea Mays
tgtgcggcagccggcagtgagtgggttcatccagagggtcgtgcaagccattggaatagaactgcgaagacgtctgccactcctcccctttgcagtagccttgtacttgtgtcagttagtggcatccaatcttcaagtgtgccaagtggagaaggtggaccatccgctgttttagaaacacaaggtgcagctcctagtggagaaggtggaccatccgctgttttagaaacacaaggtgcagcgccaagtatagaaggtggaagacctcttttattactaggaccatccagtgtagcgccaaatcttccaactactccatcatgccatggcactggtcctagaatgcttaaaaagaagttcacaccaaaaaaaaaggaaggcatgagtacctgatatgtaagatttgaaatatgttgtgtgaactatgtgttatttgagaccatgtgaagtgtaagatttgaaatatgttgtgtgaactatgtgttatttgagaccatgtgaagtgtaagatttgacatagaactgttgagctgcattcccagttgagaccaac

SEQ ID NO: 1351 - DNA, 553 bp, Zea Mays
catcctctcttttctacaaatactactctagccatcgcaaaacctcctgacttcccccagatccagatcgtttccccagatccagatcgcaggcgtgaagggcgactgttaccagattatgatccgttttcgagcttcgaggaatcgacggtcaagcttcggtgaccaagtgacctggttcttcgagttctgcaaggttgaagaccctgagcatctatttggtgaaggcaagtgtcctctgacccattatgtcctattcacttataattcactatcccgcattacttaattgaaacctaaggatttactagctttctattcaccttgtccttgatttaccttttgggttactatggttagctacatgctagcgctttactttaatcaatgaacattatgagatacaatgatgatactatgattttattctggatatgatgatgtacttgtggcatttaggggactcgagcagtttctcgagtacctctccataaggacctgttcgttgagagaccacccgggataacagtgcaaccatgagggtggaatgggg

SEQ ID NO: 1352 - DNA, 556 bp, Zea Mays
caccctaaatagaatcataattactgaaataaaattgcaacacaagttagcatacctcccatgtggcacaccttcaccagcttcataagcagtcgcagtattgtcatccagtccacgtccaacttttctgccgcattctcgccgcacagaatctcctggtgatatggatttgaacctttatgcctcttgatacaaactttaacaaccgaaggctgacaccatctcgagaagcctgcaaaggaccacagcggcactgggtggagcacggtggcgctcccgacatgcttggtgccgatggtatgaattagaaatgagtgaagggaggagtacgacacagggaggagaacaacaggcgtgctggcagcgctatgcacggtggcgctcccgacatgcttggcaccggtggtatggattagaaacgagtgaagggaggagtacgacacaaggaggagaacgacaggcgtgctggcagcgctgtgcacggtggcgcgacgatcgacttggtggcgacaggctaagttagaaacgagcgagcaaagacgaagaaccgagcgca

SEQ ID NO: 1353 - DNA, 556 bp, Zea Mays
atcgccgtcttgccggttggatccgtcgatgtcgtggccttcctggccggatccatcattaccccttctattccatcgcgagcgcggccaccataacggtgcagacgcgtgcgctgccgcggggctcctcgacgtccagacgatcgaagaagcaagaaggtcaccctggtgctaatttttatgtcgcccagccgatcgttgacgcttgaacatcgacccctaccaaagaataggctactgctgcgtgtctcccgaccacgaccacctcgacttcggctatctcggcatccaggggctatcatttcctcgaagtccacacatcggcaacattcacaccctcatcacgctacgattgcaggggtatcaactcgtcggcttctaccttcggcttctactacagtctcatcgtgtgtggtgcccccgttgcgactgctgaaggatgttagactgtatgtggaggggcgggcaccactgttgggctaccgacccattaggattagggctatgcaatataataaatcaatcgcttcacagtccaacattatcctgttaactt

SEQ ID NO: 1354 - DNA, 556 bp, Zea Mays
gggaaatgaggcttatgttatctcgcaccggggtgctcgtagtaggggttacaagcgtcgagagagagcgagggcgagagtgagagagagagagagagtccctgcgtgcgtccgtctctgcctgtctcgtctgccccgcctccctctatgtcaacgtgtgtccacgtgaacgtctgcccacttgaacgtatctcgacgtgaacgtgaacgtgaacttattgtctctctgtccacgtgccttaggaaggccctggacatccccttttatagatacaaggagatgcccagctgtacaatggggtatagctatatatgtgctaacgtggctggcggagaagcgccttgagccctgtacgcgagctaacgtggccgtcggagaagtgccttgagccatgtagaagcacagctgtcggcggcatggatcctgctgacgttgtcttgcttccgtagggggcttgagagcaaccgacgtcatggatgcatgcggggaaccatcattacctgttaccggagtaaccttagatgggacaccggtcttgttccttcgtagcctgag

SEQ ID NO: 1355 - DNA, 556 bp, Zea Mays
taagcacctggtgatggggcccatgagtcagccaactctcccttgcacacgcgctcacccagtgcaccagaaccgtgggtccgagtcgtcagccgcgaccgcacccacctcgccgctaatggcggacgcgcgtcgggaaattggggataggtagttgaagaccgggtcgccctgctccttggactataagagctctaccatcgtaaccctctcctccgcatgtgccaacagcctctaccctaacgccgtagtccatcgccgagaacacagagagaggagtggaggtctagggcgccgccgacgtcgtctgcggtcgtcacctccgttcagtactcgcgtacaaattccggggaagcttcgtgtcgtgagggacctgggtagacctctcgcatgggaattggccggactcgcggggaatttctctctgtcgctcaaggttcgccgccgaccgcatcacaacgtggctgggaacctccgcaccataaacaccgagaggttacgaggatctgaagaatcaccttggtaactggaatctcaagtgccaggcaagttgtgc

SEQ ID NO: 1356 - DNA, 557 bp, Zea Mays
actgcaagaacatcattggttgtgacaattggtccatctccaagacatcgtggggaaactaccagtacaataatgtttggacaaaggaaaatgaaaggcaaaggaaacattttgacgatgaagttgagagaataagagctgaagctcaatgccgcattgctgaggctgaaagggaatgcaaaatcacattagagaatgagaaaatgaagtatcatgaagaatacttagactcaataagaatactggaggagaagtggaaagtacatcagcaatcacccaagaaacaaaataaagaggctgagtctacatccaatgatactggagaagtgcataatttactgcagaatgagaaaatgctacgtcaatcggctgaagatgaggccagtgacctcaagaatcaaatatcacactggaaaaagctggaggctacagctacagctgagataataaaactacagaaaatgctagatgctgaagctagccagaaagagaaacttgaagaagaaataggtgttttgagaagccagttattgcagatgagtatggaagccgatcag

SEQ ID NO: 1357 - DNA, 557 bp, Zea Mays
ttttgatacgaaaatattacataacaggctacaagtttcttcagtctgaatcacaatctatgagtaactcatcttcggagtcatccgtcgcgcaatcctcaacgacaacctcattccacttgctgcattgtcctgcatcacacttgtcaccagttctcttataataattggcttctgcttcatctgcagcttgggagaatagctcatcctcagcctcagcctcatcagacttcttcttgtaataagccgcctctacctcttcggcctcctgagacataaactcatcctcttcctcttgagcacgtaatcctgcctcagctagtgcgatgagctcactcaaccttgatgtgttgtcctcctcttcttcatgtaatcctgcctctgcgagagcgataagctcactcaatctagatgtgtcgtcctcctcctcctccatcagctcaaccgtcgccattttatcctgaacatatctcgcatgcgcctcatcagccaaatagtttacgccacttccaatatctgcaaatataatgagcaaaataagttagcaaagtcaagat

SEQ ID NO: 1358 - DNA, 558 bp, Zea Mays
gaatgctctaaggttgcttggttttctcctccatgcgcctaggggtcccttttatagccccaaggcagctaggagccgttgagagcaattctagaaggctgatcttgccttctgtcatcgggcgcaccggacagtccggtgcacaccggacactgtccggtgcccgatctctttcccaaaatggcacagccgaccgttgcagatctgggagccgttggtgcaccggacatgtccggtgcacaccggacagtccggtgcccccttccgaccgttggctcggccacgtgtcgcgcgcggattccgcggtcgaccgttggcccgaccgaccgttggctcaccggacagtccggtgcacaccggacagtccggtgaattttagccgtacgccgtcggcgaattcccgagagcggccacttcacccgaggcagcctggcgcaccggacactgtccggtgcaccaccggacagtccggtgccccagaccgaaacagccttttggctgtacacaaccaactcttctcttttcttcttctttctgtttctaacacttagacaagta

SEQ ID NO: 1359 - DNA, 558 bp, Zea Mays
ctcacaaccctaaccctaatgggttggcagcccaacagtggtgtcagcccactctctcacacagtctaacatccccgcagtcgcaacggggacatcacatacgatgagaccggagtagaagacgcaggtagaagccgacgggttgaatcccctcacagccgcaacgtcgtgagggtacgaatgttgcagctggagcagagaccggtgtatgagcaaaggaggcgatagcccctagatgccgaggtagccaaagtcgaggtggtcgcggtcgggagacacgtagcagaagcctgttcttcaggaggggtcgacgttcgagcgtcaacgatcggcgagggcgacacaacaaaagagcactagcaggccgaccttcttgcttctttgatcgtccggatgtcgaggagccccgccagggaggccgacggtagcacacgcgtctgcgccggtcatggtgcccgtgcccgtggcagaatataaggggtaatgacggatccggccaggaaggccacgacagcgacggatccggccgcgaagacgcgatccggccaaagggacgac

SEQ ID NO: 1360 - DNA, 558 bp, Zea Mays
caaagcttaacacaggatgtcaaaagccttattagcctctctatgcctgggcacagtacgtgggtatttataggtactcgatgggccgcttgtccctgtcaaagacatttagaccctcgagtacctggtttatccccagaatattcccacgaggggaggttacaaacagtcattacggtaaactttattacagacacggcccaaaaatcgcacattcccatgcggggtccagctctgtgggccaaaccgcacatgggcctctcttggtggtgagggtgggaggtcttgtagacttcgactggtcctctgtcttgtttcgtgtgagtgaagggggtcgaacaggcctccatccggttagcgcccttggcctgtcctggcgggttccgtgaatccagccttcgcctgcgcaaggtgaggacgaagtcgtcgggagtgaagggtggtgtgttcgcctttgtcccaacatggtaaacagaagtgatcaagggcacaacttgccttcaatgagctcctgctcatcaatttccacctgctgaacacctgggtcctcggtgactt

SEQ ID NO: 1361 - DNA, 559 bp, Zea Mays
gacataatacctacacattgtgttcctatgcatacattgaagtgatatttgcaagtattgttgacgcagggaagtgttatacaaactattgtggttgttcgaggaaatgagatggtatttgttatattgagactactgagttctatatctacaagtatttctgatcttaattgtgattcttttaaaatgttgagtaattcaatttgtggtttaaatatcttgtcaaaacaattcgcttgctgagatgtttcatctcactcttgcattactcaatgcaggtgcttgttgctcatcaagggaagtgggaagtagcagcatatccaccttctctctcataataacgctgcttaggcacagtcatgatttaattagaaacttcttatcaaaggatgttgtttctaactagttgtgcgcactggctgatttagttcatgccgttatggttgtcttcccattgcttgcagattattaatgtatattatgttttcttatcatgatatctatttatactttgttgcttccccatttatgcaattttcaaagggaatgctgtcgaaat

SEQ ID NO: 1362 - DNA, 559 bp, Zea Mays
taagcacctggtgatggggcccatgagtcagccaactctcccttgcacacgcgctcacccagtgcaccagaaccgtgggtccgagtcgtcagccgcgaccgcacccacctcgccgctaatggcggacgcgcgtcgggaaattggggataggtagttgaagaccgggtcgccctgctccttggactataagagctctaccatcgtaaccctctcctccgcatgtgccaacagcctctaccctaacgccgtagtccatcgccgagaacacagagagaggagtggaggtctagggcgccgccgacgtcgtctgcggtcgtcacctccgttcagtactcgcgtacaaattccggggaagcttcgtgtcgtgagggacctgggtagacctctcgcatgggaattggccggactcgcggggaatttctctctgtcgctcaaggttcgccgccgaccgcatcacaacgtggctgggaacctccgcaccataaacaccgtagagaggttacgaggatctgaagaatcaccttggtaactggaatctcaagtgccaggcaagttgtgc

SEQ ID NO: 1363 - DNA, 559 bp, Zea Mays
ttattcattcattcatccatatattatttcatgatatacaaatgaacattaacagaatttatatcaactttaaaccttcagcctgattgaagatgttgacgcgagagtgattacaatccagcgtgaacagtacgggggtactattcactgatttataggcacgggacgcaacctgagtaaaaatacatttatgaccttaacatacagccataatcgcgacataaatcatcggtgattagctagtctttccctctttggctcggcatcatgtttgaccttcgttgccccctcaagacgaagtcgtcatccttcggttgtagcttcggtattcgtcgttatcgctttcagacaatgtcttcgtctcgaggatcttcggcggggaagaagatcctcaccacgaagcttttcttatgacgaagctcatgtaatatttagtagtatgctagaaacaaatggttagtcatgtttttgaggaccttcgaaagagtaaggcccccaacagtgatcaagggcacaacttgccttcaacgagctcctgctcagagttttccacctgctg

SEQ ID NO: 1364 - DNA, 560 bp, Zea Mays
catgctcaggtcctcagacactattcccttgtgtctggcgcattccagaaaaccttgaactttttcatattctaaatcgagtccctcttattcttcctagagcagagagaaagagagagctcgatgggttcggtcggcagcttaccagtgacgagacgagcagggcgatgggtcagggagacgcgtcggttgatggtgagttcgacgacgtccttagctccgcgggaggcggacggaggcgctcggtcctcgcacgccggcgtgaaccgaagcacggcgacgttgacggtgaggcttcggcgtccgttgggcttgggaaaatggcgactaagattcatcacgcgaagaggaagacagtgcgaggcttggtttggctggaggagggctaagggggcgcaaccatggagcttagcccgcgccgtccatggcgagtgtgccgcgacgagggtggaagagagcgtgcgagcgagcagaggagagcagggcgagtgcggaagagggcggaggcgagagtgcgcacgacgaaatagagcgggcgcggctgagggcgcatccacgcg

SEQ ID NO: 1365 - DNA, 560 bp, Zea Mays
gcgttatctatcatatcaatgaacacctcaacaatcttaataaaatggtaacaaagatgggatttactgaagtattattcatcccataaacccgaggatggaagatgcaccagtgcacgaaatgcgaagtgcaggccgccaattattcagtctcatgaggctaactactccatccacatagaatgcaagtatagatttgtgccgatcaaactagtttaagtttgatcaaatttataatatatactatttacatttatgtttacaataaaattttctatggaaatatattttataatcaatctaatgatgtttgttttatattatgaatggtactatttttcctatatataagtttggtcaagttacagaaaaacgaaaattacatctttttatggatggagtgagcacattgcatgagataagttattactctccagtgcataaaataatacaagaaaactagcttatgtccgactaaatttataataaatagtactaatacttgtcttaaatcaaatttactaaaaacgcattccatcagtgtaatgatatctacttta

SEQ ID NO: 1366 - DNA, 563 bp, Zea Mays
cagaaggtgatgcgggagtttcttctgcttcggaaatttgttgcttcggagaagaagttttccttttcttcggaattttcttcgttactggctctttttcaccttcatctaaggcttcagttccccttttccttttttggcctccggcacctttgttcagattttcgtagtctaggtattcgaaacccaaggcgtccagcactcgatttagccttcgtttcggacgagtgccgaaggctgcggtcatcaattgatcttctcttttggaataattgccaagtatttcattacacattgcttcaatcgtatctagccactcttggcaaggtgctttaaagtactttttaaacttgaaatagtaaggtaaacgtacgagttcaccttctttcttttccccctgtagcttcggcatttcccattctctcaaactgggaaaaactttgaatgctaaaaactcttgaaccaggtcccttgtgctaatatgctctgcaataattctgaattcactcattgcttgttgtgttggaccttcgggtgtcatattgaagcgaggtcgggtttct

SEQ ID NO: 1367 - DNA, 563 bp, Zea Mays
cgttcgtttatgcgcgcggttacttcatcgtgttaatggagattgatttctacagtttcttcctcccctcattcctcctcccattacgagcaggaaacggtagcaccattgaagaccaccagtgaccctttcttctcccctcctgctctctataaaaggcagcagagcctccccattcctgcctactcgagtttgtctctctctagcactcctcgctcatagctagtgccgttgccgttcgttgccgttcgtcaccggagcccgtggaattcgccggagtgtgtcgttcgtcgccggagttcgtcggagccacgtattcgccgtccgtagtcgagcccctgcttttcttcacccggccgaaacccgtcgatccatccccgtcacacgcacgaacccgaggttgatgacgacccaaatttattttatgtattttataaagtgctttttgattcgattcatgagttgtatattttgttggttgtattatgaacacatgtgattccgatatatgtatatgtgtgcgttatggaattttatgtgcgattgttagtacaccgtaatat

SEQ ID NO: 1368 - DNA, 563 bp, Zea Mays
gaccgtccggcaacattgccgaaccgtctggcctggaaaggaacccccagagttattacttcatgtccacccgaccacactcgtgtttgaattgcaacccgggaagttgagccaatgctcaatgcagctaacaaatgacacagatcaacacatggcatttaagctcagttcaacagatagtgtggactggttagagcagtttcttccatggtacggcattgttgcggcacgctccacatacactctcattctgaatgtgttcttggagcgagatactgcagaaaagagattctgtgatatgatcctagagagctgtacatgtgaatacaacgacaataacatgtattcggccacaacttattgggagaaattcgttgatcaagagaccaagaaagtggtgaacgaggtgaaactgacagccttgttgtcatcgtctcagcacagacagtcaatagtagctcccgacaaggtctcatgggtggagaaaccctggattcgtctgctctccgtggacgcacaccccaccgaaccatggatcataactggtcacgaatgtggacacc

SEQ ID NO: 1369 - DNA, 564 bp, Zea Mays
cgccgcctcggtcggcttctccggctcctcacggcgcgcggcgcacacacacggtgcacacctagacgaatcgaagcaacaagatcaagcacaagaagacgaatcggattaagagagagacgagaccaagagcaagaaaaccttacctgcaacaccggagcaccggatccacgaaccggatggctgacggcagaggcagaggagcgagcttggcgaagatcgagttctagggttagggttagtgagggtcgagggagagaggagcgaggatggagcaagagaggagaggagcagcgagtaggaggcgaggacaccggagttcaccgctccgtcgacacaccggagcggcggaggcgaggacaccggagcggcggagccgaatcgcctgtcgcggtcacgagctggagaggagaggagacggagaggccgagacggagaggagaggatgctagggttacgcaggcgcacgcgactgaaagacgccttatacggcttaacgggccggcgccgtgccgcggcttacgtgggccgggctcgtgcctgcaccacgggcccacatggcag

SEQ ID NO: 1370 - DNA, 565 bp, Zea Mays
atatgcatgcatatgcaaagattacatatactacagcacaatattatatgaacagttaacaaacttttgacttatttagtatatacgcatgatccagaatcgaaaacgtacgcatgaaatttctctagcaaacttccaagggagttactgacgattattgttccagctagccttttcgattgaaaggaacagaccaaagccaaagagattaggccgaatcaccatgtgcctgattgtgacttctagttaattagctaaaaaatatggaatactttagttatttgatgaacaagagagtgcttactttttaagaaaccaatgaattcgcgtgccgtacgttttatctctttaaaaatgccactttgtgctcaccacacagcaaaatctcgcaacacgcataaatagtttggacaattctactgatgagaaactaaattacaggtaccgctggtagcttagccttaattagctcctctataatttcaagaggcaacacgcatgtataccaattagctgagagcatctgatccgtcaaacaagtacatatataatggggtgattatat

SEQ ID NO: 1371 - DNA, 565 bp, Zea Mays
ttcatctcggagaggattcattattacgtacgatcgacagaaattaaagaacgtggaggagctatagagagggagggaatatgcatgcatgcatgcatgaactcacaataatgtcctgtccaagcggtggcgtttctctgcaacggcgcaagcgacgaagcccctcatcttgatgcgccaagaggaggtgtagctagctagctagctgagatgaacaaaatcctcggtgtcgcctgatgatcttgtgcagcaacaagcagcaggaaaggcaagagaaggcgagctttgtcgatcgtcgtcgacgatcagtagactgactgtatgtatgtatatatatggtcccttgatcctccggcaagctatagctatatatgtggatatgatcaacccttgtatgtatatgagagagagagatcgagttcagctgttgtgatgtatatatatatgcttgcaacacaggagtctcccaagtggcaccaagcagcaggggaagagagacctgagaggacaaaatgcatgagagagctagcgttgcaaccaaagcaaagcactggaagaagcaact

SEQ ID NO: 1372 - DNA, 566 bp, Zea Mays
cgtatgcaagcttaaagcagagctcaactgtcactgcaagtagatgggctgatgctttagaggcctccgttgctgctgttagcaaatatggtggtgccagcgcaggataccgcacaacgttggatgccctaattcctgcttctactgttctgaaacagagagacttgagaggctggggatgatcctgtgactgctttcatcgcttcttctgaagcagcattagctgccgctgaatccaccaaacaaatgcaagcaaaggctggacggtcatcatacatagcaccgcatctcctggcttcaatccctgatcctggagcaatggctgcagctgcatatggtacagagtcgctgcccttgcagcgaagaacaaactgcacacacagttcaaagagctagtagcatatgatgtgcattgttgctagacccaaaataggctgacaggaaaaaatcaccggggcattttctcactccccatagatttggtttccgcctgtgcttttgcatgggccgagaaaaacgactccaatattgtttcgtccttcttcacatcatacaaagagatgttc

SEQ ID NO: 1373 - DNA, 566 bp, Zea Mays
cgtttttgcgcctatccgacatccagcgaccagcaaatccagcatagttcctccttgactcctcctaaccctagccgccaggctccaggtgcccttgtctggttctagtgcgagtccgtgaccgtgacccaccgtccgacggccattgccgttgctatctgcgcctccgcggtccgcccaggaagttgctggcttgctgtcgtccgccaggcacactacttcttcggccagcggtccagtccacggactctaggccatttctgttgccgcgtggacgcgtggagttagcctcagtcactatggtgcactagtggcatcgatcgggttagtgtttttacccttgcatcatttggtcttaatctcatggagacctttttttgtttgctgtccacactagacgcgttgattttttttgtttgctctttgctgccctcatggatcttgacgagttgacaggattgtggtgcaccaactcaacggaatcacggaagctacaggccgagagctactgtggtgctggctggctgacgcctgacggaaactacagaccgagcggctgaggtgta

SEQ ID NO: 1374 - DNA, 566 bp, Zea Mays
ttatctcaggtgcataaagtacaacacaatccaataaagaaaataagttggagaactctacatagtttagagcaaatagaagcattggtgatgccagtggcgcaccggacactgtccggtgcccaggccaaggcacccacgaactggccgctctctggtttttcctagagtcactccgctataattcaccggactgtctgatgtgcaccggacatgtccagcgagccaacagagcaacggtcaactgcgcccaacggtcgactgcggtgaacagtgaacagtgcagaagcagaacgcaccggactgtccggtgccgcaagaagacaaagtacttcaacggtcaactgctccaaaccccaacggtcggctgacgtggcacacaccggataatgaacagtgtgtttcaggtacataggttaactttcggactgagaaagtgtgttttcaggtacaacacaaagaatcaacgaagcagatttaaaaccagaaatgagaaggtatggaacttcggctatgcacaggcgttgcaaaggcgtgtaccagcttcgtcgccgaaggccttgatg

SEQ ID NO: 1375 - DNA, 568 bp, Zea Mays
ccctacgatcctagctctgctccaatataaaacccgagctcggcgctgccttggccatctagtactataccgccgagggctatcatagaagttaatagccaccgccgtcgtgagcaattggggatcagagtgagccatcagcggggcgaagagaaaggttgcggccaccgttagtgatccccttccatgcctctatactgcgctcaaaattgtgcccaagttcttcatcgcgctaaattgaagactcctaaagcttgaccggccgataatcccttgtcggccttcacagccacaacgcctcccatcgccgtggctacaggccatcacctcaccaactctggtactgcaatatggggagcaggaaggatgtcgcgatgagttcgtgagaggtctaggtcatcatctcccagtcaactatggttgcggaggatcgttgtcttcatatgatgtaattatttagctattttgtagagaactcctattatatagtaaagatgtgacattcatttttgtaccatgggtcatcatatgtgtgagacttgatcctagcacacatttgattcgcgct

SEQ ID NO: 1376 - DNA, 569 bp, Zea Mays
attgccttcgtgctctgtttgatggatgctatgagtggatgtgtctttgcttggcgtttgatgggccttcgtggtggaccagttcccatctgccttcgttggtcatgtcgcctcttgccgagggggccacttcgatacatgtgtgtgatcaagtagtttcctagtagttaacagtgatcaagatatggatcgttcctcgtcccaacaaccactccactaactaatggaggagaagcgactaagtgggttattaaaaaaagagcagtgcactttctcaactcgtatctatcttgtcttttgattaagataaagtatagtatttgttcttagcagtttaacatttggtatgtggaggatcatatgtccatgttaaattattttttttgtgtgtaaagtccaccacactagcttatcactagactctgacgtgttgtcacccattgcattgttgtatatttgtgtgtcgtcgtaacacacaacattatactagtttttatagataggagtgcttgttgcacgtttgtgtacaccattttctttttcttttttcaaaaacctcttaaccaccc

SEQ ID NO: 1377 - DNA, 569 bp, Zea Mays
cttctctcccccttggctgccgccccccctgcccatctcctcctctctccattcttgcagccaccaaaccctagccgccccccccctcaaccccctcctcccaaggtgccaatccttgccgctcggatcatcgtcgtcgtggtgtgagtcttcaatcgttttggtggagggaagaagggaggaatgaaagggggagaatccaaggtgatttttgtgttcatcccttgttcatttgcgctgcaatttaattgattagaggttgcgtttgcgattgggtagagggggctgtccagaattttaggtggtgggtgaacagcagtggtctagcagtttctgtgtttttttcgtgaggaattaagggaaataagtttggggatcatgtagaactttaccttacctttccaacgagtatttatgcgctcaatttggagttataaattgaaagttatcaccgtttgaatccgggtatgtggctgtccaaaaaaaacagattttcagggggatgaacagcagcagtattagcagtttctggggatttttcgggagtaattagtgttaatcagtatgag

SEQ ID NO: 1378 - DNA, 570 bp, Zea Mays
tagactcgtaggagccggtgtcagagtataaactgggtcattgcggctacagtgtttagaaaaatcaatatgaaaatttgatcttgaggccacggtgtttagaacctgttgccatctgctctattagctggtaacagcttggctggcagatcgttaaatacgccaggtctgaagaaaccgtgaaaaggaaagaaaaaaaatgcaactcgccacgcacgcatagaaaccacggccgcgaaaccatgccgatgccttgcttggaggcctttggacgctttggtagctacctttagcaccaaaccaatcattgtaccgggctcgacgtacgtctaaatactactatactgcacttcttttctcgcaatcacttgtgcttcctcctcttcatcttttttctcctcccctttctctagaggctgcggcacgtgttggcgcccgggttgttcactcagtcacttgagattggtgggtgactcatgtcatgatggcggccgacggagcacagggaacaccaccgagaagaaattgcaaaaaatatgagtaataaaagggaaagaaaagagagagaga

SEQ ID NO: 1379 - DNA, 571 bp, Zea Mays
aggagatcagatggctaaatggatttcacaagagagcccgagaaaatcatatatcacctatattctctgttcgcttgtgttatgcaacatgcttgtttggatcatacatgacgaaatatgacctggaccatgattattcctgctaattgacaaaagaaaatcagtctgtcgtttcaaggtaattgaggatgctgatactcaagatccttaacctatcattttcctagattgtgtgggcgtggttctccacaacgctattgtatcaggcctccttgttgtttgtcatgtgaacctttgctctctctgtgactgacattcttgcaagcctcgtttggttatccatccgtctgaaatccatatgtccggtgagaattgagattctaaatcacatttatttcattttgaacccatgttctgatgtcgttggaattgtaaatgtgatgctaggtggttcctagaggggtcgagtgtaaacgagttggtccgggtgtgtcaagttctgctcttcatgaactactttggtaactgctctaacatatacagaatttcttcttattttaccattcaaata

SEQ ID NO: 1380 - DNA, 572 bp, Zea Mays
catcggtgaaagggggtttttaacttctaatctcggacgtccgcaagatcgaacggcgcaccacatgtttgaacccgatctaatctggttcattgctttacggatctacggctgatgttggtcttctacccaggccaccggcgatgacggcgggttgagtccctgcggcgaatatcaccgccggtgacaatcaatccccagcaccggtgattcaatcgcacgagaaaacacaccaaaacacgattcaaggtcctacgaactcgaattcagccgactcacctacgtatgacggcgacgagagcactgcctccgaccaggagcaccccgcggaggtgtcgggttcacggtggttaattggcgcctcctcgctccctatgcacagcaaggtccccatacgagaccgactccacccgaggacctccctcagctccctgatgcggttagcgtcacgtctccgctcaacccgactgcggtggctctcagctctctctttctctttctcggttcacagaaaagggcagggagatggaggaatgcgcggcggcgcacggggtatggtggctgctttcgcg

SEQ ID NO: 1381 - DNA, 572 bp, Zea Mays
ggttaaagctgagcattgcttttaaagttggtcaagattttattagcagttactaagtataagtagataccaacccaattaagtaagagatcaaaattgataataacacccgcgatacaatgcacatgacagattaagtttagttccataaattaatcatgtgagagtcctgagctgctcatgaccgcgagcatggctgatataccagttttacactctgcagaggttgcgccctttacccacaagtcatgtatcccgtctagccaggtttagctcgacccttagacacttccgaggtgaatggctagggatccactacgaggcatttacaaagttccaccgctacggtttctgagaagggcaatataggaatccttcgtccaaaaagccatcgcagcatgatcgactcgagaacctccctatacgcagctcctctaccgcccttgccccttttgggtaaggtagtcctccactagctttcctaattagtcagccaagggcgtcccattccacccttgtggtagcacgaatatctgaagttaagcaacatgttccaattaacacaatgatct

SEQ ID NO: 1382 - DNA, 573 bp, Zea Mays
ctgtaccatgtttgtttgtattgttgcaagtcgacaggcaagcaattgaggacctaggtgctcagccggtgaaaagtgctgagcaggagctcgttgaaggcaaattgtgcccttgatcacttttatttacccaatactgttcctgttaatcattatgacctacataggttaattttgatgggacccaataggtcaccccagtttggctattcaaccacaaatttgttttagggtagctgaagcccagctttaaagaagcttcggtagaccacgacttcattttcttcgggtacaggaacagtcttctccccgttgtcagctctcacaatagacatatcccgaaaatatcttcctctcatattatcaagatgactctgcttaatagttgattttccaaagactgaatggcttcggcgccagggccgatcttcggagtcttcgcccccactttctgcgtcatagctgtcactgtcattagtatcttcagataggccttctagaatttctcttgtaattttctccgtatttgttttagcaattgactcaacgaatccagcggttttttccttaaga

SEQ ID NO: 1383 - DNA, 573 bp, Zea Mays
ctcgagcgcgcgatggcgaaggcttggtacgacaagatcggcgaggcttggacggggttccggcacgtctccggcgaggcacgacggcgagtggtggtgctgctgtgcgggcagacaggggttcttgacgtctgacggagctccgacgaggtgctgcgcggacagtccggcaatgaactgggcacggcgtgggcaagggtttgacagcgggtgcgtgtgacgctgcgggtgccgaggtgctgcgcggacgcgtgggcatgagcttcggtgacgagggaaagaacgaggagggggtgagagagagagctctggtagggagagagagggctcgacgtctaatttatagacgagacgagggcgaggggaggtgagagggcgcgagagagatggccgggatgcttcaaggacattgatgacgtgcatcaatggaggggagagtagggagggagtaacggacgcagtaaatatccattacacgcgaaacgaacggacggggctgctcggtcggtccttgcgctgggtgtcgcggctgcgcgtcgagcggagcgctgtcgacctgggcttcacatcgag

SEQ ID NO: 1384 - DNA, 574 bp, Zea Mays
ggagtcgtcatccggagttctacggatgtccaaagacaccgcgaaaatcgcatgttcgttggtcgattgcgttccgcggtagggaatctcgtcgggtggggatataaatccaaccccattcatccatctagattggccaatgtcgatcggagagcaccgtcacgccaagagagggagaggaatcaaagttgcaccactatcgggcaaactgcggagaggaagcgagggaagatgaagccgccgccacataggcatctcaccttcaccgtcgtccgggcctcatcgtgtcgtctagcagagttgccgagttccctcccgtacagagattatggttggggctttggggaattctttgtcggacattcgcagggtcgcctgcaccgtgggtgaagggagtcatgatccaattcaacgttaacatccgccttatggctggggctttggggaattctttgtagaacatgtccggtgatgggttaatgcaccagggcgtcggatcggcttgctccggtgagctttgccaccgtggggcaggccatcgccgccgctgggcgacgtgtgggggaagagatat

SEQ ID NO: 1385 - DNA, 574 bp, Zea Mays
cccacatctaatcggggacgttgattacgaatccaacgacgcatactttactaccctgagatctaatcgtgactgttgaatacgatccaacggcccaagcgacttcttcttcctccctctgactacggcacccgcactacgtctcgacacccaggtgcagccgaccgcgcgccatggccgacgctctatcgctcgcagagaaaggaaataaaagaaagaaagaaaaatagagctcaccggaggctagtgcgtttaggaggaattgcccgccaccgatggccagtggcccggcaccaggatgcacctgcgacaacccccgcgcatgttctggatgaagccggacctggacagcggcaccgcggttccgccggcggcgcttctgcccgaggtggtgtgcgcccaggcagttctcgaccagcgccacaaggagtgcatgcgcggacagcgccatggcggccacggcatcccgccatctaatctccccggtgaattctcctggcggcggtgctgcccccattctctctctctcgtctcatctccatggcgaggctctcggcgtggcacaggggcgtcg

SEQ ID NO: 1386 - DNA, 575 bp, Zea Mays
atcgataggaggatctgcttctattcgtcgtcagaaaaaaaaaatatatactatgtatatagtagagtccgcgcgcatttgcgatggaatgttttaattgatgcacgcacacgacggaaggaaaggaaggcgaccaatcaggccgggcatgccttgtggaatcgtcgttgccggattggcaacagcgccaatggacatacgaggcgaaagatacgcgccagcatgcatgcacccccccttcacgcgcgcggactcgacggcatctgcggcaccggcggccgcgatacgaggagcaagaatcagcaatatatattattagcagcaacaaatctcggcggacgcctcgcgcctccccttccccctgccgccgccgaggagtggagtggactcgtcggagcgtcggctggagcacttgaccgctcgttgccctgctcaacggtgtcgacgacgacgtacggggacgggacgggtcagcggagaattacttactagagccgtctcgctcgtgtctccgaactgcggatgcttggattatgtttttttctctctttctctctctgtcgccgagcttcgtg

SEQ ID NO: 1387 - DNA, 575 bp, Zea Mays
tcggggtagcaaaaggaccgctgtatctcaaaccatagaacatgctgttagatgaagacttttacttgaaagggcctgtcattcttcaactaaccaactccttccacttttactccgctgaatgcctatctcctgcactagcacttttactcgatcgcgtgtagacctgtcattctttgtctagactttgtccaactcaggtacacagacatactacgtagacaatgtcatacctaggaagattatgcaatattcaatagaaacaagattcctgcctttgttgtctaattgctcgatgcagagaagtttatgcgggggagtaactgtctgcaacattgaaagcaaaggctgaattcaatacatcggtcactgaggcattggtgaagtcccaatcctggccatagtaaaaggtcacaactgtagacctgctcattctttgtctagcctttgtcaattcaaggtacacatactacgtagtagacggtgtcatacctaggaagattaagcaaggtccaataaaaaagattccggtctatgttggctatttgctgaagttcatgttcacgcatgaagta

SEQ ID NO: 1388 - DNA, 575 bp, Zea Mays
cgaccccaggcctcggcctcagcctcgggaagagtcacaacctcgcccgacctcaggagaagtcaccgcctcgcccgacctcggcctcggaccgactacgccacaggggatacatcattaccctacccctagctagctgcctcaggctacgaaggaacaagaccggtgtcccatatagattactccggcaataggtaatgatggttccctgcttgcgtccattgttctcaactctctacgaaggcaaagaaacgtcagcaggacccaggaccgcaccgtcagctacgcttctacagggctcaagcacttctccgcctgccacgttagcgcatagctacacccccatatgtacagctggatcatctccttgtatctataaaaggggatgtccagggccttcccgggggaaaaggggtggacgcgaaggaggctaactcagacgtctcactccaaggccaaaccctctctcccgcgaagcttgtaacccctactaagagcaccccggtgcaagataatataagcctcattgtggcggaactgcccgaattattccaacttaagtgcctcagtcccgc

SEQ ID NO: 1389 - DNA, 577 bp, Zea Mays
cagaaatagatgagaaaatattaagataagtttagaattgactcagagtaaggtaagtaggtaagagttgtccagttctatctaggtttcgtcctacagtcaatattcctctaataccacttctgtcacactcggttttaagggacaacgtcgggtgcatctcatacatgcgccaaagaagacaacatatattataacagagtgtatagaaataaatgtcacaatataatcagagtacttattagatagcgaaagtcttataaaattaaatatataaaaggatctaaaatccatccttggcaccagaaagtcaactgggagacaccacctagatcaaatcgaactcctcgttgtggctcctcttgaaccacctgttcctctcctgtgaggggtgtgagacagcaagggtgagctcacacatgttcatcactcaacaagttgtggagaataatgtggcatgaactcaccaaaggtgggagttcatgtaatgtgtaaggctgatcaacaatataaaggttgaagctgagcattgcttttataagttggtcaaaattttattagcagttactaaatgtaa

SEQ ID NO: 1390 - DNA, 578 bp, Zea Mays
aagggttgtgggccgttggatgctaagtcggagtcatctgtggcgtcgcttcttttctcccgcaaagaaaaccctagtggtggtcttttcccccttttgcccctacttggccgccaccccttcccccccctcccacacttggccgcccctctcttcttttcccttgggctggctgtcctctcctcccatggcagcccctctccacggcttcctcctccctctagatctccccccacgcagcaaggatcgagaagaggaggagcacattgagttgaaggggaagagaagatcaaggagatgttcttccccatctcttcttgcagaatttcttggggaaaccctaggtatggatgagatccttgttcctccctgtaattatgtgcttttggaggttgtggatcatgggaattaaaggattagaggttggattagatgtggggttatgttttgatctcgaatttagttttctgcagaatggcagattcgacagtttctgttaatcccagttttccgtggtcttagaggcctcaaaaaaataaaaagtctatatataagtcgtagataatttgtagatcttt

SEQ ID NO: 1391 - DNA, 578 bp, Zea Mays
caccaatttgacatggtaccagagagaaggaatttcttctaattctccaccacgcatcgtgcttccccttctcttcctcctctcatgtcggatgccacttcttccaccatgccaccgatccctatacatcacgtcgtcataatttgactgactaaatccatttttctcctttggcgtgctcagctccttctgtatctaaggagatttaagcttctcgatactttgatggattcaatgttgcccctaataattatattgccacatcgacaattgcaggtgccgcagatgtccctaatccggagtatgctagctagtatgttcaagatcaacaactgttgagtggccttctctcgtcgatgatcgaggaagtccttcaagacgtcatcagtgccatgtcttccaaggaggtctgggaccccctctagaagaattttgactaatccacgaaggcgcacacagtgcaaatctttgtggaccttactacatcaaagaaacgtgatctatctgccactaacttttctgcaagatcacggggcttaccaccaagcttattaccgctgacgcccctttatgtgacg

SEQ ID NO: 1392 - DNA, 578 bp, Zea Mays
atggaaatggcaagtgtaacttatcgattcattcatgttcacattccgtaaagcatacatgagtattaacagaatatgtattacattgataccttcggcttgcttgaaggtgctgacatgagaatgattacaatccagcgtgaacagtatggtactactgttcatctatttataggcatgggacacggcccagataaaattacatttatgtccctgacatttactcattaccatgacatgaaacattatggactaaacagtcttttttccctttcagccagcatcatcttcagtcttcatcaccattataagacgaagctaatgctctttggcaatagcttcaacgttcgtttttaccatcttcagatcacatcttcatcccgtatgccttcattatagggaagagcttccattccaaagacaaagctctctacaacaacctatatcatgctggaaaccattggttaatcatgtttttgaggacctttggaatagggaggccctcaacaggcgtatggttaggttaatcaacagattattcacaagcacaaacccttccaaagattacaaggcttcaa

SEQ ID NO: 1393 - DNA, 578 bp, Zea Mays
ttcccatatcatacactcaaaaaataaatggctgatatcgcgtaaaacataaatcgttatagaaagttgcataaatacataaaccatacattataattaatgaaaaacaatcttagtataggctctaccaacagtcgcatgcataaacaaaggattggagtaggtcgtcgctgaaggacgccaccgagaccatcggatcggaggaattggtcaccaaaggacgcccgaaccgtcgtacagatcgccgactctcgcagcccgcgcctcgcgtgacgcagtcgccgtctaaacgacccatgcctcgcgtggccaccgctgccggagacgatcacgcctcgcgcgaccgccggaaggggccatcactgtcgtgcgcacgtggggagccgtcgcgcgagcctctggcagctcgctcctttgaggccaccatcgccaccgcgcgtgcctccgggaccatcgccaccgcgcgtgcctccgggaccatcgccgtcactcgcgcctcgggtaactgccaccgacgagtgaggggccgcgtgtggctcgctcgcgcctctcgggtcgccgtcgacgctcgttctcga

SEQ ID NO: 1394 - DNA, 580 bp, Zea Mays
tgtcaatttaacattcataataaaatcgaatacgaatacggatatccatattaacactttatccgaatacgaatacgaataattcggatctccagacatccgaatccatctctacacatagatgtgtagatccaggaacaaggcaaccacttcagcacgtgctcaatcatagtctccatccctgccacctcctggtagtagagggctacgactgcaagcgccggacggggaaccaaggcagtggtcgcgtgaacgacacctcgtccttggagtcaacgaatgccatgaggtccctaatgacgccggagccaatgaggcagcggcccgtggccgccgcgcccgcgaagtcgtccatgacagtgtcgtagtcggcgagttctaggctagggcagggccacagcgggggctgggagcctacgggcgtgggcaagatccacgtccatacgcgcgggagtgagatccgcgggcacgacgagggcagtgcacgacggggtctaggagcctgctggcgtgggtgagatctgcgtccatccgcgtgcttacgcggtgctggcgacgcgggcgtgtgagggggacagag

SEQ ID NO: 1395 - DNA, 581 bp, Zea Mays
taataaaattttgaccaactttaaaagcaatgctcagctctaatcatcatctttggtaagccttacactacacgtgagctcccacctttggcgagttcatgcacattattccccacaacttgttgagcgattaacgtatgtgagctcactcttgctgtctcacacccccccacaggtcaagaacaggtaccacaggataaggcgcatggaggatgctgtgatgagttcgtgagaggtctaggccgtcgtctcccagtcaactttgggttgctggaccgttgtctccttataatgtaattatttatttattttgtatagaactcctattattgtagtaaagatgtgacattcgatcatgtgccatgattcatcatacgtgtgagacttggtcccagcacacctggtgattatgttcgcgcccgggctttggacccctaaaacccgggtgtgacatctgcttgccatgaatctgtctctaatttaaagaatttaaatgatgaattaaatgctaaactagaggaagttaataaagctagttcatgtgtagagcatgttgttataatgaggtggcaagtcttaat

SEQ ID NO: 1396 - DNA, 581 bp, Zea Mays
ctcctctccctccctctctctataaatatggtcgagccctctcccttcctcccaccgccgagctcgctcgcctctcgtgccctcctctcttgccgtccgccgcccgcagagccgaccatcgtgtccgtcatcgccggagcagccgtacttgccgctggagctcactgtcgacaccaccgcgctggagctcgcccgcgccgcaccccgtcgaccacgcccatgtcgccgctctgctcacgcgcacccgccgttgagcccctgctcacgccgtgcccagctcgccgccgtgaagctcgtcgccggatagtccgcgtccatccgccgatcgccggagctccgctcgtgcctgtgcgccgtacgcagttcaccatccattcgcgccctgccgtccaaacgcatcgccggagttacaccgtccgtcgtcgacacgatcgcgcagcacaccaactagaccatccacgcccaacaccgagcctcgtccgcgccgtcttcgctcgtccttggtcgtgcctcgcctcacctcgaccgaatccctccattcaccacaaggttgaagacaacccaaatatttttatatctcc

SEQ ID NO: 1397 - DNA, 581 bp, Zea Mays
ccacgtccagcagggacaacgtacacaataacggatcaaccaataaacataccgctcgtgcgtagagggagaatcgaaggctgtcgcgtaggacagttcggctaggccgagagacctgccggcttgatgaagagttgatgcagatctgatcccgcagcaacatcgaggtagagtgtgctagtaacgtgttgagaactacgttaccacggatcaccagatccgctcccttccctcccgtcagcagtagagacgcaagaagctgtagaggacccgtctcccttcccataagcacgacagaggaaacacacgagacatgatgtagggttgggcctttggcctctttctcttctctgtattatgagggggtgtacagattccttatatagagatgtgagactcctcaggggcaaagcaggtatttgtccacataaccctaactagggttacttatctttcggtattggcacttgcctcaatcaattctagggacttagagactttctctcccccgtttggcttgtaatctctactgcaagcacctcggtgcgagtaataaaagctttgtccccctgctggaagta

SEQ ID NO: 1398 - DNA, 583 bp, Zea Mays
ggagcaacataattgatttagaatcaagcacaagcaagagaactaagagggagagggagaggaagaaacaaattacaattaggcacaaacacaaagaacatgagtgatttgtttctcgaggttcggctacgaagaacctatatccccactgaggaatccacttatgccatattcgtttacgttgttcctagccaagaaccaggagcaaaccccatggatccctcccacctagaaagaagcccgctccacgagaaaacttgtgttcggttaaacctaacatgggccatatccagatctaacctcattgttttagcccgggaactactcttggtccgtgggggtggaaaatatccccgatagacacgacggaggaggcatcgggaaggacaaaaggcggaggcggcaggctagcgatgatggctctctagcgtcgatatgtttcggcgacctccttctcaccgatatgcttcttcctcttgcctgctttttgttccctcgtcatcccacgacgctccgtcccgccgcatgcacatccctggaggcaccctctggcccatgacgtccgcatctcctcggagtcctg

SEQ ID NO: 1399 - DNA, 584 bp, Zea Mays
aaaacaggaaagcatttgatgtaccaaaatgttgtaaaacagtgataaaataaggcgttgtgcctctattgtatctccttgaccagataaatttagaactccttgaccatgaatccctagattagcatttgaatgtatgacagatgcttcctgaaaaagcatgtgaaagaaatcacatacaggaaaggtagacaaaaaaaggatgcatcgtcccttacaattgtcaacataccttcagcactatcaaattgctaccttctagtaatgaagttcccacacctagttctcggccaccatcaatagtcattcttgagttccacataaggagcatctttaccgacattcgtaaagcgccaaagacctgaatttgagtgaaaaatggagtggtgtccatccaacatacaaaatgttatattgccaaaagtgcagaaaatgacaggaaaacaaaaaaaagaaccttgattgtggaatcactcataagaagttcctcagccaacagctcaaattctgaatatggataatgtgtcaggccaaaagttagagtagcaccagataaaagaatctgtccttgagcctgaaatagg

SEQ ID NO: 1400 - DNA, 584 bp, Zea Mays
agccctgactctcatctccttcacctgctcccacgcgtttctcatcccctgcattggttggttggttcagaaaacaaaactgaattctgtctggctgccaaaactcacctctgatttcgatgtcttcttgttgcctactactacttttacactttgagcatggattgtatggcagaagtcatttccttaattactacatgttactatgttagtagtcttggtattattcaggctttcggattggattttttaccaaatgcgaaatggcaggggtcagagaaagagttgaacgcccctactgaaaaagagcaccaaaactagctaataacacaacacaggcctttctaaaagtctgttgctgaaagcctgagactaataactttgtaaagacccgttaacatccggggtcactttttacagcatgcatgcagcaagcgtcctcctgggattgtgacatgcagctgactagaaagcaaacaatactggtatatgctactagctagcaaaccaaacgtgaatgaacagctaccgcaccttattatattattacaacaaacaacagtgttgattcagaaaattcagat

SEQ ID NO: 1401 - DNA, 585 bp, Zea Mays
catgcacgagcacgcacgaggcccactgccaactttaaacgctgcactgcacggcgccgcgagacggcccactcccacctcgccaggcccagccggtagcaggagcgagcgcagccaggtgccagcagacgagagcattgtttttagttccacctcgcctagctaaaacaacatgaggcacaactttttctatataaagactcctgccgaagcgctgaacgtcaagtcttcaactgccgagccagacgcaagtctgagaagttgggcagtggcaagtgtgggccttgggccacctagttttttttttatttttagaaaaatctgaaacttaaatttggtaaatttagattaaaaattgttaagttatttagggttcggatatttattcggataatggtcggatatatcagataaatttcttggatattcgaactcttggatattcgaaatccgatggatatcatacatattgtattcgtatcggataatccgatatccgaacaaactatccgtatttgtatttgatatccgacaaaattatcggatatctgaaaattgtgtccgaaccattcaccttcttcggat

SEQ ID NO: 1402 - DNA, 586 bp, Zea Mays
agggaaactctatggtcgtatctatgggtgaacttgagtgtatctcatggagaacttcagacaccacaacgcgttactatcaagggtatcatgtcgccttcgttgtgcagcggctcattgtggatgccggtccctagctgcctgtgcctcctatgcagccagacgttcaccgtcccgttcctgcagttggaccttctatagctggccagagctcctcgcaatcgacgtgggatacatttgcagatgtggacgatgacgatgacgacgacgatgacgcaggtcaagacgtgattggaccgtcccagctgcaggacgctcccacaacttagccatcacagctcacacaacatagacgacgtccacgtgacccatacactccaggcaccgacgctcttggggccaagggcaagggtaagactagaaggatgtgagtactatgtgatgtagaccttatgatgaaaactttgtgatgtggaccttgtgatgtaaactttgttatgtggactatgttatgtggaccttgtattaaggactatgttatgtggactttgtgatgttctgtgttatttttgatatattatatgct

SEQ ID NO: 1403 - DNA, 586 bp, Zea Mays
ctaacatttcataaaccaagttttgtgccatttagtgttgatttttacaggatcacctattcacccccctctaggtgctctcagcctccacgtcagctagccgttggcttttgatagattctctatttcactattgtaggtccggtgtgacaccccgtatggttcggtgcttccatttcaaattgccattggtaactagccattagacctcgatccggtgtaccaccagaatggtccagatagccagctagctagaggccgattgcagagctctctacaaaatcagtctagtgcaccatcggactagtccgacgaaccaaccaacatcccagactttgatacttctagcttcttttcttgggctcttttggtcttatgtcttggactagtgatgagtatttgtaggtattttgtgagtcttttaggtcttcttttgaggtgtcgcatccttagagcttcagttcaatccacttcacatcccatgaactataaaacacaaacacatgcaaaacatcagtccaccggttatgttgatcatcaaacaacatagtcaaatggatcagggtccattttccttacaatctcc

SEQ ID NO: 1404 - DNA, 588 bp, Zea Mays
cggaaatcccaacggtaagaatcaaaggcaactcggcgcaaagcagaagaaggaacagacactcaccagggacacgtacccacgctcgggacgcatcacgggctgggtaagggcgccggcatccagcctccctaccgtacccgctacccgcctgcggaggtcatcggcggagagggaagccaaggacatctgcgagccctccaaatcaacccccggcttcatctccgagagctgcaaccgccgctctgccaaagggaggaccctccggcgatggatggcggcaacaacccccgcagcggtgagcccctcatctctagggatgaaaacaattttggttttttcggtttttcgaaaaccgttttcgatttttttcgaccgaaaccaatggtaccggtatttttcggaaccggcatcggttatcgaaattttgtttcgaaatcggtatcgaaaacaatatgagattttccgaccgttttaatcggttcccgttttcaatcggaatttaccgaatttaggtatcggaatttttccgaaaacaaaaaattaagtaggctatttaaaagcccacactcaataatggacgctcag

SEQ ID NO: 1405 - DNA, 588 bp, Zea Mays
cggaaaggccacaacaacgtggatccgaccgggaaggccgcggcagcgacagatccagtgaaggcgaagaaaggggtgggcggcggggcgggtccagccgggtaggggcccgcgccagatttggcaagaggtgtgaacggcgccggcgacgggagaaggtcgaagaggaggcactgctgggtgacgatgcagttagaggcgcccggtaggcgcgaccatcgacgtggtccgaggatcagcccgccaatgtcagcgaagagggagtcgacgactagatccaaaaccatggggcgcgcgcgcccagcacggcagcgacgtctgcgtcgggggactcagaccctttcgcgactaagagcacgtgcaggacggtgatggagaggtggccggagctggaggccgtggtggctgcttctccggcccagtagtccccgccgcggccgaagcagaaatagaaagctagcaggagggaggcgagcaggacgaggaagccgagcgcgatggcgatggagtaaccgaggccgaggagaggaaggacaccgcgatggtcttgctgccgccggtggggacgaaggcggccatcgagggaag

SEQ ID NO: 1406 - DNA, 590 bp, Zea Mays
gcgacagagtttgttacatgtatgtactgtgtcgtccgtgaacgtccgcaggaatggatccaaaggctgcgcacccgtgtgcactgtacatcagtacacgcctcccaatgaaagttgggccacacgtgcaacccaacaagcatgttaacaaaaggatcgtgttctgtcggtctccattgtagctagtttcccacaaggaccgtgtcgactgggagatcgttgacagcatattatagcattagtggtgattttgttgatttgcccgtgatgtgtatatggatatgtgctctagtattcaatttgcgtgcacctttcatgatacggactgagtgaaagagaccgtcactggctacagctgagaaaatgggcgctgcgtgccgaagtgccagacttccagctccatccaggagtaacagacaatgggccggagtatttaactcgttgttgattagctaaaacaacaggaagatatgttggttggagtacaaagataactgcatgcaacgggttcattcacatcacatcaagtccagcaaacaggggcccgtttctttttcacgactgtcacttgtaaaggtgaatcggaggag

SEQ ID NO: 1407 - DNA, 590 bp, Zea Mays
acgcacacatgcttgcccctgccagtaatcccaactcacgtcactattcccgctcattcccatcctgcttcacacacgccaagaatccaccacaatcccatccatcacagccacacaccacatacacacaccaagtcgcatgaatagtatatgtatagggtagtagcatgatatcaagtaggagcaatgatatcaacaaaggcttatcaatcaaacggcatgaatatcaaaaggcgagacattcatgaaggctaggaatgagatctcgggtttttaggggtctcactcccatttgtcgctcggaactttggcctagcactactgcatataatcatgtctataggaagggcgaggatgttagggtgacctattgtagtgaagtcctcctcgagctcggggacatactccgagtcgtcggcttcctcctcaggctcctcgggtcctagtatcgacaagatcccgaacaaatcgggagcacaaacattcaataagacgcaaaaagatgcaacaccaagcaagatgggtaataccggggttaggtttattcattaggtggagatgggaagttatcaggtattattcgaagttag

SEQ ID NO: 1408 - DNA, 591 bp, Zea Mays
gctttctgaaagagaataaacaaaaccagtcgcgcacatacgattggcagacggagactgtttcagcgtcacctaaacaggaccggcagtttctttaaagcacatgctgcagcatgtgtagccatccgtcctctccgggtcgacgacggagacacgcccgcgctcatctgagggccggccagagagaatccccgcacgcgcagcgtttctgttcggcgcgcgctgcaacctgccaagcggacggccggcctggtacggggtggtaccacggtcgaggacgtacgcgcgtacgaacacgagccgcacggcgccctcgtggctcggcgctcccgctcgcgcgacgtccgcgtggctgtggtgtgcgtgtgcccccactgtctagcgcctggcgcctggcggaaacgaaacgagcctgcactgcagtctgcacgcgggcggtcacggtgtggcgcgggcacgcggcccgggatgacgggacgggcccccgtgtggcgtggggtcgccgctcgcgccgcgcccctgccggcggtgggctccctccccacctgttctcgtggaggggagcgcgcccatgtgcggggaggagggggg

SEQ ID NO: 1409 - DNA, 591 bp, Zea Mays
tttatcttgtatggtgtaatgttcttatgcaagtatatatttgtttgtgcctgtttgtattcgttgcgcgtcgtgaatagactgcgatccatttccgagcttcgaggaatcgacaatcaagcttcgacgaccaagggatcgaactcttcgagttctacgaggctgaagaccctgagcatctgtttggtgaaggcaagtgtcctctgacctattatgtcccatttactttataattcactgtcccgcataccatgaacaacctaaggattgactagctttctatttaccctatccttgattaccttttaggttactatggttagattcatgctaatgctttactttaatcaatgaacatgatgtgaacacttatgatacgatgttgttattattattacgatgttgggctggtgatactttagggggctcgagcggtttctcgagtgcctctccgtaaggacctattcgttggatgaccgcccgagaaaacagtgcaaccatgagggtggtatgggactcccttagctgaataattagaggaactggggtgtagttcgcttcgccgtcgtgccgccaatggggctcggtgta

SEQ ID NO: 1410 - DNA, 592 bp, Zea Mays
ccgattgcataggtgccgagcggtagctttcaggaagaagaagaaccagtcaaccacacgtgaacggaaaatactctgctgcgaggaggacaacacagcacccggcttgaccacccaacagctcatcatgaaagacgagtgaacaatcaatgcgtacgaaggattagttcggattctacgctgcacgtagggctggacaaaatactcgtggctcgtcggctcgctcggttcgtgaccagctcggctcggctcggatcggctcgtttaaattttttcacgagctgagctggcatcctagctcggttcgttaacgagccagctcggtttgttaaagagccagctcgcgagctaaacgagctatcacatttcagcaaaacaaaactatatacatatcatgtacgtaataattgatggatatgttatatgtatgtgtggtgtctataacctataagttaaactaatgattgatgaattatgtctatgtatgaatatggtctatgcgaatataagtgtgggttaaactgctaaacatgtgtgtgaatagtgaattgatgagtgataagtggtgttaatttggtgttatattgatgcg

SEQ ID NO: 1411 - DNA, 592 bp, Zea Mays
agcaaaagggtagccggccagctggcctctaacctcaagcaaactaaagcttgaggggctgagaaaaactcggattggctgcaccagtacggactattattgtcgatcacacaagctgaaggagtgaaggatcattgcgttgcttatggtccacgtggagcctgccgacgccatgagctgagctgcaaaagaaatagaaagagagagagagagacgaatgaaggcgacaagccaacaacaacaagaagcaggagttggcgagcatagtaaaactggaggtacggtggaggaggaggagggaggcgctcgatgttgacgccgttatccgttgcatagctcgatgtaccgtacagacgatggtcgggaattaatagaatatttcgtttattgtgtaaagtgcactagctggccatttatttacagtagtaacgcatgaacagcgtgtatatatagccgtatactgatggactgcaggatggaagtgtcatcgtcatcggtatatatgctcatgtatacgacgtggccacgtgtcgcagcgtgtgtgtgtgtgtggtactatatatacaattgtcagctaactgacgccatcgat

SEQ ID NO: 1412 - DNA, 592 bp, Zea Mays
ggccgccacatctcgccagagcagagccgccacacatggactgtgttgctaggaccgccacatctcgctggtgcatggccatcgcatccgtggctcacatgccagtatgaagggacaatggcgatgggatagcagagcggggtggcatgcttgcagtacctcctcgacgccgcctacgatgccagcttcaacttcttttgactccacagaattgatacaatggaagcacttgtgactgagactagaatagaagggaaagaatctaagacctctatagaagcaattgctcaagtattggcttcatcaagatatcttcaaaatgttcttgtagctgcaataaagagaagcgggaatggtggtgatgctacatgcgtagaagtagaaatgttggtcttgtagctccaagagttgctcaagtatttgcttcatcaattttttttttcaaaatgttgttcttgtagctgcaacaaagagaaactgcaatggtggtgatgctaaatgttggtattgtagctccaagatttggtttttgatgaatgatatctatgataatacgttgctaagtatatgtgatgatcaatcattgttgttt

SEQ ID NO: 1413 - DNA, 593 bp, Zea Mays
cactcctcctttccccttggccgcccccccctgcccacctcctctctccattgttgcagccaccaaaaccctagccgccgcccccccaatcccctcctccctaggtgctactccgtgccgctcgaatcatcgtctcttggtgcgaatctccaatcgttttggtggagggatgaagggaggaaggaaaaggggagaacccaaggtgatttttcttttgtgttcatcccttgttcatttgcgctgcgattcaattgattagatgttgtgtttgcgattggatagaggggggctgtccagaattttgcgtggtggatgaacagcggtagttccagcagtttttagttttttttcgtgaagatttaatggggataaatttggggatcttgtagaactttgttttatctttccaacgagtatttatgcgctcaatttggagttataaattaaaagttatcatcatttgaatccgggtatgtggctgtccagaaaacagatttttttcagagtgatgaacagcagcagtgttagcagtttctggggatttttcgggagcaattagtgttgatcagtatgagaatattgtagaactttgt

SEQ ID NO: 1414 - DNA, 593 bp, Zea Mays
gttcaccatccgttagtttcttttgaactaatgcacttcattaacttctttctagaatttcttggatcagttatgcaaaggagttgcacactgccatggccatggtatccttcaccggttggatttctcttgtctaatttatattgctgaactcatcagatgagtacaacattgcattttgacttttttgattcatccacaaaacatgctggtgtacaagaagggaatactaaagattgctgatctgggactcggtagggctttcactgtgccctaaaagctacacccatgaggtactgcttaccatttggagttggaaggctcgatgcaattttagtttttaaagaaatttctgggcatgatccattaagctctttatattatgtatttatgtagattgtgacacttttggtatagatctcctgaagttatttttctcttatcctgttgaaggaacactagcacataacattttgctgcaattgttgtacctctttagttccttcttggccaggaaatctatatttagaataacacttctactgtcatagagtaacacttctactattaagaaatctaagctcatgttgaca

SEQ ID NO: 1415 - DNA, 594 bp, Zea Mays
actaggcattgttgccgacgaatcctagttggattggtgcaacaaaatggatcaactcttagatttttttacggcgacacactatttacgcagttgcttcgccttaacacactctatgtgatgatgtcacgtgtcgccttcgatttcctccggaaccgtgtcaccgggttttgaggcccaaacccgttgaaatatgtgaattgtcacactggttttgatgctccaccaccaaaactctcgtgagtagcgtactcaaatacgtgttccccatgttttggacacatgtcctgccagtctgcaaccgtgtcagcgacacgatctgctcctccatgcccttgctcctactagtgtccccaagtgtcatgctagtcaactgacttctccagtccctcggtcgaaacacaacgcatgtccttcgtcgctcccgatccattggcataaacccacatgaccttaatcttcactgtcaaccatcatcttcggactccacacttgcaccacacagaccataagacaggtcagaatcgtgttttatgagagatgtgttattttcggttttatagtaaaaacaaacggattttttgcaatattctg

SEQ ID NO: 1416 - DNA, 596 bp, Zea Mays
tgaaatatatatgctagcttaagtgaccatactcaataagaagtatagaagaagtacttaaacttatagaaggtcgtgcccaccggcgcttaacaccaatcacaatcaagtgactcgtaacctgcagcaaaaatgggaataaaaccctaagtacgcaagtactcaacaagacttacccgactaaagaaaagactctcaagggtatgctggttagaggcagtcaaggtaaagcttgtcaagaatcaatgactcttttgcagaaaagcttactatgggtggatccttaaaaatccatttttacttgtcaggttatgtaaagttacctacatctagagttcttcctattctagttcaagcacttggcctatactagctgtcttttatcaacccttcagttcactggatttctatgtgtaagtcagtgaccaagtcttcatatccgagaagtagcggcgatccgaatcgattcatactcaactgaggatctccaatcacacgacatatggagcacttaacccttgcatatgtcaactcgccaccgggtttcttaagactagactgggttcacgccaaccgagagcacaaatacaccaccg

SEQ ID NO: 1417 - DNA, 597 bp, Zea Mays
ttatactcaagttagaatatgtcccatgattgatatgcgtgccatttttccatgtaaggcttgcttgcgaattaagttaagtataggccgcctaccccatatctaaagtgatgttagattcatgtgccgatgaagtatggatagctagtgcttgtgtatgagtgtttatagagccttgctatttcatacttagtccactaccgtgtggtgacatatagtcttatgttatcttttattatattcatacttgtgcaccatgaatatcatcatgtatgctagacatacgcatgaaggatgtgacgttggagcgaagccacaagaagatgagacttatcccgaagaagatgaatgatcaagtggacgttcgtctagcggatgtcgtctaacctaacactaacctagtgttggattccaggtgaagatctaggcctgctgatgatggtggctaagtgctagtgggctcggccttctatatagttctcatccctactgtttcttgaagattatcgctaagctagcgtgtatttcaaaactatggttacatctatcttgtccaaagttatattctttgaaatcaagttttgtacttattcccat

SEQ ID NO: 1418 - DNA, 597 bp, Zea Mays
gagagctttacccgacgcccaggacgaatcctcctggagcctagcactgtcattatgccctagctaggccaggcctagggttcacaggtcgcaatacaacaaaaaaccagattgggggcctcactgcattctactgctgcgactagtacggtacacaccacagataaatcagcagcaagttccatggattaatgcacacacacctccctttttcattcgagttcgaggagaaggcggcggatgcggccatggagctcgacgagcaggccttcctggaggagatcctctccctgcgcagggacgcctgggactgcaatgtgtccatgggggacctcttcgccccggcggcggccgccgccattgactgctccttccacaaccagcaggcgcccaccgtcagcgtcctccccaccttcaccgcctcctgcgccgagccgccggccttcgactgcctcagcgaggtctacggcgccgccgccgcgttcggcgggcccaatgccggcgacgagatggcgttcctccacgtcgcggagcccatggatgcgctgcagctggacaacaacgccggcctcggggttgtgcaaggtggagcccggc

SEQ ID NO: 1419 - DNA, 598 bp, Zea Mays
gcaataatagaagaaggaaaaatttcatcagatcgctggttcgtgacgacaggttactcaccagtcaggaagataaactgcatgaggcccaccatcatttcactgaagctattggtagaaggggtgagagacagagggccgttcggtggggtaacctaggctatagtccatttgacttatcagatttggatttcttgttcaatgaggatgagattaaaaatgtggttatggggatgcactctgaaaaggcgccgggtccagatggttttatcgggatcttctataagagttgttttgagctgattaaagatgatctatcaagtgcaattcatgatttctatcaccatagatgcaaaaacctaaacctcgttaacgaggcaaatatcgcgcttttacaaaaaagggagggtgctgacaggattgacatgtttaggccgatcagtctcatcaatagcttcatgaaaatattgaccaagattttagcaaacagacttgcaccaagaatgaatgagattgtctccactgcccaaaatgcgttcattcagaaacgttcaattcatgataattttctctacgtccaaaaagttattcagaaact

SEQ ID NO: 1420 - DNA, 598 bp, Zea Mays
ctactgggcataatcgaacgctagcgcggtagtgaatccattggaggaagactcaccgacgattgcagcgtcgtttggtcccaccatagcgagcagcggacccgcggcgattccgatgcccggcgacaaactaccggcggtctggagcgtaatccccccaggcacagcaacgaccatgaccagtgaagctccctgccccaacctcgaggtcccaatggcgatgagttcacgatttaatggtggcggcgagctattctccctctctgttgtttctccctatcgggtggaggcacggacgccgactaaggccgagggggtattgcttggggcatatatgggcgaagaacgagctcgaggtgctttatcgcgacagctcgcgccgttgcaacaaatccccgaagaagcgacagcagatacgggtagtgcatgtggtctgttgacgccgtagggagaggaggcaacagcgcaccaggctccacctgcccacgcgacccactagtgttgtcccgagaagctaacgccggtgaggaagcagatcgaggtgttcaccggacggagggggagtttatgcgggcggcgcggtccatctctatttctc

SEQ ID NO: 1421 - DNA, 599 bp, Zea Mays
taacttgggttaatgttaaaacctggctctcaattaataataataacctaaccaactaaaagcaattgcttgaccttaaccccaaataaagctagtccactacagccaaatgggacatttgctgagtacgttgatgtgtactcacccttgctttcacaaaacaccaggttgcctttggtgcaatctatgctcaggtaaagaagaaggcgtcgaggtgaatctccaggagttccaggacttcaacgagttcgaggattaggctagcgacctcccccagtcagctgcctgtggtgggtttatttacgttggatacgtttctgttctgtgtactttgattatattatgtaaatgactctagtctttaatattattacttatctttattgttattcgaagcattgtgctatgatgagtcatttatgtaatcgccgtgtacgtgaatttctgatcctggcacgtacatggttcgcattcggtttaccttccaaaaccggttgtgacaaggatagactcagatggttcactatttcttaggcacacattgttatcatatctgcatgtaatgccccacgatcgagtatataaagcctagggggcac

SEQ ID NO: 1422 - DNA, 599 bp, Zea Mays
gccggatcggttgttcgtcgacggtcgatcggtcgacgtcgtctgtggagatctcggtgctccggcttattagccgttgaggaaccaggactccgacgtgggtcgatggccgtctccgacgatgaaactgttgagattgacggtaatgaggatagcggttgtgcatgtgcatgcatcgacaacctacagatagtgccattactgtcaagaaataggcgaattacagatgtgacaagatgtgaaatttctcatgcatgtgcatgcatgagagaaatgaggagttgcagatgagagaaaggcagtcataaaacacagatagtgctcagtcattcatggaccagatgtgacaagccactgcctaccatggattttggagcagtgctgcaaaaatatattggaaggtaaggaaacatcggaacttcaggaaatatatataacagggttgcttctatgttattagatcgaaggcgtcaggtgtatgcttcttcagcaaaaggatatatatgatacagattagctacaggcttcactcatctgcgctggtggtagtgcctgttgtcatgcctgtctctgtccctggcgtggcgacatcatcgcag

SEQ ID NO: 1423 - DNA, 599 bp, Zea Mays
acgagagtgcgtggtacggcgtgaattgctcaccagagctggaaggccgccgcggatcatgcctctccgtgggctggaacaggcactgcttaatctccgatatgtcatcctcggttgaattcgaatggatctccgcaatatcttgcacctgccggcgttaggataggtgcgtctggaacggggtgtgctactcgccggcgactcacaccgtgatgcgcatcagctggccgtggcttaccgcggccggagtctattcgtgataatcggtggcaaaaagatggttagctggttcgggttggtaagggctgtgtgcgcatgcgtttggaatcgagatccgggtgcgggagcgcctggcggtgtgcaccggtggcaggctccgccatggtgggctcgacagcaccttcaggtgtgggaggatggaggagatccctggccaaatgattgactatgggtggctaggattggatgtttgcataacctttcgatggattggatccgggccatcaatccagatcaggcggatgaaaattgatcgcgtgattttaaaacttgggttgtcgatctcgcgtattgttggggacttgttctcaaatgctatg

SEQ ID NO: 1424 - DNA, 601 bp, Zea Mays
caacgatgacgacgtgaggggaggcattgacaacggcgacgacgacgacgacacgggggagggggagggatgattcaaaaaatattgtccattggatttacgtgggtaaaggaaatagagttatctagcgatctaaaccgttagttttgatggtgtattaaatttgggtgtaatttgtttgttggatttatttgagattatgagtgtggccgtgatttgggtgggcggtttttgcaaaatttaaagggtgaattatatggtggtatagattaatgtgattagtacacggtcgcaatggggtttatctgtggcagcgtgaatttgttggaatggcatgagatgtgaaattgggattatttaagtacgcgttaatttgggcgatcacttgtagtggaactttgatttgacttggtcttgaggattaacgacgttgcctagctaagttatttgtcgttgcacgtgtgcatgcattcccatcacttatgattgctgggatgctcggtcccaagtcacgctcacttgaggacttgaggtaacaaattgaatttcctgttttggaaccaactatgctattttcactatgtccatttctttctcaaac

SEQ ID NO: 1425 - DNA, 602 bp, Zea Mays
ggcccgcgtactccgaccccggtttccattagattcttggggcccggcctcggcagcgacgacaccggtcaccggctatgtgtaaataaacgcactcctcggcgagcttcatgtctttgccccgtcacgcctcttatctccgttgcttctccctccctgttccatccgtccacagttcttgtgggaacccagggatcgatcttgactgggacgtcgccaccttattctcccgtacgtctagcttggtcccgaccaccggcaagcggcaaccaaatgcgcatactgcccctgtgaactctccaactccaagctactgctagcctagccacatggagctgaacaaggtgctgtacatgtacgctgccaccgtggcgctactgctctgctcctcggcgaacttcatacagagcccctccgacgtgctgggctccgtggcgctccaggatccgacgccctccgcggcgcacgacttcggcgccgtggtctccgatgcgcccgtcgcggtgatgcagcccgggtcccccgccgacatcgcgcggctcctgagcgcgctgtcctccgcggggccggaccgccgccccgaaggcggccgtggcggcgcg

SEQ ID NO: 1426 - DNA, 602 bp, Zea Mays
ttaccgaatactgatccgagataaagacgtgcctagtatgttgcggggtgtgcgttatttttccagttgtgtaaccaacattcgattttgattgtgtgaagggcatgggctgtcgcctgtcgatccatgatccatatcgcaatcagctatacgccaactggcaatgtacaatggaatggaaacacataaatagatgctgggggcgtcgaggatgttacctgactgaatgaattgaaggaatagatgtcactgacgcgaatggcggagggaggcggcgattcagatttcggagtcgttgcgctgcggcagggcagggctaggagaggataggaggcaatcagagatcccctagcctagactagcctcccctgacaagtgcaagagctgacccctccggcctccgctcttccctctcggccggtcttgttgtttggggcaccaatccatagatgactggctgagctccctcctcctccctctactccaagatacatggagtgctattcttggtaatggagtggacaggatcagaagcaattggagacatccggaagttcacattcaccctccgcctccccctcactctgacgatttgggtaaca

SEQ ID NO: 1427 - DNA, 603 bp, Zea Mays
gatccatgcacgatgaactaccattatcgttgtggatgctcgtgtatggtatttcgatccggtcaaaaagcccccctgcacgcacgcactggccagcagacaggttgaccaggatgctccttggtggcacggggcctactgctcctcttggtatggcgggcgagtgctgcttcacctgcctggactccggttgcatgctacaggctcgtccatcaccacacgactagactgagtcaggaacttgtgggatccatcagaatgtgtgaaggagtggtggtttgaccttcgtcctggcatgcaaccaagcaattttttaggggcacacgcttggacgcgctctccattttggtggaccaacggatctgcatgcgcgaaaactgccactccttttaccggataagcgcgctgcacttggacgcagtcaaagcggtgcatgcatgtttgcgctggactggacttgcgagtggagcatgcatgcgctgagcagttgaaaaaaagagagagaaggcagtctatgcatgcgctgacagcctatcgtcctttatgcatgcgcaagtgggctgcttttgccagagtgtcaagctgcgaatatgtacactccca

SEQ ID NO: 1428 - DNA, 605 bp, Zea Mays
cgagaatgctagacaactccataagtctggggactaaacaaagaagaatatttacgaagttgatatatttgggacctcatttatgagattgttggagcatgattttcggttaataacatccttaattgatttttagggattttttttggaactgctagagatgcttaccacagcctatgttccatcctatcctatctgctgaaactttcgagcaccctaccctagcgctcatgcgtggctggctcgtctcctctgctggagtcccctttactcctggaagacccacccgtctccctgtacaactacaacctcatagccagccatcattgtccgtccggtgctcccgattcagaggcagtgcagaaagacggccatcagaccgtcacatgccagctagctcttcctgccgcgctccgtggaatcgatggccgagagaacgcctttactcgaagtctgaaacggtggcacctatcctaggatcatggacacggacgtgaatcggtggaccgggcggcgggggctctcatggtgccgctgccgccccttccaggtgcttttgcttcttcatgcctgcatttacaggtgttcgtctctgccgatctcat

SEQ ID NO: 1429 - DNA, 605 bp, Zea Mays
ccaggacgccacgacctggccggggttccgctcgggtataaggagtggtcgtgttcctctcatcggtgagggagcagaatcagtcgtcttcctcccgtgattctagcagagtcgttgcagcggtgcacagaattcggctggggaatcccagtgctccctcaactaattccgcatccccttcccaccaatcggacccgagcgccatctcccgcctccgacacaccctgacggtgccatcagcggcgaggcgcgcgcacggagccgaccttcgaaccctggtgtttggccgaggcgccttacgggatcgtcctcgccgcgcgatagctctggcctctcctcgcatccgcgttctctccacccgccgcggtaaacgctccttcacgcgaccccgtgtgcccatcgcgcatgctggtggtgcagctgcgcctccgccccggggcctcctcgagtccaagctcgccgaggcactcaactttgccaactccctcgtggaacaccgcgatggcttctaccacagcgagttcgacgccaagggcgcgccgccacacttcgtcgtccagaacccccgtcgtggcccgcttccacccttattccgcgctcccggt

SEQ ID NO: 1430 - DNA, 606 bp, Zea Mays
ctggaacccacgcatgtaggacctcctcctttgccttgcagcaagctctacgcgtgccgtaaccacctccgtcaggagcgccttgggtggttacaagtttgtggcctccacttgcttcgtatagcaccatagtcaccccattgctataagccacgggctgacaccttgaataccccaccgaagacggagagaaagaggagaaagaggtagagagagagaggacgccagagggtgccaatcgatcgggcagcaccattggagctcgagcagttgctcgccgaggcatagctccaccgtggagccaccatgaaccctggtcgactctccagatccgatccctaactttggtcaagaacaggtaccacaggatgaggcgcatggaggatgctgtgatgtgttcgtgagaggtctaggttgtcgtctcccagtcaactttgagttgctggattgttgtctccttatgatgtatttatttatttattttgtacagaactcctattatatagtaaagttgtaacattcgtttttgtaccatgattcatcatatgtgtgagacttggtttcagcacacctagtgtttatgttcgcgcccgggtcttggtgccc

SEQ ID NO: 1431 - DNA, 608 bp, Zea Mays
aatcaccttatccaagctgggattgctcttgagaaactgagctacagatgatgccttattttctaccaatttatttgacaacaaatattcaatccctttacttggtttacgattaaactgcaaaaggtttaggagaagtgacatttacaaactaaaacattcaagaaataatctgatatttcagttccgaagtggttatgaaacctgcagacacccccacctcagagattgcagcctccattgtcgacttatgagctttggctctctcaaactgattccgaccatcctcttggttcttcatctcatcagttgtcaatctccttgaagcatcctcttcatgagattcaacaatgctcccttgctttgaggaatctcttcgaagttgctcccaatcagccaatgacttcagaataatcaccaaacactgcaattcaaaatcttcatgtcaaaacaacaataaacaagaaattatacaggaggcccgagtaacgtgaatcatattaacctggagagaggagctttttacagaaactgtttgggatgacacgatggagttagtatcagcaatttgagatccttgtgctattcttgatagcgcactaacctag

SEQ ID NO: 1432 - DNA, 609 bp, Zea Mays
tttatctcttaattaatctcgtatcaaatgcataaaaccttcggaaattcataactccttcgttttaattctgaattgactcgttccagttgcgttagcttcgtataaatatttactacacagtaacagcataaagtataccatgtcgcatacttttatagttagatatttatcatcctatgtctactagattagctcttctaaatccaaaccaacctgaccataattataatttggttaaaacatgatctctagttaagtataattaaaattaaagttgagattaattatttatagagtgatctctctcatatgatgtatactaatcaatctataatatttaattcacatagatctcccataaatcataactccttaaccatgactccgattttactagttctcgatcccacgatctcgtagtaacgcgtagaatattcttatgcactttgttcttatgtttggtgtgatgttaattttgcctatactatgtttgtttgtactgctacgactagcgcgaggttacgtgtcatctgaagagcaagttggtacctggaatctcaagtcccaggcaagttgtgctcttgatcacttctttttacccagcca

SEQ ID NO: 1433 - DNA, 614 bp, Zea Mays
gtagtagcggttgcgtgcgcatgcccaaattcttgaacctgcgcagcaaccagaattcagcacaacatccaaaaattccccaaccctaaacacccactacgccacctgcgaaggccctggcgctgcggaagcctccgccgctggctccgccgtaggctccgccgcggcctccgccgcagtttccgccgcctccgccgcggaaccttcagcactcggcgcagcggctgcgggggcatcagcgccgccttcgccagtcgcagcgggcgggggggcagccgtcgcgatcgctgcggtctccggggttggctccagggcgaccccagtcacagcctccgcgagggttgaccccaggtctggcagcgcgctgtccagagccccgaagtcgtccacccgctcgccgcgctccgcctaggacaagacacagattcagcaaacactcgcacagcccgcatacagcaaacgccaaacaaacaacaacgttacctgagccctcgcagcctcggcgcgctccctgaccacctcacgaccgtacagaccccacatccggtcgtaaagggccccggtggactccttcactacggggtcttcgaccttatagatgtctcgcccaaaat

SEQ ID NO: 1434 - DNA, 618 bp, Zea Mays
gtgtcacacccgggtttcgggggcactaagacccgggcgtgaacataatcaccaggtgtgctgggaccaagtctcacacatatgatgaatcatggcataggatcgaatgtcacatcattactatataatcggagttttgtacaaaataaataaataattacattatatggagacaacggtccagcaacccaaagttgactgggagacgacggcctagacctctcacgaactcgtcacagcatcctccaagcgcctcatcctgcggtacctgttcttgacttgtgggggggtgtgagacagcaagagtgagctcacatacgttcatcgctcaacaagttgtggggaataatgtgcatgaactcgccaaaggtgggagctcatgtgaagtgtaaggcttaccaaagaggatgattagagctgagcattgcttttaaggttggtcaaaattttattagcagttactaagtataagtaaacaccaacccaattaagtagtagaacaaaagtaacaacatcacctgcgatgcaatgcatatgacaaattgaatttagtttcataaattaatcatcagagagtcctgagctgctcatgaccgtgagctcggctagtataccagt

SEQ ID NO: 1435 - DNA, 619 bp, Zea Mays
tactgcaagaacatcattggttgtgacaattggtccatctccaagacatcgtggggaaactaccagtacaataatgtttggacaaagggcaatgaaagttgagaacatggtgaaattgaaggaagagtttgattacaagagcttatgtaggaaacttgatattgaattggataaattaattgcagaaaatgaaaggcaaaggaaacattttgacgatgaagttgagagaataagagctgaagctcaatgccgcattgctgaggctgaaagggaatgcaaaatcacattagagaataaagaggctgagtctacatccaatgatactggagaagtgcataatttactgcagaatgagaaaatgctacgtcaatcggctgaagatgaggccagtgacctcaagaatcaaatatcacactggaaaaagctggaggctacagctacagctgagataataaaactacagaaaatgctagatgctgaagctagccagaaagagaaacttgaagaagaaataggtgttttgagaagccagttattgcagatgagtatggaagccgatgagacaagaagtcttgataaaggagatgggccaggaaaaatatttcctgggtttagattc

SEQ ID NO: 1436 - DNA, 620 bp, Zea Mays
tatagcatcaacataaacacatagtggcattatttgagtgagaaattatatctacactcataagcatactgataatttgacgctatggcacagatcacatgcccgtgaaatatgtacaaaaagctgccaagctgccagggacaacggacattcggtttatccaaaagtgaaacttatacctatcactctctccaactccaagtcttcaggcttcagcagacagcagatggacaggccgctccctgttcggctgttctgtgtggagagccagagaggaacatccaaagtccaaacgcaatcaacgcattacgcagtacgcactgaagcagtgaagcaagaagcaaagaaagacgtggtgtactggtggccacgatcgagcacaaggcagccaggcaggagctaaccgaggtccggcgcgaggggcagagggcgagccggtgtccggcgaggcgaccgcggctggcgcagtgcggcagtggcgcctggcggctgcggctagcaggcagcagctgggcgcctggggcctgccggcctgggcagcgacagggacgcaggcagggtggcaactggcaaccgtggtcgggtattaggtatttagggttttcacgttttgtgtgttc

SEQ ID NO: 1437 - DNA, 621 bp, Zea Mays
aactgttgagatttaaaacacaaattgagtacgctacttttaatcctgaccatgcttccactgatcgacaactgctgccattccttcttcctcctctctgctacccgacaggcggcgctggtttcctccgtggcgatgcccaagcaggagcgatgggcacctcaccggagaacatgaattatgtgacccggtcacctaaatccaaatctaacagacgctactcgaagtaaggaagacaacaaatatcagggccattatctcaccagcaattaaggtcatggccgtgcagaccacgagaagggcaactcggcggcgatgatggagctccgatgagagatctcccatactccgatcaactattccacactacaaatcctcgtacgcgggtggcgtgcaccgacgacttctcccatgcacgtgattggaggtaggcagcctggagcatgaaggtcaaccgcggtggcctcctctccctctcatctggatgctaaagtgaggcaggcgtcgacggtcgaggagggatgtgtgaagatgccgatatatatggttgcggaaaggatcccgaatcgactaacaaacctcggtcaggtttgctacgatcccaacaaccctcggttgttg

SEQ ID NO: 1438 - DNA, 626 bp, Zea Mays
atttgtttatgttaattttggatggtttttgcctcaacaaattttatagaagttggctgaagagctgagcgtttggcagtccgcaacaatttttatggccataagctgtcagaagcagaaacaaacatgcccttattctctctccgcaattgtgaatatagacgttctagcccctctgcagatcaaatactacaatcaaaggggaaaaaaaatgcattcttcccttctccgcagaactgctggctgcgcctcctgcagatcaaagagtacaatctcagtttcttcccttctctgcagaactgctggttgcgtcttgccttgttctgttcgcagtcgctggggtctcctggggaagtggccagtgaaagggggaggcgccgcaccacggcagggacggtcgccggggttgccggccaatgccctaaggccggacgccggagccagcggccctgggcctaggcggcgagcaggagggaccgagggagctgggaatgggggaggctggaggggcagagccgtggagggagcttggcgaggaggcggcgcgccggaccaccggagggagctgcggctgctggaggtcggagccggacgggaggatcgaccgggggcatcgggcggcaggc

SEQ ID NO: 1439 - DNA, 629 bp, Zea Mays
ataagaaacagatggatgaaaagagaatccacattaccaaaagagattgtaaggcatctgcaacaacttcagaatggcgtacagtgcagtgcattcaatctcaaataaaatccctgctacagtgctagcaaccttcttcctccgctgctccgtcaaggaaggggaggaagtgaagcacagagagagaaagaaaggggggggcgaatggaggtggaggatggcggccgagccgcctgagtgctgctgagctcccagtgtctttgtctctgatgaggttagtacctgcactgcaccacttttcctgctctgccatgctctccgttgtattcatcacccagccttgctcgcagctactactttttcttgttgttgctgctttcggcactggtctggctggtggctcttggctgagaaagataaaaaacactaccagccacccccttctcccattgccgcaccaccgtccgctacgttgcggctggatggacatggattccgccccccacccgcttccagatcccacatgttgcttttagtgagctagacgctctgctggattgttgccactattagcaatgtcgtattcgtagcagtcaagcacatcccacatgtttgcaatttccagtact

SEQ ID NO: 1440 - DNA, 630 bp, Zea Mays
cgcgcgtcgggtgcatgttgtcgtgttgtttcgtatatcgtaaattcgtcttgcgtagaatctctcgtgttaattaaattacttatttatttgatagttgttagtgtagcagattaatcaaactaaatagtggatatactttataattggtaaggtcgaattaattgttagcgttaatacttgtgtagcgtaaacgcgatattttcccgaccgtcgcttcgagttcgacatttctttccctcgcgtgaccatagaatcgagctctattttatgctgcatatttttatagcattttatcttgtatggtgtaatgttcttatgcacttatatatgtttgtttgcctgtgcttgttcgtcttcgcttcgcattgcgattagatcgcgattcgtttccgagcttcgaggaatcgacgatcaagccttggtgaccaagtgatcgaactcttcgagttctacgaggctgaagaccctgagcatctatttggtgaaggcaagtgtcctctgacccattatgtcctatttactttataattcactaccccgcatactatgaacaacctaaggatttactagctttctatttaccttgtccttgatttaccttttgggttactatggttagcttcatgc

SEQ ID NO: 1441 - DNA, 631 bp, Zea Mays
ggagggtgtgagacagcaagggtgagctcacacatgttcatcgctcaacaagttgtggggaataatgtgcatgaactcgccaaaggtggaagttcatgaagtgtaaggcttaccaaagagaatggttaaagctgagcattgcttttaaagttggtcaaaattttattagcaataactagatgtaagtaaataccaaaccataataataatagaacgaaattaataacaaatcccatgcaatgcaaatgacaaattgaatttagtttcataatttaatcatgcgagagtcctgagctactcaccgtgagctcagctagtataccagttttacactctgcaaaggttgtaccctgtacccacaagtcgtgtatcccatctcgccagggttagctagacccttagacactaccgaggtgaatggctagggatccactatgaggcctttacaaagttccgctagcttccgacaacccgttacagtttatgggaacatcacttgcaagaatccctcgtctgaccgccatcgcagccaaatcaacccgagaacctccctacatgcaactcccctactgcccttgccccttttgggtaaggtagtcttccactagctttcctaattagttagccaagg

SEQ ID NO: 1442 - DNA, 631 bp, Zea Mays
acacacctagctcacagccggattgcacccatatcaagacgaaccatcccatggacaaggtcgatcctccacatcactttcaaccttagaagcccgccaaggaagaatggaggtacgaataaaccacatagtgttatctgccctgcaacgcctactctagcttaggcctccagctgaggtcaggagaacccccaacctccatggcaaggtctgacgcacactttgcaacccacaaacctcacatacgcaacctcgccaaggaagtgaacaaagctgcaaaccccgatggcaggcaacatcagtagagaaagaagcttgaccatctcatagggagaggagacccctaacaagaaaggagagacaacacagaaagtacgatatgaactctcacacctcacatagacttggaaactctctttcttacccgtttgtaactccctactacaaacaatcaggtgttggtagcgcgagtcaccgaagactgaagtagggaaaaattcaatttgaacatgtataacctttgcgtccaccgcgcacaccatccagacctaaaacatgcatacacaaatttactggttggtgcttattcgtaacaccggcaatgatcaattgtgaaatattgagcttctac

SEQ ID NO: 1443 - DNA, 632 bp, Zea Mays
ctaagctgcggtgccttcatccacgcgccccgccggcagataggagcgttgggctgccgaggccggcccggcccataacttgcttactcgatgtagtacgctcttcttctctctctctcttttctgaaacaaactggatgtacatgtataaaagattttcgagccagtttgaatgcattatattaaaaaagaaagtaggggcaagaggacatggggcatccaaggggtcatgatgatgcaccgtacacgtacgtacgccgcctccacaacaattgagacggtccaataacacaagggatgatgcacggtctcgtgtaagatccgcaagaccgcaaacaagaaaacctgttgatcggagaagggagaaaaaaaagaaagaggagacgacgacccatcgcatgcagtctgcagacgccgcccgctgtctcatctcatcagccagcactcgtgtagtcgtgtgctgcacatgcacgggccggaacggggatggcatgtggatgatgggtgagaaatgaggggggaggcttgcttgcaagtcaacaaccgaggcttcgttcccctggcagtttgtttaatcgacgctcccgtgagaagccccgccaattgagcagaagggctggagaaaacacaga

SEQ ID NO: 1444 - DNA, 632 bp, Zea Mays
attgaggattagagccattattctctaccctttttttatgccaacttctatacatacatcaaagcaattagtgtttaattaacattgggatctgaacattcgcatactaatggttatttttgattcaacaattcatctctactaccaatgcagtcgcatggcaaatgcagataaaaaaccggatggagcgaggcaaatgtggagttgacgtgaaaaaagagcagagatgatgaatatatagagtgcggtccatgcatgcatcatcgactgtcaggcaatttctgatccattgagatacttaggcacgtttcaatgcacagagtctattattatttaccatcatcatgtcacgtcacactaagtacattagttatcgatcctacactcgtcgtcggcccatatatctagctagtgctccagtacgtgcacggcctttaattagacccagtctaggctcacctcaaggccacataagctttcccatttatagaatttgaactgcaatcgaatacatcgttttactaaaattaaaatacatttgaatgggacagttgttgtacttctcatgaatgtaatctgtactcccaatcatatgaggaaatcctctagccctctttcgtcttaggtaaaag

SEQ ID NO: 1445 - DNA, 633 bp, Zea Mays
acagtgtttgcgcatcgttatcgggagcatgggtggagacagccgcgccgattaaggccgatgtactttttcatacgctacgctacggtgtgctctactctatccacccaacccaaggaacccagtttcgtggtccgcgtgacgcccctagccgcgcgcaacgcacgccgtctcggcgtcggtcggtcggtcagtcagcgccggcgccaaaactggcacgacaaggaccgggtggcgagccgccgggcagggggcctggtcgacaccggccctcccaccccacgttgcgctgccctgccctgcccgtcggtgtcatgtcatccagcccattccattcggttccccgacgtgttttttcgcgtttcacggggacaaggaagcccgcgggttgtcgtgcttctggctggcctcttggcccgtccgtccgtccgtcggctgcggcaccgtgccggcaggaacatatccattccccagcggtcggcgcatgcatgcgtgccgactccccccggccgggaaggatcttgacttgaccgtgtctccgtcgtgggaaggacgacctagcttagctagtggtcatgcagcctgcctgcctgcctgctcttccccgtcggtttgcctggtccagttcatcgt

SEQ ID NO: 1446 - DNA, 633 bp, Zea Mays
aatccaccagcgcactactgccacactgcacgacgcataggataggaggagcctgtgactgtgagccaggaccacatgagagcttcttggagagccatggcggcggggcataccggccggaacagcaaacagcaggccgccgaccggttcagccggccgtgctttggctaacagtggatcgctccatcatcatacatgcgctagctgtcgctgttgccaactttttctgtactgccgtgccggggcctctgctactgctagtgctagcttatctccaacgaccagctagcagcaatgcaagcgcgacgtccccatccatccatcacccacatttcctctttttcctctgtgacttgcccgtgcgccttgtgttctatggtacagcggccgtacgcaaaaccagcgccatctagctaagctagctgctgcctgtaactactaatacatgcacgcactgatgagagactgcatgtgcatcatacagtgccgcgttttttaatttaatcgatcgctaatgaggtgtttgttttgaggaataagccagtcctttatcttctcactcttcactttttttatccttggttcaatttgtatatatgtttaacgtgcaaatcatatatataaaaccagtgg

SEQ ID NO: 1447 - DNA, 633 bp, Zea Mays
ctcagtcactctctctcctagccatgccctgagacttacataggggaccatgctgtcagcgccaacctcccaacaaaatgcccctaatccagcgcggcgtaaaaaccatggccgcagtctccccagcttggtaggtcaccgagtccatcctgtcaagcctataaggaaggggaagggcgtcctcggccacgtgcacacacctcacaaaaccatagggcgctttggctctgagcaccgcaccatgaagagagaaagggagggaaggcgaaggttgccaccgtcggactcgcgctacgctggtgtccagaagctgtggatacccagggaggctcatcggggcctatcggacgaatacgcggtgttgccggggtcgagaatcgagcggcccaatgacgatttctcgtcgcacttcaacgtccaccgccataccacgcttgaccgtgggcggagcttgtggtttcgcaatccctggtgaagagcaggtagaccaggaggaggactactatgaagagtttgataaagtctaggtggcgtctcccagtcagattattagcgccaaggaaataatattagttcacttattttttatcatttatttttgtaagacacttcctctatgtaataatgtttgtg

SEQ ID NO: 1448 - DNA, 634 bp, Zea Mays
gccgggtaacgttttagtaatcagtagtcgtgcatacttattatgagagcagtatcaacagatttatttgttgcctatagcactatcaacaaatcagctcggacatagcaaaacagtacgtagcttcctcctcggatccactcctccgttccgttgacacctgcgttaggtgataggcgaaataatgcaacgatagaagacgacaactacggagaagaagagcgcacgcgccgagcttgtggacggtggcccgcgagcccagtccgccgccggggccggggtgcggaagcggtaaataagacaaaaaaaaaatccacacacgccggccgagagctgtaagattaccagcatcgccatcacggtgcacgcacagcgatccgtcgtcggccgatccacatccacgcacccacctgaatcgcccgcgacaccgactggtacggtcgagttgccgtgggctacaggaatcctacgtgtctcgccgctgctgtcgccggggggcggccgccatgcatccacgtcgccttgcgcgctcgatcgcccatgacctcacggattaaccagccacgcgatttgcgtggctggggattaccgattagctaggtagtcatcttgtattcgcagacgtgtattcgca

SEQ ID NO: 1449 - DNA, 635 bp, Zea Mays
aaaagcttaaaccaggagcaaaaggtaaatacatattcagttccacaaaacttactcatgcagaggtttacaaatcaatttatccagttagcctttaagccatatatataataagtaagctgcctaagctacacatccaagcccaacaatttcttccatttagcattgatgctctcaatattttaactgacaaatcctagtttcaccatcacatgtgtcaggccactaaaaaactcagaccgcgagtttccagctacatcctgtatgttgtattttgcagttcaaaaaagaaatagaccaaaaatttgaaaatgggtgggtcattacattaaccttctctgacattcagtcctggaacttcactgcaaaagatgaaccaggtgatttttacatctatgcaaaaactcatgcatataagaattcatgatattatacattaacggccataacctgtggcagtgcatggggaaatttttctgcccctctaccagttcaataagcgtgcagatcgcatgcatgtttgtggaaggaaaacattctttgctattgatgctgctaaaattcatggaccccgagtccaagtcggtttggacaggtcgtgattattcgtcaagtcgtccgactaatcatgatta

SEQ ID NO: 1450 - DNA, 636 bp, Zea Mays
atccttatctcgtgcgtgctaatccggctaatcatgtgggaatctgttgaaaagcacctaggaatgggtctagacctccaccccaatatatattagagggtatagccgattgaggcatgatacacctagcccaggtggggttggccgagacccaacaaattagggttgtctagagcccaacagttcattaagcacacccaactcagggaagacccaattgccccaaaagactagtccaataggggaagggtggctctcccttttaaggtggcttcctcctcctaagttaagtgaggtgggataattctgaggctcacacggttgtcgtccgactacaattgccaactgggccaattgcgtctttgccaacgggtagtagtggaggatgtcctcatcattctcaccttcttaaaatggatcctagctccgataccagatgatatacccaacaaattagggtaatagtggaagttaagtgaggtggggttgaccgaggcccaacaaattagggtaacccggagcccaccaattcattaagcacacccaactcaaggaaagacccaatcgccccaaagactagttcaatgagggaagggggactctcccttttaaagtgacttcctcctcccaagttaa

SEQ ID NO: 1451 - DNA, 636 bp, Zea Mays
cttgcatttgcagacatttgcactcatgaggaatatatgaagtgtgacattactatgttactattgtggtttctacctgcgaggtgtggtaactaggtgcgttgtacgttgtatacgtgctgcaccttcgtaataagaaggttgtggaattaagtggtggtaaaacaatgttcttatgtggttaaactgtttgatattattttacttgctgagatgtgtcatctcactcttgcattactcaatgcaggtactcgatacatgttgggaatgaggggagtagcagcacgtccactttcactctcacaataacgctgcccaagcgcagccatgatttaattagaaacttattgtcaaaggaagtttgtttattttttttatatggtcgtgcgcactggctaattcagttcaggtcgtatgtttatctttccttgctagccgagtaataatacttagtatcttttagtcatgatatatgtttatactctgttgctccctcttttatgcaatcttgcaaaggggatgctgccgaaattttatatatggacgtcggaagtgtagtacagtagcataccgggttgtttgtggaacctggagtgttacataaagatatgacctaatgttatgactctttttgct

SEQ ID NO: 1452 - DNA, 637 bp, Zea Mays
cacgatctcgccacaccgctcgcaccacaattcgccgccgctatcgtgacgaagggagcgccgcggcgtggacaaccttagttggccgtcgattcgacccgtgtgtgggactgtgtgaaggcgcgggtatccgtggtggtgtgggagtgaatccaggggcgcacaaagaccagaacctctacgattgctcgtcggagtccgtaagatccgccatgcggccatcatccgtggctagctatctctgtaaccctccgtctacggtacgtgttcccattcggtccctattcatcgcctctgtataaatttggggcttgcgttggatttcaccaacggtgtgcctcgatcactcagcgccgggctcgtgccgccgcgtagggcgcgctccgccaccgtctcagaccgcggagggggaatgaaggcagtgggccattgatttttttggtggaccactaggattgatcggcataccgattcggtgggattaatctggggcattgatctgagagtgggcggtctcagatcggccatgtgacttaaaaaccgtggccgttggatccaatcggagcgctcctaagtgattttagggtagctgaatccgcgccatcagttcctaaatggatggcggatatcccgtacc

SEQ ID NO: 1453 - DNA, 638 bp, Zea Mays
tcctatgtcacatgaatgtgtaatgaacatccagtgttgctgctataaggccaaaataagaaaatgaacaaaaacacctgtcacaacaatctggagcgccactgcatctagtaaaacaaggcagcaaggcatgaagcacacacatactacagactccagtaacagctgattcagcaaatgaaagagcaagcacagaatttatcaccgataactgcatccactgtacaagcactgcaggatcaaagagaacacttgtgttgcaggtagcgatataaaaaaaagcgaacatattgagcagtaaaatactgcattcaatcaaccatgcccggcgatccttatgctaggtccccactccccagtaccctttgtactaaatcctcagttcctcttcatcagccggaggctgaattttttgtaataatgaatggttgagtgcaaaactctcgaagctgaaaatttacaagcaccctagttcaagaaagtaacaatttaccagaaaaacaactgcatcacccattttccggaacacaaatccattaatctcaaaggaaagaagcctatgacgagcaagaagcactaactggaagcggcacggaggcagaggaggcgcagctcgtgggacccgaaggtgaaggttg

SEQ ID NO: 1454 - DNA, 639 bp, Zea Mays
tggcgagataagttacaagaggtgaacctcaagttccatgtttgaaactgcttactggctttcactagagggaacacatgtgtcaatgtgtggcaagacacaaatgacaaacctataaactagagcgtgcaataggaagctcaagttgaaacaccaagctcaaacatctacagtgaccatgggatcccagtgtccagtgacgtgatgatcactctttatctcgcaatattggtgcctcaagaagcttgcgaggtaactcttcaactttcgattcttagtttatgacaactgatagaaatacacaaataaggagttctatgaattcagcgtgtcagtaccaacctgggcaacaaatatatataggacacaagaatcaacaaacatatggtatcctgatggctttgagagtatcttgggagcaagccacattcccaggtccgctgcagtgcccactggccactgcccaccaccaggagccctcttctgcctccttcccttgagcttcgccgactacgcgattcagtgcgggattctgcaggactcgcctcatccttgctgtggctatgagcaactgccgccgcgaattccaccaaagctccggcaagagagaggaaaaaaaaaagaccagttgccttggcc

SEQ ID NO: 1455 - DNA, 641 bp, Zea Mays
ccgtccgctttaatggagatttaactcgtccgttcctctttctccccattcctctccccgttagtggtgataatggcgacgttaatggctttaaagaccgccgtttctctccccgtctctccctctcccctccctctctctataaagccacggccgaagcccttcctctacattcccctgctcgccatccctcctctcgcatactgtgtttgttgtgcgtgctgtgcgccgccgtcgctctgtgtccacggatgccagtgcctcaccgacgactgcgcccacatcgacgtgcaacgacgaaactcgccccgtgccggagcctctactgccctgcttgctgctgtgcgctcagttttgctagccatactcgctgtcgtgtgcctcatcgaagcttctctctggtgtatgggcgactctctcctccacgaccggaacaccacgtcgagcccctgttgtccacacatcggctcaccgacacgtctcttcggagatcgctcgccgtcgttcagctcgtcttgccattgacattcttggtacgccggagctacacacccgtcgtaccgagccttcaccttacgcccgttcgtcgtcgtccgttcaccacaagtgattgatcccaaatttgagaatcaagattcaag

SEQ ID NO: 1456 - DNA, 643 bp, Zea Mays
cacctctattctaaattgtaaagggtgtttatttctttagtcacactcgtaaagttccggaactaaaatttagtccatagaaatcgtatttagaagatctattttaatcttctcgttagatatttagggactaaaaaagtaactttaggatcattgtgactttcttttatatgttatacacacctctgcccgataatgggcatgtttggttcggcttttttctgaccagcttttctgagaatctggctgtaggaagaatctggctatgtagagaatctgagtatcattaggattacgtgcagaggaagataaaggtgtccataggactcgggatctagaaagtgatggattcctactattgcaacgactcaaccaattatgtgtttattttgattttgaatgatttttacccaaacgaattttatagaagctgactgaaaagctgagcgtttggcagtccgcagcagcttttggtggtcagaagctccaaaaagctgaaacaaacaggggcaatataagccataaattttctttatccttccacggatacatcggtactctaacgtgaaatatctgtgagttcttcctcgtatatgtcccttaattaccatctaaatttacaattttgcctagccgacgaagc

SEQ ID NO: 1457 - DNA, 643 bp, Zea Mays
agtaaaacaaacataactggagtttcacaaatcatatgaatgcactctttaacaatttggaaagcttataaaattatctacaacttattttaccaacccatagtttaattctgttgataaaattgcctaaatcttaagagaacagattctgcacagaattatgagactgaaaaactgctatagtaaaactgcaataactttctggtcggatgtccgattgaggtgttcttcgcggccacggaaagatctacaaattatctacgactcatacatagactttttattttttttgaggccactaagaccacggaaaactggcatgaacagaaactgtcgaatctgccattctgcagaaaactaaattcgagatcaaaacctaaccccacatcaaatccaacctctaatcctttaattcccatgatccacaacctccaaaagcctataattatagggaggaacaaggatctcatccatacctagggtttccccaagaaatcttcaagaggagatggggaagaacatctccttgatcctctcttcctcttcaattcaacgtgcccctccttttctcgatccttgctgcgtagggggagatcttgggggaggaagcaatggaggatggctgccatagggggagggggcg

SEQ ID NO: 1458 - DNA, 645 bp, Zea Mays
gtccgcaggccattagatttagatgtagggtccagatttacttaaccaaaacagtactctatttttaatcggaaccgtacgctacgcgatcgacggcaaggagcccttcttccccagaggaccaatctggcgacagcacatggcccgcaacggtagcaacctcgccggcgaacggtgctccagcgatctagtgcccaacgacccgcactgataggtgctacgtgacacagaggaaacgaaaaatcattctaccaagaccttaccgtcgaagatgttgcagtgaagccggcccccgacgagcagccgctcgggtggaagttcagagctccgttgaggaattgctggagcccctgtcaccccaccaccacacgactgcccagcgcaggcgtcgcccacgatcaccaactccaggcgcaccaccccgactgcacacagattcccaagaagtgcttgcacgataggcgacgggagtcgtcaaaatctactggcgccacaccagcaagagctcctatttctctctcctttgaaatctcggcggcgcactggatagatggtcaggggaggctcgattcttataccccggttgccaaatctgttgccgaggaaggcgaatatcggaggattcccggtagagtttgcgacgcg

SEQ ID NO: 1459 - DNA, 646 bp, Zea Mays
agaggaaggcgaagatacgcaatggggctatagaggatggtccaccgtagatggaggcagatatatttgcttccttggttttgattcgcaataggcgcctcgttgtttcctcggaatttttgcttctgttgcctttgctccgtcaaatccgaggttcttgatcaatcccagtgctctggtttcgttgtttttcaggtccaaggaagctacgatggcgaacctgtctaacgactttgtgtaaaattcagttttttcatacgatggttattgcacatatatatactatactaaaattgcagattcaatttgttccctgactcgggacagcccgacgacgttgtcctcagcgttgccacctccatctggctgccccgtctcggcgaccatgtcttcgcctttggccgcgacaagaaagtgtgcttctagtgggaggttctgtcacacgacaatcaagttcaagaagtgtcgcgcattcccaatggctccaaccccggcaactgcatctccctgctaaggacatgtctatcgttggcgatcttgacaatggcgatgatgaattgatggtggcgtgcaacgtcacagggcctgaacatgaaccagaatagcatgttgatccttcaggagagctgacaaacttctactacac

SEQ ID NO: 1460 - DNA, 647 bp, Zea Mays
cgctcgcgctccttcgcacaattcactggtcgacgggacccgcttgacagctgcttctccgcgcccatgacgcaaccagttcctcactgcgctgtgggacccgtaggtcagcacgtctcccacctccctcaacggatgctccagaactcggcgggagaccgcaccggaatcgtcgggccgttgagaccgaccccgttcccccttcgcgcataaagcttctactgcggccctatcttaatcgctttgccacacttgtcccgcaactcgagcgccaccggtgcagtagagagagaacccgagaacccgtctgcatcgccgcccggggaaagctcgcccccttgccgatctggtcatgtggtcgggccgtagtgcatcgcaggcgcgtggtgaagctgttcgtggtcttgcggaggtcggagaagcgaggtgtcgctagaaattcctcgctgaagatcttctccggcgcagcgccgtgggcagggtgtctctgtgggtgaaatcttagagaagaacaggtggtcgaagaggagcctcccaacagtgaagcttacgacttgatctaggtggcgtctcccagtcagctttgtggcgccagggaaataataattagtttgttttatatttatcagttattttgtaagacttcc

SEQ ID NO: 1461 - DNA, 647 bp, Zea Mays
cacacacgatttcacacaaccataccaaccttggtgggttaaccactctggtctctgatgggctccctccccctcagccatcatcctttccttgtcttcgtgttaacatcggttgcagtggttgcaacctaggtatcagttacccgtgctgcacctgtgaggatatatgtgttcctcatgatggcagaattagcagtagagacagtctgttcagccgcagctaatgcggacttggtcttctctgcaaccatccatttccttcattttcccattcaccactcccggtgctgaacttctggcttaatcccattgtcctatactcctatcaagggaagcgactttggcagttgcagttgatttgagctgatgcttttcatcaaaagcctttggtttttcaacgacgtctataccaagaacaaactctttggctagcatagaacctacaatgtcctcagctttctaacgagcggattccatgccaccagcattttgtgactggtgatatcaagagtcttgagcttgttgaaagtaattttgctaatgggagatttgaatatgacatggtcctacctttagatcagctaaaacggacgccggtaacttgtaattaatggctggtgtgatgaattgatgacaaccatatcttc

SEQ ID NO: 1462 - DNA, 648 bp, Zea Mays
gcgagagtttatagtggttcgggccgccggagcgtaataccctactccactgtgtgatgtattgcttgggagcttgtatgaacttgagagtgtctgcctagagttgggtctcgtaacgtcgcatgcctctccttttatagctgaaggggggcatgcacaaaggcactgagacccgacatgtgggcccagggacatagagaatataacacttgggactataaatatttgctgtcggggcaatccccttgtgtcttgtcgtccgagatttgtgtatcttcagcgtgcaggggaagcttcttgtagaagggataacacagtgcgctgcttggcacgggcgcactgttcgccagcagacccagcaggcgcgccgcctgctggatgaccttgacgctgcctgccagcggatgggacgggacacattaaatgctgagagggcacgtcacccgtcagcgcagtggcaggcggcgcgtcctctcctcaataaatgcaggggctacacgactttatgtcaggctcggcccgatggtttatgtcatgggccacaagcagcggaccttcgcctgcgcggggagcggagagcaaggcctgcacacgtgtcagcaccggacccctgcataccccgaggtccttctcgttccagaaccctgc

SEQ ID NO: 1463 - DNA, 649 bp, Zea Mays
ccgaggtgttacagaaggtgcactttgttgttgttagtcaggtaagacagtgttgtgttcatatgcttgttgaaaacctgaaagtctttcgagttacctcatcatggaggagaagacatgcaatggtcgtcttttgtttttcagttttcactgttgcacttttattgcaagatcgcgttgcagtgatcatgtctttttatttgtctttttgatatatatacagaaaacactatatggactctcggagaggattgctgatctgcatgaatctatcgcacaaaagaaggctgaactgggagttgtctaaataggatggagaatgtgcactttgttgttggtagtcaggaaagatagtgttatgttcatatgcttgttgaaaacctggaagtatttcgagttacctcatcatggaggagaagacatgcaatggtcgtcttttgtttttcagatttcattgttgcacttttattgcaagattgagttgcagtgatcatgtctttttatttgtctttttgatatatatatatatacagaaaacagtatatgaactcttggagaggattgctggtctgcatgaatctatcgcacaaatgagactgaactgggagttgtctaaatagaatggagaaggtgcactttgttgttggta

SEQ ID NO: 1464 - DNA, 649 bp, Zea Mays
gctaaagatgcctagcgaaggaaagaggatggctagcgagatgcacaagcgagcctgttggaaggtgttttgatcggaatttcccccttttttttaccgagcacattccatttgcctaggatgttggagatggtcttactagtgcaattgtttcttttaacaaaatggaaggaacatcgccatgcgtatcatttaaggagaagcaaagatacccgattttccaaaccaattctattgcactcattaacgaaaaccatctaatttacataccttatgagacccacctccttcttgacatatacccgattttccaaaccaattctattgcacgaattaattaatgaaggaccgatgaggcgacccgacgggggtgaatgatagtcaactaaatcttgttgccgaacattgaaaatgagtaattcacttcaactaaaatgaactaagcacttaaactaaaaccgcatcagcaaattagtgatctcatgatttcaaaatgttcctaatacccaaacgagaccagcaaaacaaacgatcgtaaatcggacaccgataagtcagaatcgttccaaaaacgtgtcgtgaacaagttctgatttcagcagcacgaaattatactctcatatgcgaaactgaagcaaacgaactccga

SEQ ID NO: 1465 - DNA, 650 bp, Zea Mays
cggcgagtttcgtcgtggagggcgacatcaacgacggccgcctcctggccaagctcttcgacgtcgtgcccttcacccacgtgctccacctcgcggcgcgggccgacgtgcgctatgccatggagaacccggcggcgtacgtccactccaacgtcgccggcctcgtctccctcctcgaggcctgcaaggacgccgacccgcagtcggccgtcgtctgggcctcctcctcctccgtctacggcctcaacgaccgcgtccccttctcggggctcagggggcgggggcatcgcgggaggtcgcgggcgggggcacggagccgggatccggggccgccccacccaccgccctcgcggatccaccatcaacgccgatcccgtcgatggaaggtgagcggggcggccacgttgatggcggggagcagagatcgaggagcgttgatggcggggagcgtagattgcggatcgaggatctcggatcgagggtgcatcggccgcgctgctggggctccggttcgcaggatcgacgttgatggcggctcggcgtcgcgtggatggcgggcagcagagagacggtgggtgggcagagggaaccggcagaacaagcacctgtgcacgcctacactacacaattaagtagtagtagagatatat

SEQ ID NO: 1466 - DNA, 650 bp, Zea Mays
taattatacaaacctgttttttgctcagaatctctcccgtgccgtggagctggaggagaagaggtgcttcggggagggagaaggaatgcggcctagcaacacgtgctagacgacgtggaggaagctgtagaagaatgtggaaagatttgagtgggtctgtgctgacggaaacggcgtgcgggtgtattgctgaccaaaggagacaatgaatgggcaatactgagtatgaacttaaactaagggtagaaatgagtattgtagcgaaactgaggtaccagtataaaaatcccgttatataatcatggtgattagatttaatatgtcgactatatagacacatttacttgtggacgtgccgtagaatagtgacaaagatctgatgcttagtaggagggctcaagactcgagaggttgacaggaggtacaagttttgtgaacacaaggtagatttgtccattgtaatttgggttgatgatgtatgattgtcaacggatagtgtcttgggtcgagtcgtggactgatcggggcgtgagattttatatgtgcaaccatatcgatcagcttgtggtgtgcaggtgtagagcacatatacggtggtcgacgacgaagatgaacgtcatgcgggttcgtaccgatggaccgcgaacggt

SEQ ID NO: 1467 - DNA, 651 bp, Zea Mays
ctcagcagttcggtcccaggcgagtaccgaccacaccgagatcctcgctggagcttgcgagctgcccccatacccgtctcgcctacaaatagcgcatccttcggcctcgtccactcgtgccctttttccgccgccgctactccacaccacccattgcgtcgccgcatcccacgaggagacaaatcaccgccgtcacggatagccatctgcagtggggttcggcccccatcgtggccacccgagtctcaggctgattgcatagaagccgtgggagagagtaatcgaaagggacctagctaagtccatgggaatccttcgccggagttgggatttccatcgcgctcgcgccccaccgtgaacagcccgtgcgtgactttgtgtttgacgggcaagtgactgaggaggagctcgttgaaggagaagaacatgtggcgcaagaggaggtctacggcgaagagtataagcttatctaggtggcgtctcccagtcagctttatggtgccaaggaataatttttagtccattttattgctatcatttatttatgtaagactcttccgccatgtaataatgatatttatgacatttatgtctatacacttggtcattgtatgtgttgttcttcttttgtgcacatatgagacgcacccg

SEQ ID NO: 1468 - DNA, 654 bp, Zea Mays
tgtcatgttgcctgaaacaaatgacttcacttttcatgctacgaagttcactttggcttcagttcaagccccatcatattgctgctggagctgcattccttgctgcaaagttcctccactatgacatcacattccatccaaatttctggcatgaattcaagacaagtccatatattgttcaagatgttgtccagcagttgaaggagctactttaggatacaacattcaatgtatttacataatactcagagatcctcttggtttatacgctgtagtgagtagtgatcactgccaaaagtacgtacacattagcatgtggtcactttcatcaattactgaacatctttcatgtaggtttttacaaccacagtgctatgtacaaaaggggaagatgttattcaaaagttgcccttttagttttggggaggtaaaagcaaacaatctttagaagagatgtgacgaacaacaagagataaaaaaggcaaaaaggtgtaagagatgtaaaaagttgatgaaatgttggatcccttaattggttgtccggttgtgattatctgatatatatagaggatggtttatcccaacaataaacgagtcgaaatcgtaaccttcacattatctttagtccaaaattgatttaaaaaccgatctaga

SEQ ID NO: 1469 - DNA, 654 bp, Zea Mays
tgcgaccccaccatcgaaaaccgctctgcggtcaccgagtcgctagtgttgcacacctacttgaggaggtgtgtgtgcaagtgctcgagcgcctccagctcgtcgacaccaaccagaccatccgggcggtagacgacgatgaggtatgtagcgagcgggttgtcatggtcagacgcttgtcggatgggctaaatgaggtgagatgaacaaagaacgataaggagggtgaggtgataccagggtgtcatggttgcagcgagcgaggttttggtggagcttaaaaagagtagagacaaacgaaatacgcttttgtattacttcctccaacttcgtggagcctaaacttagtaaagctaggagtgtttcgtgttcatcttatgtggcatgaatttaaattgaaccctaattaattcaccaattgtttatcatattgtcgcagtattactgttttatgaaagtaatgtttgtaacttacaacagaacatgattactaggaatagacttctcctcaggactcagtccatgtctactaagactcatgagattcttatctctctcattttaaactccactatataaatggtgcaaaatagtgttttacgtgactatacacatgacctgctggtcatagcccgagtcaactaaactccagcg

SEQ ID NO: 1470 - DNA, 656 bp, Zea Mays
cctacaaaacctggtttctagcatactgcttgccgacgtggcagccacggtggaccgcattacatacataattactcgtttcttccccatggaagaaccgtagcctcctctgttcaaatcgattccctagcagctctgccccctcccctagatctaacccgcatcgcacccattaatggaacatccacctccatatgtgaccgatgcagtacaagaaaggtgattgcactcagggccaagacaagcggaaactatggacgcgtgatggtagtggttgtgacttctggtactaggaagatgactatgagcaatatttgatggagaatggccatgttctacataatcatctaccaatattcagccaagcagagaagatgattactggtgaagctgatgttttaggaagttgtggaatgaagagggaagatagaaaagcagatggcctgatggttcaaaagctagatttagtagtagggttacttagttaagattgttgtgccactaaaaataatatcagtcttatgtgtgtgcatttttctgattaatctatatgtaaggattgtttgatgtgagttatggtggtaatgaatgaaaagagtactcagattcattaagcatttgtaaacctcatccccagttcacagaagcattattgt

SEQ ID NO: 1471 - DNA, 657 bp, Zea Mays
gagcggcgatatataccccgtgaggaccccacgacagcctaggaaaccggcgttccctacagagtttgttgccaggatttttttcttggccggaagctcggacctccacagatttctattcgtttcactacgacgagggaagagagatgacaagggggacccacctatcacatagcgctcgaacgagcggtcccagacggtggggtcatgtccatgagcgcgcagcgggaggaggttcgctgacgagcgggaccaccggtcagcgacgttaggaatgtctggttgtgacaccggtcacggggggtcgtaaactgggcccgtaggtcagaggaggtcgcacgtggttgtgacaccgagaagcgagccccgcatggcagagaccgcaatggaagatttgagccggccgaaggtgggctggcggtggaatgtctggttgggcccgcgcgggagagagttgggcccaacaatgctgagaggagaaaatggcctacgggtttgattcttcttttatttttttcagtttccttttcttttccttttctattttcttttcagatttttgttttctaatttccaaattgaattgtaaatatattttgtattttcaaactcatataagatgcacaataaaaaactcagcatgtgatgcagtattcc

SEQ ID NO: 1472 - DNA, 657 bp, Zea Mays
cgcacacacgtacaaaatccatctctttaatcctgcatgctcgtcgggatgggcaaggctccaagcctcgagccatctctttaatcctgcatgcccgtcgggatgggcaaggcttcaggcctccagccatgcagatgcatgtatgtgccatcacatacacgcaccatcacgaattaacgcagcatgcaagtagtgggccccacctgttaagcaagccgcagatcatgttgccatcacgtccgcaacggaggcgcgttgagcagcggtcccacgcgacgtggtaggatcggcgacgcgcgacgtcaggtcagtgcagggcgcctaggcggattgaccagtgcatccctatttttcttttgcatgacacgtttctctagaacccaccagagattgtggagcagcagcaaggactcccaccggaacaaacatgagagcagggagttcggctaggtgagatcctatgaacagtagatccaaaaaataccgttccattgcgtagaaggtaatcgaagcctgtcgcgtaggacagttcggctaggccggtgacctgccggcttgatgaagagttgatgcagatctgatcccgcagcaacgtcgaggtagagcgtgctgataacgtgttgagaactatgttaccacggatcaccagatccgctc

SEQ ID NO: 1473 - DNA, 657 bp, Zea Mays
acatcacttgtttgaccggtggataaaaagggagagggcctggtcaacaagaccaggagaccggagcgaagcagggtgcagagtgtaaagatccttttcttttcctcatccatgcatccggttgcaagatccttttttgctgcgcttcacgcaaggctgcatgcgatctgcggtctgcgctacgacgcaaggctgcatgcgatctgcggtctgtgctacggaagcctcggcggcgatcttctggtcgtggctatggaagcctcggcggcgatcttccggccgtgcgcgtgatttctatacccagcgcgttgtccacggtattttgcgccaatgacgcagagacatgggagcagagttcatgaaattccataccactcaattgcgtcgaggggaatcgaagcctgtcgcgtaggacagttcggctaggccagagacctgccggcttgacggagagttgatgcagatctgatctcgcagcaacgtcgaggtagagcgtgctgataacgtgttgagaactatgtcaccgcggatcaccagatccgctcccttccctcccgtcagcagtagagacgcaagaagttgtagaggacccgtctcccttcccataagcacgacagaagaaatacacgggacacaggatataggattgggcctctg

SEQ ID NO: 1474 - DNA, 658 bp, Zea Mays
gttcgctcgtccccatcgcgctccctccctccgagctcattagcacttgctgctactgctactgcatgtcactcgctttaggccatcgtccaagttctctgcatgcgtgttgctgtgccacgccacgccgcgctgcatctcctcgcctctgccttgcgagctgtgctgatgctgctacatcgctcgccatcgacctagttcctcgccaaagctacaccctcgccggtgcgcagtctgcggtgctcgcgctgctcttctcgcgcggatttcttgtcgcaccatcgtcatcatacctcgtcgctggtgctgacgccatggagcagcacgtcctacgccaagactctctcatagccatagctcgcctgtcacggaacgtcgctgcgtcgtcttcctcacgtgttgctgctcgtgccagctcgccctgggatttcactcaccgatgttatctcgagcctggagttccgtgtgccgcacgcgttgctcaccgaagatccttgacgacaaccacattgctacgtcaatgtctgttacttgatgttgtgccgaaccaaggtagaagatgaggtcacatttatagactactctctcatctacgcataatattgtttggatcctacgatgtttattacttttataaactgaatatttagaatgcaag

SEQ ID NO: 1475 - DNA, 658 bp, Zea Mays
cctgtaacaaactcgtcacgctgtaaccatctccacggaacccagagtccgttgctcgcagcctagaatcgaccttcgtagggctataaagccatataccgggcgccaccaattgtgcacccacctgacgacatcgtgccaccaccgagagaggacaatagagagggagagagagagcatggagctgtcgcggctattcttcctcggagatgcgaatgggttccagtgaagagggcatgagagtctacagggcacatggaagctacggctcccaccaatttgacgagcatggcttcagagccggggtaattgctcgccgtcgtcgtggagccatatcttgccgcgggcagtgtggtcatcgtctctgatttcggtcaagaacaggtactacaagatggatcatgaaggatgctacaatgagttcggagaggtctagctcgtcttctcccagtcaactatggttgcagaggatcgttgtcgtcaatcgtcatatgatgtaattattttagctattttgtatagaacccctattttataataaatatgtgacattgatttctgtatcatgagtcatcatatgtgtgaaacttgatcctagcacacatttgattcgtgcccgggtttgcccttaaatccgggtgtgacagtatggtatgcc

SEQ ID NO: 1476 - DNA, 659 bp, Zea Mays
aaagatctcagtgtttttattacagactacaataagctacaaaccaaggaaacgaaacattgattcagctagttacaaggtgtgttcgtagtagatcaatgtacagttaactgttcgtgtcgcccccgcgtggggcaactcagacgcccccagcaaccctagccgtcgccgcatcacctagggtcttctccttctgcgccgatgcctgagtgggtcaaataaaaagtccgcgcgactcgcggggagggcggcggcaggatctccccgactcccaccggtggatctggggcgggcgcgaccgccaaggtcgccatgggacggctcgccggcatggcgatgctccacggcacgggggctcgggacgtacgtttggcgaggcttggggtcctcacctggaccaagcctgtgccagcactggcgctagcccatcggtgggcagatttgagcgggggacagcacacaacggcatgggcgactcggcggggctccgacgaccccttggcgtggtggagctggccaacgcgcgggctgtggcgaggaagaccactaggtggtgtctacggaggagctctggcggtgcggtcgcagcgctgttgctgtctgctggtgctacacagtggtccgacggtgatggcgggctacccggctgtggcgtgtgg

SEQ ID NO: 1477 - DNA, 659 bp, Zea Mays
atcatgaaataaatatttgaattgatacatgaatagataacgtttatgatatattcctgaattgttattctctcgaatgacgaagatatgtccttcaagaccttcgtctgagagccattgtatccaaaaggagatggtgtttcggaggacgaaggtctttaatctctaacaattgtgttgtcttgttcttgatccatagtatttaagaagtaaacaacattggcacccacctccggtgcactcgaacgaccaccttcggcaacatctcaagcattcacctctatggtccaaaatctattcacgaaggggtatgtccacttttaatcacagatgcccatcatgtgatggacgacacccccaccattttcaacctcccgccgcttacccactcaccacgctagccagcccaggacgaccgaggccatcttggtgcactgcccggccacaaccaccatgcgagccctagcatatccatggccgcacgaactggggacgggaaaagcgacaacatagcgggagatacccttaccgatgatgaggccttgacgacattaatcccgacgacgaaccgcaagcaccggcatgccccagctccacaacccattatccttcttatttcctcctctctctctctgttacccgccacttgccttgctcgc

SEQ ID NO: 1478 - DNA, 661 bp, Zea Mays
ccgccacccctttcccccccctcccacacttggccgcccctctctacttttcccttgggctggctgtcctctcctcccatggcagcccctctcgatgatttcctcctccctctagatctccccacgcgcagcaaggatcgagaagaggaggagcacattgagttgaaggggaagagaggatcaaggagatgttcttccccatctcttcttgcagaatttcttggggaaaccctaggtatggatgagatccttgttcctccctgtaattatgtgcttttggaggttgtggatcatgggaattaaaggattagaggttggattagatgtggggttaggttttgatctcgaatttagttttctgcagaatggcagattcaacagtttctgttaatcccagttttctgtggtcttagaggcctcaaaaaaataaaacgtctatatataagtcgtagataatttgtagatctttccgtggccgcgaagaacacctcaatcggacatcagatcagagagttattgcagtttgattatagcagtttttcagtctcttaattctgtgcagaatctgttctcttaagatttaagcaattttatcaatagaattaaaccttgggtttgtaagaaaaaatgtatataatttcataagctttccagattgtta

SEQ ID NO: 1479 - DNA, 662 bp, Zea Mays
cacacacaagccaagacttgagctcaaaatgaagcgcaacgagttcacaactagaacggagctcaaatcactaacatagtcgatcaagtgcacagagatggagtgtggaagacttagaatgcttagagtatgcttgggtgactcctccatgcgcctaggggtcccttttatagccccaaggcagctaggagccgttggggaccaacaaggaaggctaagattgccttctgtcaagtggcgtaccggacagtccggtgcaccactggacagtcactatagacagtccggtgcggatctccttcctattttggcgcagtcgacgattgcagattcgtggcagttggcacaccagacactgtctgatgcacaccggacagtcttgtacctcctgccgaccgttggagtgggccacgcgtcgcccgcggattgcgcggccgactgttgcctagtcgaccgttggctcaccggacagtccggtgcctactttgccaaggatgactcaccggacagtccggtgaattgtagtcgtacgccgccgtcgagtcccgagagcggccagatcaccttggacttgtctagcgcaccggacaatgtccggtgcaccaccggacagtctggtgcaccgagaccgagcagcagttggctgtacacagccaactctt

SEQ ID NO: 1480 - DNA, 663 bp, Zea Mays
ctccgctcggccctcctcttcctcgattcgcaagtcccaacccgcctctcccacaaaggccaaagccccacctgctccgtcgagtcccgtcggctcgccccgtctccctccctcctcctccctcaaatcatatcatcagagcgagagggacggcgagaggagagctgggaaggacagagagagagagagagtgaagagaaagagtagcgttgatacaccgtcgaatcgaatcgagaccctccctccgccccaccgcaccccccatatcgcatcggaatccagcatcgccatcgccacccctccatcgcaccaccgctttccactctccactcccttcccaccctcgccccgccccgccccgcgcttgcgtgattcctgttggtgcagagcgagatggcgggagggccaggaggaggcggcgacgccggcggcgagcacgcggcggcggcgtactggtacgacgcgtgcgaggacagcgcctccctgctctgcggcatcgacttcgccgcgtccgccgacttcgacccgggcctcataccggccatggactgcggcgccgatgacggcttcgtcgccgagatcgaccggatactcgagagcatcaacgccgaggccacccccgcaccgccgcctcctcctcctgcgcctgcgcctgcgccagcg

SEQ ID NO: 1481 - DNA, 663 bp, Zea Mays
aaccgtccaagttaacctcatcaaaacccggtgtcaaggccgccaggctcaccctctgcagaaaataaaaccagaattgcctcgcgaagacacacgacatgatggatggtttcctcctcttggtcacaaagagggcaagaggtcgggtgaggaagaccccttctagccaaccgatcagcagtccaatatctattgtgcatcacaagccaaagaaataacttgcacttagctggtgcccaagatatccaaatgcgctcataaggggcaaaggaagtggaccccacaaattaaaagacaaggttaagaatgaagtagttctaagtatcatttggagttgagagtcactcagaatagtttaggactttgtttttcgtttaaccgtgatgtaaaggaggtatgaactagtaacttgacctagataagtctaatgagtttagtgtggtgcacactagttgtctttagctctaggtggtttagcataggcacaaaagaagtatggatcaaaattcatttctaaagtttcggatttagacaaagttgaggggtttcaactttcaaggcgtcggaccccaagtttcaggctcattggaccacagtggattggtccaacgcctccacatagacagtcgagagagtctaagtgtctaaccatcagaccctatg

SEQ ID NO: 1482 - DNA, 665 bp, Zea Mays
cgccgcgctataaaaacctgaggcctctagccccctaccaacatgggcgccccaagatcgcgtcatgcctcgtcaccgagaaccgaggggatcagtgcggaagaagagttgccgccgcgagggaaactggggaacgtcatcgctcgagctgaaacatggggtcagggagcttcgcattctcttgaggagcgtgtcgatggttatcgttgagctttggtggccaagaatcggtggcaattgcttgctgggcttggtgaggacagccctgccaccatccatcgtcgatgggtgtctgtgcggcccaatagctggtcaagaacaggtaccacgggatgaggtgcatgaaggatgctgtgatgagttcgtgagtggtctaggccatcgtctcccagtcaactttggttgctggatcattgtcttcgtatgatgtaattatttaattattttgtagagaactccgttatatattaatgttgtgacattcatttctgtaccatgagtcatcatatgtgtaagatttgatcctaacacacttggtggttatttcgcgcccgtgttttagacccctaaaatacgggtgtgacagctttaataactatctcggctaagatttagtccactaattgatgttagtactttatactctggactagctaaggtattgg

SEQ ID NO: 1483 - DNA, 665 bp, Zea Mays
gcaacacatacatcctaatgtttatattataaaggaaggcatgaagattttaaaaaattggggagtctttacatgttttctcggagatgcttttagctgcgcagacctacgcactcagctcaaccgtgcgcggtgcgccctggttctcggaggcacctgccagtgccaagccaaggtggcggttcaaaagctggatatatttctaggtgcgaaaactactggcaaggaccaaagagaccgtttgcaccagattggatcataaagaacattccagcacgaaaccaaatggcctcttgagaatacctgcctgccatcggctgttttctaggataaggcttccgacttccgagtgggcggttccctgcaccaggaccatcctatctcttctatgcaccggccattccattccacgccaacggcgtgagcgagcgccacctccggacgacatctcccgcgacccggcaccgccgccgccgccgctaaggacagaccagcaggaccacgcattttgaccgtacgaacggaacgacggtcctgcatttcccccagcaagaaaccttcggcgagagggtagcggaaagtgtgtccgcaacgcctcgccgcccgcgcgcgacggttggtcactcatcactcatcagtgagaggcgacagacggcgatcgtgaa

SEQ ID NO: 1484 - DNA, 665 bp, Zea Mays
cggaattccatgagctcgtagttttgtatgatccgtaggaattcagttctttgctccaaaggattttattcgaaaatttgtactggactcgaacgagaagagaagggtccagaaatggcataccaaatcggacagagttggagtgacccgcactttgcgtggcagcccatgtgtgtgcatcttgaattcttggaaccgcccgcagcgggagcaaggagcgtagcgtatgggcaacgcaacggagaggccgttctgttctgatctgccgtcagaaattggtgcccgcagagtaatggagagggtgtgaggtgggcctgggcgggaagccaggaacaagggatcagatcacgcgaaccgtcgtcgccgtcgccgtcgtgggaccacctcctccccaggcgccgaagccggtaagagccggccagctatactgagatgggacgggatgatgagaaagcggtccgtcatgctggctctacctctaccatcgccggcgttggccgaataaattaacgtgtgtttggttgcctgtatttgctggtgcttgcatcgcgggatgcaatgaactgatgtttggttgttgtcaaccaggctctacgagtgcgaggtgtgtgtttgcttatttgcatgcgatgtgaagccaggttcgcacgcaccctgggccaggc

SEQ ID NO: 1485 - DNA, 666 bp, Zea Mays
caccttccgacctatcgattcgaaggcggatctagaatggcagatcactcgtgcaactcttctgccccatcgcaaatcaaaatcccaccgaatcaccccgtgacccctcctcccctcccacaatcccagccacaatccaccaagccccacccacagatcaagtcaagcatctcctaataacctagacatcagcaggcctctcccgtcgacccccttgcttctctccggttgccgtcaacatctttactaggcggaagaatccgatgtcaccatgcgccaaggtcagttgtgcgggtgaggcggcagttgctgtgccagctcaggtgcgccgctgcccaatctcgaccgaaatgctcaacggacatcacatcacgccgtggaagaagggtgtcttttctagacaccagccaccgaccaagcctcatggagtggcctcccattgctgctgaccactgcgctcaccaaggtcaagagggggaagccagtgagaggggctcatcgatagttagaccccgccattggtggaggatagggacagaacattcaaagttagtttagtgaagccaataaccacagagcgaggctgacagagtgagcaataaaattttcaggttttgttaacggtaaatgtttcaattgcttttctcagtaccaccagttagcaaa

SEQ ID NO: 1486 - DNA, 669 bp, Zea Mays
ctccgtaaggacctgttcggggagcgacatcccgggaaaacagtgcaaccatgagggtggtatgggacgcccttggccaagtaattagggaagtcttatgtttggtgctggtttttggtcattgggaaacagagacatctgttatggctcctatatcctcgctcagggatctgggtacgggcattgtcccacgactttttcctgagggcagaggtataggttttgggacatcagatggactttatgcaatggtcatttccaacattcgcatagtgaggaccctagggaaaagccacgtagtgagaccctgctagttcaccttagaagtgatcaatggggagtcacgatcctcgggcagaaagggaatcatggctcatgggtaaagtgtgcaacctctgcagagtgttatgaaactgatatatcacccgtgctcacggttaagagcggccttagtatcctctttgattagagatacagatgacctgagattcaatggttctatttatggttttggtttgatgatgataatgatgttcctcgatgaggaaatgattcacgggttggttattgctaaaacttggctcccactaataataaatacttgaccaactaaaagcaactgcttcaaccttaactccacataaagctagccgacctcagccaaacggg

SEQ ID NO: 1487 - DNA, 670 bp, Zea Mays
gccccgaccggccccggccccgcgcagcaaccgcggccgagccgccctcccctgagcagcccgcccgcgcctgcagccgtcgcgaccgcgcccgaccaaggcaccgagccgccgcgccatttcgtttccccattaatggacttcatgcatcagaaatcctctcctctcctcccattcctctccattgaagccatgagaggaaaccgccgccattaaactgtgtaatggagtcatcgacgttccttctacctttgctctctctcttttcctataaatcgcaggccgcgtctccctgaggctcacagtcctgagctcttcctttctccctgcacgcgagtagccacaccgagcgccgcatttcaccgtcgccggagcctctgcgccttccacgtcgccggcaaggacgtccgtgagttccctggcgcccctccgttgaacccttgcccaagaacacagttcgccatagaacccgcccggcctccttagctcgacgtcgccctacgcagagaaaccgagaggaagagaatgtagaagacaagcgtattgtattctacccctgcagcgttttgttgttttaaatttgtaaatttcagagttcgaatcacgtgtaaattgaatgattgatctcctgtgtatatgatgagctatttcaaatagtgtttatgccatt

SEQ ID NO: 1488 - DNA, 672 bp, Zea Mays
aaaaatgtccaagactcagttacacccgggaatggactgcgggttgatattctttaaatttaggggctcttgtgaaatagtgcgcagcgaaggggtaccggctaatctaagtcgtctgtttcaccgccgacgcactggattagattagaactcccgcgaagcggtacgcggcgtagaccgtccgatctaaaccgacggcttggatttaaaacgttaggatcaccacgcggccgtccatttacaatctaactgtccgcattacatccaagcgaaggggtacgctagacttaatctgggtcgctcgatcccgatctaaccatccaaactcgttttcggggaggattaattgtagccgtctaatgccgatccaatagaccgagcgcgtcttcttcctcgagacccgccgtggccaggatagcggtggcgcgtgcgatattccggcaggccggactatagtgccacccccacctgaggacatgcccgttactacgttactcgcggtggaaggaatggagatcggatggcatcataccagattacgcagccaagaactgacattgcgcagttggcttcggaagtttagcgatctcctcgggatgtggtggttgacgatgttgtccaccgatatgcaccgaggattggctggtgaagtcccgtaactcgcgccagagc

SEQ ID NO: 1489 - DNA, 673 bp, Zea Mays
gccatgctgattacgctgctggtaccgtcgtcaaagctgagaggcgccctaggcccctagagctagctagacgacgacgcggcctaccagcagcagcacggatcggattagctagctagctagccagccagcagagggccgctaaactagctaatcaaagggaggcgtgtagcctgtgccccgaggagattaggtgtggttgtcacaccctcgctctctgcacggcgcgcgggattagttaataaatggcgtctgggattccacaagttggagatggggaaacagggccgggaggtgtctgagataaggatggcactcccctagtttatgtgcccaaagcgcgccaacgccggcgcgctagctagctctcgtatcgtagtactaattaatcaacgcccaccactcgctgctctctctcttttttctttcttgttggtttgttggattaacaaaaaaaaatagtagagactactctaatcaattgccaagtgccaactggtggtgcttgtgtgtgtgtgtggtgctgcgtgcgctgccactgcctgccatgccaaaagggccctctcgtagtcgtcgtagctagctaggctaggcagcatgtgacagggaatcactcatgcactcagcccggggtaatatgtgctctacatactgctgttacacttggcatctc

SEQ ID NO: 1490 - DNA, 673 bp, Zea Mays
ggatccgttcggactacccctgctcctaggatcataaatgccccgcccgcaccttctcgtcgtcaaccaaaccatctggcgtctggcagggagcgcggtgccgagccaagaaaatagagaggggagagagaaggaggtgccgccatcgctgggctctggggaggggcatcgtgggagattatcggacttcatgtggtatgggcgcatcgtttgtaggcgattgggagcaccagggggattggaattcgtcgttggggcctcttcatccctgcagaactaccatgcgccagcgaggctgggcgacgggagctggaagatgaatggtggccctcgatcctgatttggacggatacagctgcgacacgcttaccttgtgccacaaccataagtcttgatccctcggtcccgtcatcatatcggttcgcggtctaatctggactcttgattcttcatcggacgtccgggtagtgtgcgggattcttcattgcgcccgaagtgcaatcgtggccgcatataggtgatcgggcgaccacggtgtgttggtaccccttctgtcgcaccgatttacaaaagagcccctcggctttcacagaatcaactcgtcgttcgtgccctgtgtaaattatttacattcgtgccctgaaaattcataaaacagcccctgaactctgtg

SEQ ID NO: 1491 - DNA, 674 bp, Zea Mays
ccggcgcgtcggagcctggggcggcggtggcgcctggaggctgactgcagttgatgtgggcgctgggcaacgggaacggagggaaggaccggaacaaaccggcggccatgtgaatcgtctagtcccgcacgcacgtagccagcgtcgttctaggctcctcgctggtggtgtccacatgccaccgccgatgaacccggagttgtttgtgtgctcctgagccggctgtgttggagttagtgaattatatacaagattaaatgacttcattcttctctatattatgctcagactgtctgttagaccgagacaagtaacatgatattaattaggggcatgtttgtatgcactaaaacatagtttttaagacgtcacctaggcgtataggcgctcaaaaattctggcgttcaccatcgccatgcagaattagacatggagggagggagggaggatggagataaagatgagggaaagtgttccaacactgatttctcgggagagtaggcgtcgatctgatgggaagcagcggcagtgctggagggagcttgaaggacagagcggtgacgcttgatgagcggtggtgtcatgtcccgacgatagcttggagggagctcgaagggtaggggagcagcactagaggaagatcgaaggggtgggcggcggcgctggagcgtgag

SEQ ID NO: 1492 - DNA, 674 bp, Zea Mays
cgaacttacaaatcaactcattatgagttaatgacctccccattactacatcatatttcactacactatactactagctactactacattatttcactaatactacttttactactaatctatactaacatttaaaaccagtggcatctagccactggccttgttgctgcccctgctgctgcccttgctgccgccaccgccgtcgccgctgccacctttgccggcgccgtcaccgctcttgccgtcgcctccgccaccatcaccatcgcctccgtcgtcgtcgccgtcaccgccgtcaccgctgccgccctcctcggacaagtccgaggagttctcctcgtccgaggagtactccgactcatccgagccctcgagcccggcgcgctcgacggcccggatgtaggtccatacctctgcggtgatcccctgggagtcgtctgagtcatcagacgacaccgggggagaggcaggagtcggtgaaccctcggactcggaggagaactcctcctccgagtactccaagtcgccgaagtcctccgagggaggagtcggctcacgcttgcgtttgtcaccggagtgatgcgaagaactaccacccttcctgttcttgcccatggtggagtggaaggaaagagaagaaagtaaacaacgagcagtggtaagagatgtgataa

SEQ ID NO: 1493 - DNA, 674 bp, Zea Mays
ctaagtctgaaattcagatttgtgggctcaacttttgagccttgtagctctcaaaatatagggttttagccctaggtcaccaaatcaattttgttaacctattataggagaacaactttgatgcagatattctcttgagttgtgacacaaaaattagaggaaaacctgttacaagttgctctgtcagaacagtttcagaaaactaaaactgaacctaaggttaaaacaaggttccagtgaggtgaggtcaagtttgatgcgccatatcttcgaatcccctcggttttgacccaaatgtcctgtataaggattgaagactgttaaatcaagaacaaaccttattaaggaattttgcccggttattcacaagaatcatgagagctagttggtggaagggggacggttcaggcgactgacgaagatgtgccatggtacagtgccccgatggatcagaccgctagctaagctcgccgtcgatgatcaccgtccggattcgtgcatggtatagaaggataacgccgggaaaagggtgaatcgtacgtggcgccatctcctgtgctcggccggagtaattcaccggcggccatcgcgtcaatcctttccgccgcggtgtcctcggcaccgtgattcttcctcactgtaccaattctctacgtgcttggcatgcgcttgtg

SEQ ID NO: 1494 - DNA, 675 bp, Zea Mays
aaaaataattgctctctccatactgcagtatgaggatctacagtttagatttgttcagaaatataaggttttttagatactccactctctatatctcctctgtcttcttttgcaaaaaaatatatatattaaggttccttttaaatttggtgtcatctaaatcagtaaacaataattaaggaaaataacgagcgaactactccctgcatgttaattagtaagggataaggtaatcttttcctaaactctttgtttgtctaaaaggcacttggatactttgtattttgggacgtagagagcagttgactcattatagctagtagctatatataacacctagctggattttaaaattctaaggccttatttggttgcgtatgaatcggagatggttgatgagattaaatattttttctattcaatttcgactagtaagagatttaatcatttttggtcaattcttctaaccgaacatgacaacaaatctcaaggcggacacaccactgaccactgaggctacaatttcacgtaacaaatttgaattttggcatcaagttttgttatcgtactaaatccagcgaacttgaacttggatatccagagatatagggctcagaaacaaatccagcgggtgcacctggatagatccaagaaaacaacaccatgtcatctctt

SEQ ID NO: 1495 - DNA, 675 bp, Zea Mays
ccctcttccttgcagttgcgagttgcgactgcctgccaacgccacaacaaggcaccgagcggacggcggacctcgtcgccgatgcaccgagcgacggacatggacgagaagcacgcaccgtcgcctccgctagctcgtccagaggagcctctccgccgtcacctactggtcggtcagcccgccggcgcccatcctccctccctccctcgcattgctacgctccctctcctccctccatccattctccgatcgtcttggcggaccgcaacacggcggggatcctgggcacgggcgccgcggaccatgacggttcccgttccgctcttccatcctccgtggaggtttcctttccttcgttgacgcgtgtgtttgctggcttgctgctgtttcccttctctctctgcgcaaaaaaaaaaaaaaaatgcgccggcaagtcgtccgcttgcatcatctcaagaaatgtacaaactgaggtgtccctttcttccctgcttttctttattactatttttttctccaatttcaatccaagagagagagagagagagagagagagatcagacgcgttgttgggtgggtggctaaacttgaaccatggaacagcgcggctgacagactactggactaataactgatatgcatgcagcacccgccatcggtttatgtatgtacccg

SEQ ID NO: 1496 - DNA, 677 bp, Zea Mays
tttggagccataaaatgtgtagtcacatattttccctccatcctagcatttgggaaattgtagaaaatgggatgcattttgatagtactgagaaccctatgtttatcaatgaacaaattcataaaaatgcccaagccaccactgttttgctagcatctctatgcatggatgaatataacaaggtcagaggcttggacaacaccaaacagatatgggacatcctcaaaatttctcacaagggaaatgatgccaccatgatcactaaaatggaactggtggaatgtgagctggggagattcgcgatgataaggggagaagagccaacacagacatacaacaggctcaaagcccttgtcaacaaaattcgaagctacgggagcacaagatggacagatcatgatgttgtccgactcatgctcaggtcatttatagttatcactacaggaaacacataaattttcatggaccgaattattttcgttggccggcccacgaaaatacggatgttattttcgtcggcctcgtgaccgacgaaaatgtgtcgtattttcgtgggccggggaatattttgtgggcaggcccacgagaatagggaagttattttcgtcggcctctggaccaacgacaatgtggcgtagcattgtcgacctcaacccggccgacgaaaataagtcatt

SEQ ID NO: 1497 - DNA, 679 bp, Zea Mays
aattccctttcaagtgtgcatatcagactgaagcttttttaggatgtctgagacaatcgcagtttagtatgcagtgaatcctggactatatatgtgaaatgatgaaaaaatgttgattatcattggaatctattttctaaaacgaagcaactggatacttgaaagtttatcgttttcatctgctagtttgtatatatctacatgtttctgcatgttgaatgacatatatctgttagactggatatatggatgtgcatatcagattgaagtttttttcttcttctaggatatataactacattatgtgtagcgttgctttgctccctgctatgaagctatgaatgtgtgcgagcttacatatatcatcttcccctttgttttcttttatttcctcggaagctaaaaatttatttcctcgaaagctatggatgtgtgcgagctgccaatctctgagtttcggactggtgttgagaaggatggcatacctgagtgctccgttgagcgcagggggagggggtaggcgttgccgtgggagcgcgtccgacacaggacaccgcgcgctgcggcggcgggcgcgggagtcagagcgacggaaacagcagtggggttcaaggaggggttgtgcgcggatgggatagcggaaggaggaagagatagtccatcggaagatcgggtgaga

SEQ ID NO: 1498 - DNA, 679 bp, Zea Mays
ctccgaatttagtgactctcaaacctacgatctcgttacgatgcatagaataatattatgcagtatgtctttatgtttggtgtgatgttaatttctcccgtaccatgtttgcttgtattgttgcgaatagacgggcaagtgactgaggacctagaggctcagtaggtggatactactgagcaggagctcgttgaaggcaagttgtgcccttgatcacttctatttacccaataatgttccagttaatcattatgatctacataggttaattttgatgcgacccaatatgtcaccctagtttgactatctttataccttgtttaccactgaacttttgggtagtacttaatattgctttatgtggttttgggtattaagatacacattattcatgatcatctttttattatcaatttgttatttactgattcatgacaagatcattatgttaattggaacatggagaaccacccgggaaaatagtgctcccacaagggtgatatgggacgcccttggctgactaatgaggaaagctactggatgactaccttatctaaaaggggcaaggacagtaggggagtggtctgtgtagggaggttcttgggttgattttgctacaatggcggtcagacgggggattcctgcattgcgctccctagaaactgtagcgggttttctg

SEQ ID NO: 1499 - DNA, 680 bp, Zea Mays
cggcgcggccgggtcggaccggaacgaaagggccaaaggggtagcgacgctacgtcgctactccgccgtacgtccgcgccaccgcctgcgcaggaaggaaggaagggaacccggccgtccgtccggccgggcactagggtggtgcctgcctgtggcgttgccgcttcgggttggctcgtgctccgtgcttgcaattccagtgccgtactgccgtccatggatggacggacgtcggcagaaaaaggcgaagatggaccagagcggaaaaggagccgagctccagcagcgagcagcgtcgtccgtcccccacaggccacgccaaaggcaaccctgctggctcgcatcgctttcctagccgccctaggcgggggggtcgcctgtgtctttcgggcaggtgctgtgccttggcttgtcgccccattccctcaccgccagcgcccagcagccagcacctcgtttgggttttggatgcagcactgcacgattccctgacagctcggaaagggtacagagcctgcggttggggataagaacagtggtgagccaaaaaggttgggtagctcgttcaaccagcggaaccagtattttttatattagttcatattgttagttaacgagcctatcaagtcaaagctgtcgagcttaaatttatattaatctcatattgtactatgtctcgg

SEQ ID NO: 1500 - DNA, 682 bp, Zea Mays
accactttttggaaggggagctcgccggaggggtggagatgcctcgtcgacggcactacctccaagacctgcagagcgagcgagagagagagagagagagagagagagagagagagagagagagagagagagaataggtgaggacggagatgatccgtgcggctagcggagggacaactctagtagtctagtgagtctccatgtggaaaaaaaggacagtcgaagcagggagggttgcgctgccagagtaaggacaaggagaggggaggagcggtgctgtaagctgtggcctgtggacggcgcagacctcgccgtcggatccacgaatcgcgtcaggccgataagggatcctatcctgccttgggaagaggcgatgcgcgcgtagactcgatcacccggaaacggaggcagctcgccggagagaagcggtttttcgccagaggaggcgatgaggctcccggcgtcttggaggcggcgcggtgcagcctcgaaacgaggaaacgggaggcgttgtgcccgtgtgttgatcggcggacggagtctggccagctgaagctgctgctgcagactctgcaagtcctcgagtggtggatgctgcggcctctgggcgggagcaggtagtagacgtagacgatggcgccggcggtggttcgcgattggatttggcctcttgcggtcttgg

SEQ ID NO: 1501 - DNA, 682 bp, Zea Mays
gcgtaaaggagatggcccatcagcaggtctcgcgcctgcaacaatgcaaaaaggatctatatatcctacctttgaacaagaacacgccaacttccattcgtgcgctagctacgtcgtagtcgtagagcaacggcgtacgtacgttgccgccggatctgccaggctgctacttgctagggcatccccctttctctctctgtctctcatggaaatatggaatgccaattggcaactgccaagcgcatgagacgtgacatctctgctgcatgcggtgcagataggattgcactcgcccctagtttcctagttggcgccatcatccaagtcgcgtggtccctgacgtacgccgcggctggtcacgccggcgtgctcgtacaagctggtcatcgctacggaattgaaactcctcgcggtcgatggcgtcatatggaacagggacgccgaaatgtacgcctcaccgatcgaacgagcccggaccagtcggtgggttgtagcctgtagcgagcgttggctggctgctccggcctcactcggtcgagctaggcactgacacgcaggcaggccagctaaagtggccaacgcaacctgacagtttttccccatcctatgtatatcaaccgtacgtgcaagcggaacggtaggtcgcgggtctcgtcgatctctgcggttagctcgcacgtcg

SEQ ID NO: 1502 - DNA, 683 bp, Zea Mays
cctaggtcaccacatcaaatttgtagacctatcaaaggagaacaactttgcttaagagtgtaagcatggttgttatgaagaaatggaagaaaaactcacccaaagttgggctgacaggctgttgaagtctgaatttcagactgacagtgtaaccacagaaactttgggtacaaattcaaaaatgacccagtaggaatttggctatagctgctgtggcaaaattatagctgaatctttggtctataactttgctgcagaactctaggtatgttgccacaaaaaattaagagaaatttaaccctaaacttgggctatcaggccaactgaatgaaggacgccatggtacagtatctgagaggatcaggatgccagctcaactcgccgccgacgatccccgccgctattcgtgccgccgccttcctgattcgtgcccggtgaggaacggataacgccggggatggataactcgtacgtggcgccatctcccgagtccagccgaagttcttcaccggcggccaccgtgaccagtaaattttgccgcggtggcactcatgccgtgatctccctcactgtgtctcctaccgacgtggtcgacatgcgctcgcgatgcaatccgtggccatcaggtgatcgctggaccgccgcggctataaatagccctatgattccctgcgaggcacgac

SEQ ID NO: 1503 - DNA, 684 bp, Zea Mays
ttttattattctttgggctgcggccacaattttccagaaggctagggggtcacatgtcaatttcaggacctaactgtgctaatctttctatacccggggatggcgggtcaattaccagataccccagggtctcattaataaaagtggtcggctgaagaggtattttgaagtctcggccgcacgattagatcagagtggcccagattagctcgagtcttgagtgaaccgttacgcacatcagctattgatccagagatctgcgtcacagatttgatgaagttttgttttcctatggatcgtccgatcaccaccccacggccctgatttatcctccgaggaggtatctctacttcttatcataaccgccagccctgagatggacggtgcagagggcatcttctacaaccgtgccaggacgcacaaccgagcacaatggtgccacagctagcgcggcggcgcacagctcccgcgacggcgaccatggtcagaatcccgccatccggcgaactagtccacaaattcatcgtaaacgcgctatagggagggttccgatggtgaacatgacagagaaacgacacataggcggagggcatagagaggggggggtgtccttgctgcaaggcgggaccgaggcggggctattctccggcgagggatctatggctaacgagggctctattccat

SEQ ID NO: 1504 - DNA, 685 bp, Zea Mays
caaacaccccaaagtagtaaagcagagggttttccagtttttgttgaaaaaaaatgtatggttatacaattcaaattcaatacggtccatactagaaccaattcaaatccaagaccacacatcctttctcattgaaataaatgccaaaccttaatggtgagagggcggtcgaaactggaaaaggccgaggcctggccatggaaatgacaattctttaagtactagtaaacagacaaaaaaattattggaaatttgtaaacctctcgagtttgcaccttccagggtttgccaatctttgaggtctctgtctgaactagggagaagacctctagctatgcaagtcgcttaaaagccattgccaacatactctctggatcaggtccgtttccactttccagaggaaaaacaagggtcctccaagattgggaacctgaatccttgcttggcctagttgttgattgggtagcagcaggccagcagctcgctggtgcgtactagaccgacttggagtgggagcccagaactacttggatgaggtgggccgtgggcggacacgtgaggcggcccagggcccgaggtgcgcacgcccgggtacgctcacaagacccgttattaaacagaactagtgtataacgcgcgccctgcgcacgattttttatggtcttattagaatgtacatataaag

SEQ ID NO: 1505 - DNA, 685 bp, Zea Mays
atttgagtcttagatgcgcattttgaaatagggaaaactgttgcaggggttagcttaaaattaaccgtagacgataaaaagtagcatgtaaaattggacctttcttttaccttcgatgagtaggagcgagagagcaatagagcacgcagcagaggcgaccttgcgatggcggcaagcctccagcaagcgcgagcatgacgtgggacctcccacatggcgaggacggtggcccgaacagtgcgacagcaggagttttgacgaggtactgcgcagcacggcggcgagcaacagtgggggaaacagccggcggcgtgggcgcgcaggcaaaattgtgcagcagagcagcaactccggcgatgtcgtggctttggcaagaggttccggcgagctgacggagttgggtgcatggagttgagcaggggaggagggtttgacgaactgagcagggagcagctgagtagggctcttagcaccgagtcacaagggaaggttcagggtgcagatcaccggcaaggtgatggccagagtagaagcacgacagtaatttcgctagggtgtgtaggagatagcgagcagaggagcgaaagtggttgcgagctgcgtgatctagaacgattccgtgagcactgtagcagctagaagaaatggagtgagagaaggggaagaagttgctggtactttatag

SEQ ID NO: 1506 - DNA, 688 bp, Zea Mays
gggaaatcaagtgaaaccgagagtccaaaaaagaggtttctcgggctctctttagttctcccctctcccacgaaaataagaggcctcatcctaatggatgcttcggggcgatttggatggtgacctctgctttattacttgggatgacaaactgattccaaagaaggtcgatcctatggactactgcaatgaggtcacacataatggaccatgctgttacactagagatgcggtgtcgtgtttgctatttttaggcttcagaagaagagaaaactccttcagattaccagaagacaggagagaaatgtttgagttgcttctgcatagattaagaacgaagtcgatcatggaggcaatggatgcactaccgagtatctttggagcttgccggttgaagaacaggccccactgcaaatcaacatctatgagcttagttttttagatatttcttttgtctcataggttaatccacaatcggtggcatgttgttgtttgttacttagaatttgagtcctctttgtgtaatgttctggagatatatgatcacaacatgaatggagatatatgatcacaacatgaatgaacttgaggaaagtgattaggaggcaatagaaggtattatatctaacaatggttattttactttagctggattgtttaggacactaaataatttcaagtgtatttg

SEQ ID NO: 1507 - DNA, 690 bp, Zea Mays
cttgcctggtgtccctgaattttaaatgtacaaactcaaaggattacatatatactcatttattcatctctcattttagtaagattgatacaaatcaagtaccagcaacataggaaaaaattcactcgatctcctgtatgtatacaccataaacatgtgtagatctagctagcaacgactataccaaagctagcttgcatgtcatttttgtttatgcgtatatatatgagagacagtaagaaggtacacggtgagctaattgtggtggccgatgccggggctcggaaccgatccctcgacaacctccatgattatccgcctactacggttgttagccatggcgatctcggccttgtctttgcctttggacagcacaagagtcgttgacgaagagatcgacgatgaagaggaacgagtgctctccttctcctcggcatgcatcatcgtcgtccttgcgtgcacgagagacagtcctgatgccaacagaagcaaggataggacgacgatcactacggcagcgcgtgatgaggtggccatatatctatatggtttaggtcacaggttgaaatgcgattattggtattcaggctaaatggtagaggctacagcaagaagagatcagcctactagctgttgattgcttgtgatcagagacgatgagcttgctgaatatgaactgctatatatgag

SEQ ID NO: 1508 - DNA, 693 bp, Zea Mays
aggcaacatgtcagtcagtgaatatcgtgacaaatttattcagctatcaaggtagctccatatgaggttgctgatgatgaaaggaagcaggagcatttcatggagggacttgttggaccacttcagtatcagctggttgctcacacctttccatcattctagaggcttctggataaggctttagttattgaaaacaaacgtgttcagctgggtgagatgaagaggaaggctatcacccaggggtaggcgagcagtagcatccgtcctcgctatgttctagcctacggtacaccagctcatcctggaggagggcaacgaccagctcagtatacaccacatgcgactccacagactccacagactcgttaggctgctcccactggcaccctggcgagacctgtaggactaaatacagtcaccacttgcttcaagtgtggtgaggttgggcactacaccaacgcttgtccaaagaggatcaccaacacaccagctcgaagcaatgtccaaggcaagcaacagactccagcatctggcaagggattcagtattgccagggtcaaccaagtcagtgctgatgctactgctgatggagctgatatcgctattggtacgctttacattaattcaatccttgcagccatattatttgattctgcagctaggcattcgtttatttctacttgctatgtcaac

SEQ ID NO: 1509 - DNA, 693 bp, Zea Mays
cccccaaccctgaccggcggcgaccccaaacacggcggcgccataactggtgagaacaaaaactctaatccctagcccaagctttgctgcaaacagcgctacactctacgacaatgatggtgaaccgaggggtaggattctcaccaaaggtaatggcgtgggcgcctcggtccacgctgctaggcgggtcacggcggagcgcgtcgacggcaagcaattgcctgcacccggcttgatcccccagcttggaggaaccgcgcccacacctccccgagtcctggcgaagcaccctgatccggaattggggtccccgattgcaacccgaggccgatacggcgacaggttcacgattccgcggagcgacgggtccgcggcggtggtttgacgacggcggggattgccacaccccgaggaccaccacgagttgccgtgacgcgcccgagacccgagcgacagcaacgacgacgtcccgcctccgagaaaatcactacggcagcgtgaggtccgtagtttgagcttcgccgcggattcgtaatggcgctgctcgatttcgagggtggttagggtggaaaacggtgacgggtccctacggcgcgatacttatggtcgggtggtggggtgcttgcccggtcgtcgggccgccacgggaggcgcgaaacgcgggcggacgttgagctcgcggattcggtcgag

SEQ ID NO: 1510 - DNA, 695 bp, Zea Mays
gagaaaggtcgttgttgttggtgaatgtggtgcggattatgataaacttcagttctatctggcagatgtacaagggaagtatacaatattgttctcatatgcaaacacattggcatttaatctattcatttgagtgatttattttgatttagatactttgagaaacaatttgagttggctgaagtagtaaaactgccaatgtttcttcacatgtgtgctgctggcgaagacttctatgaaatctgtattcttcacacgaaatttgcataggtaccatataatctgtattccataggtaatattccttaatgatgccctgcacgatacttggtggcttttttggtacaaaaagattatattattcaatacagtgtgtatagcagggtgagtcataatgaatatgggtaattccacttcagctaaaaacatacattttactctgtgcaggtaaaaaggaaaacttgttgctgccgggattctccagcaaggtgggcggtggaggtgatatgccattgggttaaaggagttatccacagcagttgttgttcatgtctcgctattgtgttgcttgcttttgtttgtgtcagtggaagaagagttttgtaggtgccattgaatagttaggactattttcagttatataaaatcaaagaaaattgcaagttaattcacatgtatgtaataaagcttcttag

SEQ ID NO: 1511 - DNA, 695 bp, Zea Mays
atattattcccccactagaagcttgaatttgtatacttgactcaatggagaaattcgtattcaaaaattcaaatttaaattcaaaatagttaagaatgaaagaaaacaaaaaaaagagaagaggggggaagttagttgggcctcggcattcaattttggcccatctcctctttgcttcccactgcgcggctccttcccactcccgcgcaagcccagtccaggtgccaggcgccgacctgcgaggtccacgcgtaagtcggccgcgcccgctcattcaagtcacttacgcgtgggttcacgtgttcagatccttcctcaacgaacggtccgaactcgacgggggtgatcccgccattgttgcgttttcttctccgctcggttgactgcttctacagataaaaagccaatgtggccgaagtctcgttcgcccatccactattccgccctttcccctacctcgttgagcacaatcgccgtgagccgaggaagtcgtaacccgccgctgcaccaaattcgtgtgccaccgtcgtccgtagagctcggcgctaaattggagccttgcgggaggccaggaggcttcgcccgggtctccggttcgcgttggtggcgattactgggcaggagggtgaccggagcgcgcctaatttgtctccgccgtcgcgcattcgcgcttcgccgtgaccgaccgaaacgac

SEQ ID NO: 1512 - DNA, 698 bp, Zea Mays
agttctgggtgagtccgtcgatccacccatttgtcgggttcattattcgtctgattagttatctgcaccgtttcgtcctgagccaccacacacgttttgattttgtcagagtttatgttaaagacaccaaaaagcagaaaacattgcgtgccgatcaattggacgcaatggaaagaaaaaaaagactggtgaaaagattcaacttcgcgaagaattaaggcggcaagctcttgctttggcttatgtatgccatgctgccatgcacttcaaataaggctgtttatttataaagaggcagtggtggtacgatatgtttttttttggttgatttatacagtaagtacccaatgttttgaagtcattgcattgcattgggcgcccgatgttctagtgctttaacgaaagaaatgcaggcaagtttgcccacgcttcagtgccaccgcttccatccggcaacaggcaacaggcaacagccagtggggggtgttggtcgatctctgtggccgtccgctgatgctggtagttgactgcctccatccgcgtgacgacggataagatgacggtgcctaggcaagatagacgagctgaaacgctggcccaacccaaaatcgtatgggtagtatgctgcgtcttcttccagaggcggtagctagctagatatatgagcgagcacgccacggctgcgcggtacgtgttag

SEQ ID NO: 1513 - DNA, 698 bp, Zea Mays
ggaaaatatggatgaaaatcacagcagggataactattctatttactacgtacattagaggtagtctaagaaaaatgtcttctacctcacaccaggacaacaggtagaaggaaacatcaggaataaattcgatgacatcgagcttcggcgaacgagggtcagcaacggcgttcggcgtgggatcgacgcttggcgcggagacggcgaaggagcacaacagcacgggtacaacgacaacgtcgagcgagcacgacaatcggcaatcgactgacgagcagcaggagggcacgagctttagcgtggagaagcttggcgaggaggcggtatgctttggctgcgtccgataaccgcgacgaactgcatcgggagacagtgttcagacagagctgcgacagcgaggcgaggcaaagcgcagctcacagtgtggcgaggcggcgagcgcggaggtgagcacaacgtcgcgggctgtgggttttataggccagcgaggaggaggtagagcgcttgggagagagcaaacgggcggtcggcgtcttcaaacgcccatcaacggcgtcggctcatggaggatagtaatggggagggaaaaacggacgcattgaatcaccaataacgcagaggaagacgaacggctgggcacgggcgtttctgtcgcgggcttcgggcgaggtcgcggctactgcgcagcgcgggtcggg

SEQ ID NO: 1514 - DNA, 699 bp, Zea Mays
ggaaatcgtcgtgtcaccatgtacctgccccgcgtgacacgtgttgtggagatgggaccgtaccgtccaaattccaggcatttgcattgattctctcttttctgaaggcctgtatgcgcgtgaggtgggcaggaaacgccatttctcggagatctagctttgaaacggtgagcgaggaggaccgggccgcgagactcgatccagcattcggttcgagccatgacgccgcgggcacgactaaacgacgacctgcgatccaggttggttggtgtcgcgaccgggatcgaggttgatcgaccggccggcgacggcgacgccgatgccgacgtcgacgcgtgcctccgcactgtcgtaccgcacgcacgctgggtcgtaccgcactgtcgctacagcgctaggccggatcagtgatgaggtctcttccgtcggcagcatccacaaaattcacgttcataacaatgttgttagaaatttaaaagtatctaatatacttcctccttttatttttagttatcgctggatagttcaattttgcactatccagcgacaactaaaacgaaacggatggagtatataagaagcctagcatggttgggagaatcatcttagtccaatgacagatctatgatttatggcaagaagagcctcaagctatgtcgtacaccgttttttatgagatcgaaatagaatccatgcacg

SEQ ID NO: 1515 - DNA, 699 bp, Zea Mays
cgaggtccaatttccttacatttacaatcaccaaagtaggaatcttgttgagcgcataatagtaaacttcttctttttctttgctcgtgggttttgaactttgttgggcttactttcgctttttccctttagacacatacgcaactcactcttcctcttgatagtctttattcatcttgtacctacttgcaccacactttggactgctcttcaagtcttcataatcatcacctctataaaggccatttctctttcagatcatcaatcacgaaaatcaattagtcaaatgggtctaggtccatttttcttacatttacaatcaccaaagtaggaatctttttcagcgcataatagtaaacttcttatttttctttactcgtgggttttgaactttgttgggtcttctgttgggcttactttcgcttcttccctttagacacatatgcaacacactcttcctcttgatagtctttattcatcttgtgcctacttgcaccacactttgaactgctcttcaagtcttcataatcatcacctctataaaggcggcacccaaaccgctcacgagcatgcaccaggtatagatgcccaaacaggccgctcgtcccagtccggcacaagcctgctgaggcacagcatgatttcggaattcggacaagcccggcctgacctggtttagatgtgagttgtgtcatgccg

SEQ ID NO: 1516 - DNA, 699 bp, Zea Mays
aggaccttggtgtggtcgccgctgtattcgtgattgatgcaactcaatagggtgcgtcagtttcgactggttcctgcttgcatcctggtactgaactactgacgagaaactggcgttttggcaagcagtaaacagtctcatgtttcctcgaccagcagcctagcctgcagttttgctcggcgcggacgctgcgtccggattgcgacgcgtaactgacctgtgcccagcaaagatcttgagcagcaggatattttctggctcttcagcggctggcagtgcgccatgcatgccgccatctagtggagtttttttttttcccacgagaggtctgtgtagcgaaagcaacgtggaatatgttttcagcgatgcagctgtgattgttctcggtggacaggaaggagcaggcgactgggatgcccgagtggaattggagacgggtttggtttcatggggttgtgctttgcagccggtgacgtacgtttctgcagcgctgcccatgcatcggaagggatcatgacggcaggaccaggtgctttctgaacgtcgatgactcgatggtggtggctgaaccgagttggcgagtaccattcggggtttctgaatagcaatgtgagcagaaaaattctgcttgttctggaaaacaagaacatgtggactgaacggatagaaattctgctgtggcaacggaactggtgggcg

SEQ ID NO: 1517 - DNA, 700 bp, Zea Mays
gtttgattgaattgttattttaataatacacaacaaaacaagtaatcaattatttagcgtgaacgatatagcgaaatgattttactaaagcgcgcaaacagcgatttacgcgaacgacgacgagcacggacagcatgcgaacgacgcatgacgacacgtgcgacatcccgtgaattgcgcgtaaatcagatgtgctacgcgcggcgcgaatcatgcgacagcgatggagttttgcatatggtttggacgagaggccttaccacaggcggacggcgacgaacgtcatgggctcgacggacgatggcgagatgcgacaacaacgacgaggcgaggcatgacatgacgggaacgtgcagggcggcgctcagcgaagtgggtgacgaacgcgacgaagctctatcccacggcgcgggctgcaggggaggcgcacgctactggacgggttgctgggtcggggattcggtcgctcacatgggttggcgcggaggctgcaccggccggctcggacaggggctcgcgcgtgtagagggcaggggtagctagccggaccgcgctgccgaccgccgtgccgggctgccggatgccgcggtcgtcacctggctggcctcggccgtgcctggccacgccggctaggcggttgggtgccgagttcttgcgtcgcgggtgggagagatggttgaaggagaggatgggggcgcac

SEQ ID NO: 1518 - DNA, 703 bp, Zea Mays
tttttcttggattatgccttcaaaaatattaatgaataaataaatattggcaggatataaaattcatgtaaatttatactatgcatcatgctagagttttgaatgtacatctagttttatttgagatttaaactcagattttaaagccaaaaaatcagatttgaaaatagcaattcaaaaataggaaaagaaaaagggagaaatgcttgctttgctggaatccttcacaccgccggcccaaccaccaccgtggcccacttcaagccgcataaaccagttgcatccacgcgcgcgatcgatctactaacgggcgggaccctctcgtcagcctcccccccgtcatggcattgtatctcttcctcctcgtcttccactcgccgaagtgaacgcctagatccatgtcgacatctccagcagccgcccatgccgaccgattcgcccacgtctccaacctataaaagcatggcctcgtgacctccttcggctatgggctaaagctcgaaccaccctcgcacatcgttgacggaatcatggagggtggagcatcgttgcggggggggggggggggggggggggggggtttggggggtggaaggaatcaagccgacgtcgatgaaccacatgtacaccgtcgtccaggtcacgccgtatggcaccgagtgttcgccctgatgcaccgcgtgcgcccgtggcatcatttagc

SEQ ID NO: 1519 - DNA, 704 bp, Zea Mays
aatatgttattatatgtgattaattctgttaaatatatgtatttatataccgttctactgttggttcgggccagtgcccggctcggtccgttgaggcccaccgggccaacgtgccggcccgacacgatttttccccgtgcgtgccgggtttgggcatgtccctaggcacgtgggccagcccgacccggcccgaagcatcaacgggccgtgcctggcccgaccctattcttaccgggccgaaacgggttcgggccgggtccgtgccgggtggcccgtttggacatctatacttataattgcctcacctggcctcgccctgcacgcgcggcggggtgcccgcccagctgcagactgcagagccctgccgcccggccagactccggcgttgcccagcgagcgccgcccctcccctgcgagaaattcttcagcgctgcctgcgtgcgtgcatttaaaggagaaacgaagaaaccgtcaccagtggaccccccacatgcacgacatgcagatgtagagctgctgcatgcggtccattccaggcacctcaaaccccatgcttgcggttagatggaaaaagaaattacccctgacccacgcacatgcacattgcagggcatgcaccatgcttcccttgcatgaggcatgcggccagccaatacaattgtgctcacagcaaggagtttatgcgcctacgatcttgtggtctt

SEQ ID NO: 1520 - DNA, 704 bp, Zea Mays
ctcgatcggccgtctttgtatatattcatattgacaggtagctttaaagcctccacaatttgttgtatagaaacggctcatgttactcaatcgtctattatctgtcgtgattgtgattcggtttgcgtggaccaaataataacggaacacattgttctgtactataagagctagtttgggaaccctattattatacggggttttcatttttccttgagaaattagtttagaaaaataagaatctcttagaaaatggagctcctaaacaggcccgggccaaaggcatgtgcagtcagttcgcccgaacagggcccatgaaattatgggggcgcacaaaatttttcctctagtagactatctagtacatatccgtctgctagttgcgttcaagcgtgtgacaactgacaacgtgactgtgtgagtccctcactccctctcaaatcctgtcgttcccaattcgctctggtcccctgctaggctgctcctcctaattctcaatcacaattctcctgacatcaagcctgcaaaatcgtcgggcggctgctgcttgccggcccctacctaaatgcccctacgacctaatttgcactacacagcaccaagaagtacaacactaaggcactcatcaaggcgagagaagcaggtaattgctcaagatcatctattcataattcatctaatgtgtgtaggagtttagctctagg

SEQ ID NO: 1521 - DNA, 704 bp, Zea Mays
cttatattgaagtctgacacgttcaccaccctcacacacttcttcgcctgggtctccacccagtttcaccgcctggtccgtgccctgcagtgtgacaacggccgcgagttcgacaatcacgcctcccgctctttctttctcactcatggcgtccagttgcgtctctcgtgcacctctgcccaaaacggtcgggccgaacgcattattcgcaccaccaccaatatgatccgctgccttctcttccaggcgtctctccctgccagctactgggcagaggccctgcacaccgccacccaccttatcaaccgtcttccctccaaggcggtgagccaccctactccctacttcgcactgtatggcacagcccccacctacgaccaccttcgcgtgttcggctgtgcctgctaccctaacacttctactactgtccctcataagctttctcctcgctccacccgctgcctcttccttggctactcttctgaccacaaggggtatcggtgtctggacctcgcctcccaccgcatcatcatctctcgtcacgtcgtcttcgacgaggatgtgtttccccttgttggcacctccccacccacggatctcgactccctcctcgagttctgatccggtctccccctcctcccaggcgccccgcctggcgccgttacccgcaccccgtgcgacctcgacgcagcggctcgcgccac

SEQ ID NO: 1522 - DNA, 705 bp, Zea Mays
cgacgctgcaaccaccactgcggccctgcctaactgcacgaataaaaaaaactccggcatctctcaatcctccgccacctcagccgatctcgatgcccaccactgcgcagcccacacgctcaccatcgccgtcgcgtcgtgcctcgcctcacctcacagccgtgcggcctggtcgtcgttgagcagggagccagcgctaagctcgttgtgcccggactcgacctcgccaccatcaccgcctcgcccggagcagccttggcccaccgcgtcgcgccattgcctcgtccgtcgttgccatgactgcgatccattttcgagcttcgaggaatcgacagtcaagcttcggcgaccaagagattgaactcttcgagttctacgagaatgaagaccctgagcagcagcagcttggtgaaggcaagtgtcctctgacccattatgtcctattcacttataattgactttcccgcagtatttaattgaaatctaaggattgactagctttatactttaccttatccttgatgaccttttgggtgattatggttagcattttgctattgccttaatttaatcaatgaacatgatgtgactatttatgatacgatactgttatcctgattatattgttgatctggtgatactctagggggctcaggctgtttcctgagtacctctccgtaaggaccagttcgttgagagaccacc

SEQ ID NO: 1523 - DNA, 706 bp, Zea Mays
cccgtgacgcttcaggggcgcgagtggggggatctgcctttaaaaaagggtcgatctcccgagcaatagacatgcctcgctcttcttgcgaccaccgcgccctttcgccttccggtcctccagatggggtgcgccggtgttctctggagggatcctcgtcaaggtcgtctcttccggtgacttcaccatcgaagagcgcgcactcatggtggtgtcgccgatcttgtcttcttgctgctgttggaggggtgcaaccccatgggagttggcatccttccaccatcattcggcttcaaggattttcataacgcacctctggctggtggtcatccacaaggaagcagcttctccctccaccgcaaagtcaaccgaagtctcggcgtggtgctcaatgatctgcaccatcatgcttgggcaagagatcaggcaaaaacctaatgcctaggcccctacctggcgcgccaaatgtcagagagtaaatcttcggccgggtggcagagtgcacccgccctaaatcctgagatgaggaggggcttaggcgttttgcttgatcgttggaatgaatgggaagaactcgagaacacacaaggatttagagtggttcgggccgccggagcgtaataccctactccactgtgagatgtattgcttgtgagcttgtatgagtttgcgagtctaaggtgtgacctgagattgcgtgtgtgtg

SEQ ID NO: 1524 - DNA, 707 bp, Zea Mays
ggaaaatgcctaggaggaaaaaaagaaagggcgtgggtggtctccagaggcgtcttcctcctgttcatcctcggcccgcgccgctgtgtccatggtccatgggccgcctccctcgcgctcccccgcacagtacggtcctttgggaggtcgccttcggtcgtggcccagggtgtcacgcgcgacgagtcggcgcgtggtggagggtcgtcttctgctgcttctggctggattcctgggctattcaacagagaaagagggagcaaaaaatggtggtccaaggaagcaagctaatccgaaagatagcaagtgaagcgtttggccgggcgtttgggtggtgcccgagagacaggcgaatttctgggtgatcaatgctggaatatggattctggagttggagatagccttttcttttggttgatgtcttgaatcagggccttttgttttgcgcctgtctgtcgtgatctggttgtaaataagaaagtcttatgctactagtcgcaggtcgaactttatcttctatcctaggccctctacttatctaggttgatagtgtaaggtgtctagatagggatctgacctagttgctatctgtcggatcgtttgatcacgatggatgtcgttgttctaaactttcgtatttcctaatgaaatagtgggcttcgccccttcgtcaaaaaaacatatataagataagatgttgttggaga

SEQ ID NO: 1525 - DNA, 707 bp, Zea Mays
gcccaatctgtgtgcgcagtggccatggaccccatggtcctagtgctactgcatgcaacagtggcgcgtcctcctgtcctgaccgcagtccagttcgacacgggcgccgtctgccatgggtgtctatctgccggcagccttgtgtgctcgatcgactcgcatcctgtatcaggcagggaggcagaggcaggcagcccggcacaggagtgtacctttgcctcttctgggattcggggtatcagagaatgggagggtacattggtcgggagagtcacgagctgcctagcctactgtactctttattttatttactcgccagaattaccgcaaggcattattgtgtttccggtgatggtttgtgatagttttttttttcgcaacagtggcggcgctcccactcgcagcggtggcggcgaccgcaggcaaggagggctcaagctgcggcagtgccctacggcaaaggcgagggagagcacgtgctgcatttcccactgctcttcactctcctctccagctctcccgcaacaccaagaagcaacagccagcgacaatcagcaatggccatgtctcagcaagagaaccgaatatgcatgctctcttatcttcttactactgttagctaaggtcccgtcgttctattcctgtgttgataatatatgtttgtaaggttgtctccaccaacgtgctctaaatttcatcagctaaag

SEQ ID NO: 1526 - DNA, 708 bp, Zea Mays
ccttccttctctattttcaaaccctaatttcaatttggcgttcaatccacatctcaaatagttattatatttttattaatattattgttactattattaaatgcacaaacaaccaaaattcctacatgatgcatagagtattttattaagtaattgtttacttaaatatggttattaccatgttcttttatgtagatgacaaatcatatactgacatcaactcttttcctattattttcaaactgggtattacaggtttctcggatgtggtaaaacagatatggtctaccgaaatggatggcaatacccctatggatagatggcaagcaaagattcgaaaattacgccaatatcttacgaggtgggcaaagcatacaaatgggattaataagaaggaaaagaaaagtttgttgaacaaccttgatgagctagacagaatagcagagtcaacaattttgacgcagcaagaacttgatttgaaatgttgtgttcataataggcttgccaatttgcttagggaggaagaaataaaatggtaccaaagggctaaggtgtaggatttgttacaaggtgactgtaatacaaaatatttttagatggttgctaatggaaagtttagaaagactaggattttccagttgaaagacaggaatcaagttattacggatgagtttgaactaaaacaatacattaccacgtactacaaaa

SEQ ID NO: 1527 - DNA, 708 bp, Zea Mays
gtagcaactgcttttattcaaattactcacattacattatcctgcattccaatgtactacagaattacaactacctttcaaataggttcgcaagtgctcagcaatcttgactgttaaatagattttagtgtcttagaatgctctcaaaactctaaatgccaataactgtatggagatctctgaatcatttcacacatacacttctgtccttccaacttctcttgacaacggtcaagtatccttgattgtacatggttgagcttgatgttgtattttcctccttggtggttcttaccagatgtgttgcacaaggttgaatccccaacacaaatgataaactgacacttcccctctttatctagaatcaaatttcgactgtgcatacagttgagccaattcatatgcgtgcttggtgcattgcatgttctgcgcatgcctggttgataagagctcggcaagtgttggaaactatgttgccatacaccatatctttgagtaaaggataccttgtactgtggtattaagaaactctggcaattaatttactttgtcatgtcaaatttacttttgcaaatggctaatctatcacgcagctattgatccatcatccatccacagcacttcttatctgttctgaataaccttgtgtgttcgatgaaaaatataagatttttttttcacttgatcatcgtagcaatatcctgaaat

SEQ ID NO: 1528 - DNA, 709 bp, Zea Mays
tacaaacacagccaacatatttgcaattgttgttcttccactactaattattttgcaatctaataagaagatattagaccttaatccataaatgctaagaagaaacatacctaagcttggaggtacgtctacatagcatacacactaccagagtcacatgctttgccgagtgccccatgcactcggcaaagccagaaatgcacacagtaaaccttttgcagagtgtcaaactcggcaaagggtaaacggcaaaaaaaatcattggcaaaggcggttcaaccctatttagtcgttgtcacagtcgctgctgttgtttccagccgccactgttgtttccaggccgtgtccaacggttcaccccgttgtctctctttcctgtatattcggtgtatggacgtctagaatgtggtccagcgatatgtaacgacaccggaggaaatcaacagaaggcgggaaggaaccatggctactaggagggttcgatgtcaagtgaagcccaactctcgtgtccatgggccagattggacccaatgagtgtttaagcgttttctttttgttttggcatgtggtataaagaaaaggactttatgaacagcaaagggcggcttggggcataagttgaggccgactgcgttcagaaagggaggactcttcctttgtaacctgaatcctgaattccagtgataatttgatacttcgtgagaggtgg

SEQ ID NO: 1529 - DNA, 710 bp, Zea Mays
agaaaagagagcaccagtgtaaagtcacatgccagtactcaactggacatgttatttaccttagatcaagcttagaaggcacttttggactatgcatagactatttctagccgtagctaatggcactgaattcgtcttgtctatactttacatgtattgtaagctctcaagttgggggtcgaggttttccatttttttataatttgatatatcaaacatatatgcatctttctgtttgactacaattgtgtctgctctcttttcagtgatgagaaagataattaggtgctggtgtaggaacgtggaacttttgccttcacagttgcagccatgtgtaattcagggttatcatctatttctacttttctcaagttgtcgtatatgttagttggatgggggagatgtggtacatacttttgtatgcaacatcgctaacgatttgcctacacaaacctgccaaggttaactttgatcaggatgctacgcttatcacgcttttgatatgctggcggccaacgtgaatgcatctcacttaaaatcgtgcttgttacctttcctccccggatgttcatccttagcaacttgtaatgtgtagtggcagaagaaaaacctactcttttgtatatatcaactgcccgttgttaaaccttttgctacatcgcacggctgcaaactgtgctctacttatttgtgtggctaaagtcttttgg

SEQ ID NO: 1530 - DNA, 711 bp, Zea Mays
gccgcatgcacaaaattaggctagctggtgggccctgcgtcgctagaagcctcctcttccctgggttgttgcgaacgcccatggaatcgcgcagacttccaggagtcggttagcacaccggcttggatccttgcacccaccgagactcgactctgggccataaaaccaagcaccgtgactacgtcgccatctagccgtgcaccatcaccgtcgcagaagaggaaggaatagagccgagcagcaccttagcatcctctcgccatcgccgttgcggaagatcgcggagcacgggaagccatgggttggcggtgatttctcgtcggtcacctagcaccaccacagatccacttctcatcgtgggcagctcggtccctgtctccgccttcagtcaagaacaggtaccggaaagatgaggagcatgaaggatgtcgcgatgagttcatgagaggtctaggtcgtcgtctcccagtcaactatggttgaggaggatcgttgtcttcatatgatgtaatgatttagctattttgtacataactcctatatatatagtaaagattcgacattcgtttctgtaccatgtgtcatcatgtgtgtgagacttgatcctagcacacatttgattcgcgcccgggtttgcccttaaaatccggcgtgacaaagttggtatcggatcaatgttgactgtaggacgtaacctatatagacctagaa

SEQ ID NO: 1531 - DNA, 713 bp, Zea Mays
tgcagatcgaccaacaggcaacagcctctattgcagaagcagcagcagcagccatccacaattagtttaattgctcctttccgattccccagcgtgtagcgctgcaaagacgtcaagatgagcatggcagttggtcagaagctagggccgtgctcgtgcgtgaagctgttggtcgtcctggccctcgtgatgtcggcgtcggacggcgccggtgcctcgaggcctctcacgacagcggcgccggcaggcgagcagcagcagagcaccggcggcggcggcggcggcggcctggcgtccgtgaagttagccgtggtcgttaggcagttgtgggcggggccttctggctgcaccttcgatcctaacaccactggaccgcgctgcccgtgataagcccggccgatccgtatcccatcgtaataccggtttaatttaagaccaaattaaactaccatagaaatacaaacggtaataactgcgtactagtagtgtgagtgtctgcagcgtctatatacacgacacatgattaaattcatatgttacgctttcaaattcttttgttctttaaatccagcaaattcatgtgtaaatatatagccactctctctgtataaataagtttcacaggtcggtttggatgtctaaatcttccatttgtattttttttttctcgaacacgcagaagatctgtgtatctttccattaatagatagaag

SEQ ID NO: 1532 - DNA, 714 bp, Zea Mays
aagtaggtgaacgaggaacccaaagcttagtaggtcaaaaactcgaagcagaagctcgcagttgagtgcaagttgtgtccttgatcacgttcttttccctaataatgatcttgataatcactgtggcatgcttaggttaaattgataggacctaataggttacatagttttgttttccctacaccttacatacaaatgaattattgggtagtcttgctattgttgtacctagttttgggattaatgctatatatgaattatgatcgtgctttattattattgtcaatggattctttattgatcatgataagatcatttttttaattggaacatggagcttaacctgataaaacagtgctaccacgaggatggaatgagacgcccttgaccaattaattagtaaagctagggagagattaccttacccgaaaatggcaagcagggagtgagttgctgtagagtatagggaggttctcaggtcgaactatctgtgatagcttttcggacgagacattcatatactcccttcttcctgacactgtagcgggttttctcaaactagtggaactttggaaaggcctcatagtgctaccctgccttatctcctcggtacagatgaacgggatttgagaccacttggcaaatgggtaacacacttgtgggtaaagatctgcaacctctgtagagtgtaaaactggtatatcagtcgtcctc

SEQ ID NO: 1533 - DNA, 715 bp, Zea Mays
ggcgctggtgaagacccgggtcccgatcgctcacaatggagttgggaaatccatggagtcagacgatctcggcgaagaaggcgtgcgcgacggaggtggcggtgtaggggtgtcccaaggcgatgaagtgggtgtacttggagaaacggtccacgaccgttaagatgacggacttgccatggactcgaggcaatccctcgataaaatccatggcgatgtcggcccagacctgcgaaggcacctccaagggctgtaggagtcccgccggctggagtgcctctgtcttgttgcgctggcaggttgtgcaagctcggacgtagtcacggaccaccgcacggtcgctggtgatgtagaagtccgcgcgcagccgctgcaatgtcttctagaagccctcatggccaacatgggccagctttaatgcctgcggtaggaaagttgacgtctggggcaggaagatccgggaaccgtagaggatgagagcgtcgcgggtctgccagggcgcgcccagggcgccactggtgatctggtcgcgggtgcggatgcaattcggatgggctgctgcctcctggatgatctcgtcgacgagcttgaaggagggtcccgagagggcggccaggatgtgcgccgctcccttcgacgaaacctccaggttggcagcttctagtgtgtcggcgtcgcgtcgggagagggcatcatccacagtgttgaggcggcc

SEQ ID NO: 1534 - DNA, 715 bp, Zea Mays
tccagtcccaatcacacgcagccacgaaccaggaagcgacgcacgaggccagccgccagcacagtggactccaatcctccgaaggacaggcacgccgagccgagtacggattttggaactgaggtcgggcctcagcgtcggcggggcacggggcagacagtagtagataagcgtttcaccttcacgagcccccagaaaggaaaaaagaaagcttttttcaccgccgccagaaccgccaaaagcaacgcgacatgcccagaatgaatgaaaatttactccatctagacccgtagacccgcgctagcgtagccccccacgcgaaaccagagcgaagggaacggagctcgaggaagcgtagcgagcacggggttgaggtggagctcaggagagaagtaaggcgaagagagcgagagcgagccgagcccggcgcggaactcacctctgcacgggataatccttcggtagcggggatctccggggaggagagggggaggcgataggaggagaggacgaatggaccgggtgcgtctcccttggcgagcgaggaggaggagctaggagccgacgagacgagagaaagggaggagaagaggaggggcggtcgctttcccggctcgcggccaacccggaggcgaactaccgcccggtggcagcggacagcgacgcggcagcagtacccaatcaaacaacgctgcactgcacgaacagcttgctt

SEQ ID NO: 1535 - DNA, 715 bp, Zea Mays
gtcagctctgccctgtcaaagatgattgtgacctcggttacctatgttatccccggaatattcctccttggagggttatggcgggtcattacagcgtaattaattacaagcatggatagatgcactaacaaccctgccctcatagcagcttacaagtgggaccctgtatcattggccggctatatgtgggcccttattacaataaggagtaggttaccacgcatggtcttcgcgttccacacgttagccttcgaaattctcgacggtcttcgttctgacccgtctagacggagggaacacccaagccttcgcccgctctgtgcactccctccgtagcgaatctcactcttcagtcttcgctgtaacactccgggttccacaaacaacccggaatgctactgtactacacttccgacgtccatatataaaatttcggcagcatcccctttgcaagattgcataaaagagggggcaacagagtataaacatatatcatgactaaaacatactaagtattattaatcggctagcaaggaaagataaacatacgacctgaactgaattaaccagtgcgcacgaccatataaaaaaataaacaaacttcctttgacaataagtttctaattaaatcatggctgcgcctgggcagcgttattgtgagagtgaaagtggacgtgctgctactcccctcattcccaacatgtatcaagtacct

SEQ ID NO: 1536 - DNA, 716 bp, Zea Mays
ctcttctctccccaactagcccgacgaccgcgccgccacccactacatggttgaaacacaccggtggcaagaaatcgggtgccaaagtgcccaaatcggcaaattgatataagaattagggagaggaggctgatacaaacatgatggaggtatcacacaccttgaattgtgttgcgccgagccctatcgaccacggacggtggcttaacggcaatggcaatctccccaaccacaccgcggacactacacagcaaaggaggcaaagcgtgggcgtaacggcctggatgtctactactgcttgccctgtccgttctgcggatagctgggagctcggcttttatggctctaggagcccgcatggttgcgtagcaggcggatgagacggttgcaatagtcaccaagatcaccggaggggggttgttaagcttcgcgcagatccagctcggtgttctgttcacagccgaaccaactcagcggagacgaggtacctgacgatgagggcccacgtgccatcgacagaggcaatgcgcgcaacggggagaatggtcactgaggctgccagatggggctcggttcgacagcagaggggggaaacggcgcgggcggaccagggtcgccagtgcgcgcgaagggaatggtgggctgagggagatttggcctagaatgcggttttctgttttctttctttttattatttattttttgctttattttcc

SEQ ID NO: 1537 - DNA, 718 bp, Zea Mays
caactttttaccatgtcgtgccatacaagttctggcaaaaaattaaattttgtgcaccttcgtttgcagcctttaggtcctgtaccctaaggacacgtaatgggtatactaactcattcacttcttttaaatgtttgtgtatattggttctgtgcccatttggtctcgactcgctgttgcagtgcggccgcgtcgggcagccgggcagccgcgtcggcagtgcggccggagcgacaaatgccgtgcaggaaggaggtcgtagaacccgagcatgaccttgtcgaaccacccggcgtcgtcgaccacgtagaacgtgcaccgcgccggtcatgcatcgtcgccgcctccagacgcacggcctcctgccgcgcccacctcgtcgttcgacccaaagctagctagtgccgccgcgaggagctcgtgagtcgtgacatgcgcggggagctaattaaagtccccatcgccaaggctgtcgccgtacccgtacactggacagtgcagccgtgcatcccgttcgcctccagctagcctccggacgacgatcctttcccgccgcctaccttggcctggccaccaggccagcaggtaacgcagggtgacgaagaccgtgaccgcgtgcagcgagctcacgtcgttcttgatgtagtggccgagttgggggggagtgagcagtagtggacgcgcagcgcttgatcatagcctggccaaatctgatcga

SEQ ID NO: 1538 - DNA, 719 bp, Zea Mays
ccgagatcctaggagataaatcagagtcccggcgacctttttcccatatattaccctctcacaagccctgaccaccaaatcatctaccgtcgggtgctatcaccaccgcgaaatcgagatttagagagcggagatccgtcgttggcgagcttgcaaatcgcggttacctaggtcttggcgtggtgttctggtgcggtggcatggtgcctaggagcctcgactgccatcaattccgccgctggaccgttgaagcttgggcgattgctcgccggacttgggaattgtcgttgtgccgtgctgcgtcggggaccgagctcatctcaatcaaatcaccggtgggcggtcaacctgtttgcgatggttggagcatcatttgtgcgtagtcggatttgggccgttttctccgtcatcgtcgacgacgccgtcggggtgatgcctcgcaccgccgtgctagtagctgaggaggaagagggagtcctgaccatggatcatcttgtggagggcagggattaatgggtggcgtggtgcattgcgggccgttgatccccctctgggtggctcagattagaaggataggtacccctcgccacattcagtcaacaccggtgatctcgatccaacaggttgaaatagatctagggtagatattatccccaccgatgatctctgtaacaccctgaaatcctattctaggatttagtataacttttcaaatgatc

SEQ ID NO: 1539 - DNA, 720 bp, Zea Mays
ttgtttaagggtcacggcaatgatccttccgcaggttcacctacggaaaccttgttacgacttctccttcctctaaatgataaggttcaatggacttctcgcgacgtcgggggcggcgaaccgcccccgtcgccgcgatccgaacacttcaccggatcattcaatcggtaggagcgacgggcggtgtgtacaaagggcagggacgtagtcaacgcgagctgatgactcgcgcttactaggcattcctcgttgaagaccaacaattgcaatgatctatccccatcacgatgaaatttcccaagattacccgggcctgtcggccaaggctatatactcgttggatacatcagtgtagcgcgcgtgcggcccagaacatctaagggcatcacagacctgttattgcctcaaacttccgtggcctaaacggccatagtccctctaagaagctaactacggagggatggctccgcatagctagttagcaggctgaggtctcgttcgttaacggaattaaccagacaaatcgctccaccaactaagaacggccatgcaccaccacccatagaatcaagaaagagctctcagtctgtcaatccttgctatgtctggacctggtaagtttccccgtgttgagtcaaattaagccgcaggctccacgcctggtggtgcccttccgtcaattcctttaagtttcagccttgcgaccatactccccccgga

SEQ ID NO: 1540 - DNA, 724 bp, Zea Mays
gaacgatttctaacctagtcgtaattgatgcctacattttggttcagtcaatccacgactccatgtttccttgcctagtggaatcacaacgccatcatccctatccctttcgtggtgccctcgcttccgccgcctccccaaaccactggcgattcgtacgatgacttccaagcgtcgtctccctaaatcccttgtcctgtccttccctcggctaggaccagcgactaggccaccccttgccgcctgcccagccagcgccagcgcccccacccagcgaccccgccatcaccggtgaccagccccaaccccatcacaaggttggcgacaaggaagcggatgtcgccatcatcgaaactgatgggtccaaggcggggtcatcctcatcgcactcgtctcgactgctctgggagctaggcatccacgtctcctagctgcttgtgctgctacttcttgtaggtcattcatgggcattggtaatatcttgcctgtcaagtggcgttaacacattgtgttgatgaacctgaagacatatgatatgctcgaaagggtgttgtaaacatgttcagacttgagagtgtaaaattgtagatttttggtggtaatatcgttttctcctggcaagatgtggctattgtaatctaaaagtgtgtgtctaacttgtactttccaaactgttctgagataatgtcgaatattgtgaggacttcgatttggtagactacat

SEQ ID NO: 1541 - DNA, 725 bp, Zea Mays
tctcgatcgatcgcgtcctcctccttcgttccgttcctagctcgctcgcgtctctctctctctctccgagctccgagctccgaatgttgattggttggtgtgtcctctagtagctgaagctgccagcatgatctgaggtgtccacagcatatatatggaagcagctagcgatcagatcatgctgtgcagtttcatctgctcgtggacgcacacgagatgctgtgcctagctgggacgtggttgattagttcaaggggtatgtatagcttaatttctcgatcggtaacggattcttcattccttattgattctctctctatatagtttcttgttgttcagtgagggggggaatgcatggacagcgcgctatctatatcctttccactttcgattccccttcttcaattaattctttccttttgcaatgtcgttgttgagtggccggccgatgcatcactacggctagctatagcttccacatccatacttctcatgcttcttgcccatatggtttgcaggttttgcatgcggtggtcgatctgatttgatacaaagctgctgggaggatatatattcagtcgacaagagtggatacctctgaccatgcattatattgggcagcaacaatggattaattcaaggagttttttctttctttctttccaacaatctcaccatgaattgaagaaattcaatacagttatacaccacacatacacttccaa

SEQ ID NO: 1542 - DNA, 728 bp, Zea Mays
agcgaaggtaacataggcaccgccgccatttcttcgtctcacatcttcatcttcctcgtagcgccggcgctccatctttcgttccctccctactcacgctcggcacgcaggcgacggtagcgacactcgggcttgggctctcagcgatggcatggacagcttcctctcccgcctcgcctcgcaccctcgcctccaaccctccatcgaccgaccggtgaccctgaatccagctatgtctgcaagcattagccttcctcccatagatgggaaatcaggatacggttattggcttggagtctagagaagatgatttgggacttcaccacgaaagctaaaagctttgattgctacatctggtctatgtaaagaaggtatgttggcaatatccatcttcaagtgacggacgcagtactgcaggaattcttccaaagcattggtccaatagaagggtgcaagctcatcagaaaagaaaagatccccacgtccagagttacaagaagatcaagcttggctgtggttgctgctgtgttgcctcctcttgttggaccgaagagagggaggggagaagcagctggcgtgcagacttctactcaggtggaagtactggctaggatgacaagatctcgctcaatagatatatgcattatcatttcaagtctatattgagtgacagggcacttcctaatttttgctaaaaattgtttgtcgtgcatgtatccacattcaga

SEQ ID NO: 1543 - DNA, 728 bp, Zea Mays
gaacttttccattctttgacatggagaacagttttgtctcttacgtttaaatgatctagctcttacatatacatggaggatcttgctgcactttgaaactgttgattctgcattctttgcttgagtaaatggggtaccagtttggtataggatgaaaccgggatatacaagagtcttcttcaataaactgcccatcgacctggtctaaaactccccatctatactactattagatcaactccagcagcttccgtaggcggctccccatctcctttttcattgcgcagtacactattcatcagtccagcggactctatatctgtctccctaaaaagcacgtcgtgtacttgcactccccttccccacgttttctctctcctctccgcacaagtctggggaatggtgcaattaaaagcatgtgctcgtgggacccagctctcacagtctgcatgcatgcgaatagggagtgtaaatacggagtctgttggaacgcaccgtgcaaaagaaccattcatccgtgatcaagcctacctaaaatacggatgcggagtgtgaggctgctggagttggtcttagattggggacaagtcatacacttgtgttcacatacatagtggagttggcaggaaagacatttaggaaagacatttactggcgatgttggcaagctcaaaaaaatgttgcaatggttgcctggtctgaaatgaagaaaccagagtaccttttca

SEQ ID NO: 1544 - DNA, 728 bp, Zea Mays
caagacccactatttttatgagttttttttataattttgggtattacaacatcaccccaaatctcgcaactctcaccagcctagccatccacgagagtcaatcagccaacatcctcgccccaaatcgacgccaacctcccatccacgccgaggatggtgatccttaaagaacatgccaacccaatccccatcgcccccaaaacagagatttggttccaccccaatctccatccttggcagcgacgctctccaatccccaattattggcggtccaatcctcggcggcggcgctcagctctcctcatgtggccacccagcacctgccccatcttaaagacgagcctgtagatgtggcactcgtgttgtgcctgcgcctgcttgtctcttctgctgtcgccgtcgaccgactgctgcttgtgtcgtgtgagtgccctggtgttgacgccaaactcaaggcttgtgcgttgcgaggatgttggctgattatacattgtcagacagaggaggggaccaagggactaagggtggcatgtggaaactgaaacagggagatagatggaaattgtggtcatcaacagctctagcacacaccgagagtgcattgaactgggcaaggattagttcctgtataatggcacattggcactactgtaatgcataaggatttgttctcacatttgaagtacaggctgttcacattgcaacccctgctcaagagaagaggaagg

SEQ ID NO: 1545 - DNA, 730 bp, Zea Mays
cccatggtccagcctctcccatgcgcatagcttatgaatcatctcccacgcgatcgtattccattgcaaccacctccgtaaacattacatgctcaagctcttcgttcctagtccgttgagatcccttccgggattttcgtggtcgctgcaacaaaccccgagtcgggctctgaacaacctctgcgagatctttggggccgacgtggccaactcgccagcgcctctgggctataaaagcgagcccccgtgacctcctcatccctcgaatcgagttctgccttggattagcgtcaccatgtctacaggagaagaagagtgctaccgcagggaaagagaatctggtccgccgccatagccatcccgcactcccgtcgttattaggtgcctggggcttggtccgagagcttcggaccacactatcgcttgggtatctggcgaatcggagctctgtatcgtcgccgggtcgcgcggattgctcatcagagtactccttcgccttggatccgcagttcgccgtgacccgtggtaccgggcatccttatacctacagcgagaacacgtgtcacctgcagatcatcctggtacctggaatctcaagtcccaggcaagttgtgcccttgaccactttttacccaataatgttctttaatatcatttattcatgcataggttaattttgatgggacccaataggttaccctagattgtttatctctttaccttgtttacc

SEQ ID NO: 1546 - DNA, 731 bp, Zea Mays
ggcctgccacgggcaccggtgggctttcaaaggcagcaccaagacatgtgcggtccgctaaaccagtcactagccaagccccatggcattcgaggttgccatcgtcggccaccagctaagctccaccctcgacctttatggagacggcttaggtcgctgcccaaatgaagagaccgacgtcaatcgagaagtagaaagggcgcccccacaccatctacccataaggtggcatgagagtgaactcttcctttgtaataggataacatttatccttgatccagcccggtgtggtcggccctcataaacctggtctttggcgtccatcacaaagctctctatgtatccggttataaaggtagaatttgcacttattagttcaatccttgtggtcgattcatcttcatgttttaatttacatatattgtttcctctaacccccacatgggttctagcttttgttcttgtcatgaaatatgagttatgtaactagcttgttgcttagtttgggacccccttgatgttgaacagggatcaaattgctagggacttagtgatatgaccacaccatcaagcaacacgttacaacctccaagtcatactacatcaactcaagtacaaccaacatcatcaccgacccaagtctttgctggaccaattacacgtagccgagctaagaagctacagcaagaggtgcacgcgctactttatgaatttcgattaaacactaatga

SEQ ID NO: 1547 - DNA, 731 bp, Zea Mays
cagcaatatagcatctcttcaactctacattgtctggagatgttttgggtgatctatcgattaaaagacaaatcctaggatctctactccccgacggaatacctcccgggagcgagattcagatgttgttgatgaacgtcgtcgtctctacgcacacgcggacagtccggcgactccagccacagacgtggaccgtccgacttcaccacatagaagatccgtttctgtaccaggttgcagatcgaccgacctagccgtgttgtcgcagagagcaccgccgcttataaatctaacttcatccgctcgactcccattccatctaactgcaacgcaatgaaagttcatgcaggaagagcaagtgtcatgctcaccaaaccatttgaaggcggcctactcagctccctctccccagatgcctactgggctgggctggcttctgtgtgaggccgcaagtgagaaagcaaacacagccagaggagccgccaatccgatgaagacgagaaacatgtggtgttcgattcccaaatgccgacgtttgactcgacctacccggcccaacgccatgccgcgccattatctgatgaggaaaattagcgaggcagcaacccatgtgcatccgctgccggctttcctggggcgagctggtggaggtggagaggaatctttgcgtcctcccctgcttttaagcgtctgctcctgcatcagcatcgatctctcaggaggaccttcca

SEQ ID NO: 1548 - DNA, 731 bp, Zea Mays
ccgcgccctgcctccgcgcgcgcgcaggccgcgcctgctccccgcgtgcccgagcgccggggtcgagcgagcacccgagccggctgccgcgcgtcccatcgcgagcccgacgtccgttcgtttatgcgcgcggttacttcatcgtgttaatggagattgatttctacagtttcttcctcccctcattcctcctcccattacgagcaggaaacggtagcaccattgaagaccaccagtgaccctttcttctcccctcctgctctctataaaaggcagcagagcctccccattcctgcctactcgagtttgcctctctctagcactcctcgctcatagcaagtgctgttgccgttcgtcgccggagcccgtggagttcaccggagtgtgtcgttcgtcgccggagttcgccggagccacgtattcgccgtccgtagtcgagcccctgcttttcttcacccggccaaaacccgtcgatccatccccgtcacacgcacgaactcgaggttgatgatgacccaaattaattttatgtattttataaagtgctttttgattcgattcatgagttgtatattttgttggttgtattatgaacacatgtgattccgatttatgtatatgtgtgcgttatggaattttatgtgcgattgttagtacaccgtaatatttcatgttagtcgtggcgttgattttggtttagagaaatatgacgtagatttaatagtcacacg

SEQ ID NO: 1549 - DNA, 732 bp, Zea Mays
cgtgtgggtcatgtttgtcagtgttctcctcaagctcaggatggtaacaaatcccgcgctgctcgccgatatgggtgggaggcaggtgctgggatccctctgacctcggaatcgggcttcgcccgattataaaacaatgcactgccttcccttcttggctacaaccgcgtggatcgggcaaaactttgtgcatccttgctgtggacaaggattgggtgccgccggtgccgctgctggggatcttcgtctgcacaggcgctcgggtcacgacggtcgcctgggtgcttcaccaggccgtggggttgatatcagtggtctcagctggccaaatcggtgggcaaggggaagggaatttctcatcagcacgcctccgtcgccgctgttctgtcgtaccgcgtcgacaacctcatcctcgtcaccatcgacggtgagaacgcctctgtatggctcgccttcatctctgctccgtctaccgtcccttggatttgaggatttgtgctcagatcggcaggcggccgtgcaccggtaatggcaccaccgtagggtggctggcgccgccgctgttcgcgtccggtgtggtgcaagcgtactagggttgcagatgaccgttggatcctattcaacgtttgtgatccaatcaacgagataccggttcgggaatagatcgtaaccgttgggaaatgcattgagtggttaggattaaagataaggaactcgttcggtcgatgcgat

SEQ ID NO: 1550 - DNA, 732 bp, Zea Mays
cacgctttgctcgccttcaaatagtcggaacattcagttttcttgctttttcttttctctgttgccgacagccatcttcaccgtcgccgatcaaattcgcgttgcttgatcgatcaaacctcaaatttactgcatatttagcttcacagcatccttgcgcaccgtttggtccagctctactcgtgtgtgatcgccggaatcactctcgcgccaccgtcttcctccgcggcggccacaacacgccggagctccgcctcaccgtggccagagctctatgctaacgcgtcggaatgtcgttgccatcatcggagaacgctgtcgttgccgctgtcaccgtcgacaacctatctctactccatctccgcctcaactagctagctctatcgcttcaggaatacgaaggtgaattagttcacatggaacctttatccacgcaaggcactccatccgtcgaagtggtagctaactctagtttagcttctgaggaactcggatcgtctgatattcaaggtgaccaccaggaatcggtatgtttaggaccgtgctgtatgacggtcgttaacgagagcgatgaagaatagacattgaagttaggaaaggcagggcctttcatatgatgtaatatactctatcatacctcactactatgagttgtaataataagtttcaaacaaagcagtttgtaaattaagttattgtaaatctttccgctattgtactctggtatatata

SEQ ID NO: 1551 - DNA, 733 bp, Zea Mays
tctctctctctctctcagtctgacttgcgcttgagctgggttcaggtttgatttgactggtttgactgactaagggggtgtttggttgctgctgctaaagtttagcccgggtcacatcaagcatttgacttttaaataggagtatgaaatatagacccaaccaactggactagattcgtctcgtcttttaatctttggctgacaaattagttttataatccgactacatttaatatccggaacggaggttcaaacattcgatatgacatgggctaaattttagtttggggtaaccaaacaccccctaaaccaacaacaaattgcatgtctagatcagctattcctctgtgtaatagacttaaacgcgagtacgcgacacatacaaatcaagttagttcggtgctgacgaccgaacatgctgtgtgctcactgctcagcgctctgctcggcagaccagagacgcaggcagcaggcacacagccctagctggctagctggccagctccccgcggcggagcctgcgcgtgcggtgcctcggatgccacgcggcgcacgcaggcatgctgcactcctcgcccagtcgcccgctgcacatcgtcgctgccttcggatgccgcctctcgcggagccgagtcacagcacgcgcggctagggattgggtgggattgggaattttttcggagcaacgcgaaccaggcaggaccgcagagagcacgagtgaaaggagtgtaga

SEQ ID NO: 1552 - DNA, 735 bp, Zea Mays
cgccggcggacctccctcgcccgcggcctaacattaggctcggggactatggtgcagccaaggatgacttgccgatcgatgtgacgcctcttgatctcgtcgtcgtcagatcgtcgccgatcatcggcaagttgttcttggctacaccgtggctcctgctcctgatgtaaggctccgtctacggcgacacttggccgtcagatgatcgacgacaagcaaggccaatcaagttcggagaggccagccagacgtccaaaggaaatctgccgccgatcacggacggatctgctacggattttacaccagggccgaccgcgccggaccggaggagcaggaggagctggacctggaccgctgcggcggcgcgcgcggtggccgccgaagaccgtcccttatgctgatcgacggcagttaggcggcgtcgttctttcttttgcctggcccgtgcggtgcggcctcggatgcgctcacgtgcgcacgtacgggtacggctcgggtgtcgacataccggctggcttgagcggttcttgttcatcctcgtctcgtcgcccttcggcgtacggctggcacgggacacgtcacgtgcgaccgattcgccgcaggctgcctatttctgatattaaagccggagcttctctcatgcatccgcgtcaacattttgcatttcagccaatattaaagtcaggagcaaatctgctctcacagtgtgtccacgtcaacgttgcatttcagcca

SEQ ID NO: 1553 - DNA, 736 bp, Zea Mays
cggtcggtgagctggcttgtgcgcaggacagcagcagctcagcttctacatgacagatgaatgaagaagaaaggaaggtcgaggagtgaagcagtttgcgcatgaccctaaaattgcagcgactctttcccggaatgatattgagctcctggccttcctgttgaccatacgggaacgaggtgtataggtagaagtccaagagaacccaggatctgactgggactcgctgttgaagccagagaaacctccatggccggctggggatgtccggtcgcgagctgcctgcatagctgatgggattcgaagatggcacgacagctgctcgcgcataatcaggtaccatgttcttctgattcttagcttttgtacactcggagttgatggaggatggactgattcaagactgattcaaattttgactgggtgcatacatctttattatcataaaaaggtggttgaaatgggttttcaggtcaagccaatgggggatttatgatttaggagtaaatgtacgtatgacaactactgttcacaatagtttgattggtggaggatgtcacaataggtatgtttacaattccactgccggagacgaaattgaccatggcatcgtcctttggcttgtcctctgaagcgttctcttgatgtcactgttgagtgttcaggtcaatggataggaacttgatgaaatgaactagacaggttccgaaacttgataaaataaactagagtggca

SEQ ID NO: 1554 - DNA, 738 bp, Zea Mays
gccccttttcttctcctttaaatcccccatgccccctctccaaccagccatttcctctccctccctctccccacgccactctccctactccctccctctctctctatctccctctctctagctccccatgcagcagcagcccctcctcccttggagctggcgaccagccctcccaagctccactctcaccttggcaagctctcccatggcgtctccccctcctctacggcagtaagatgaccgagagatgatgatcgagccagtgatgtggtgccaaccacaagacgcagttggtggacgacctgaagaatggacttaaccagtggatactcgccgagcgagtaccctccccagcaaacactacttaagtgttaaattaaaggcaagccccggtttatgcataaccgttatatatgctattttactgcacttaatgtttgtaggcttgtaccgtgcacttaagtgtaggagttgaatgaaaccctagttgcatgaactcaggattccctttgagatggatactagtatgctaggtcgagtagctgctttattaattaggatctcggtagaagacgagtgatttttctagcactcgcgcgagatcaggaaattgattgtacccactttcacattgtcatgatactagttggtggacaacaatccatggggattggttgtttacaaggtaaaaatgggaataaggattaaggtgtggtaccgtgtgtcaagcgtttgaac

SEQ ID NO: 1555 - DNA, 738 bp, Zea Mays
ctaattcctctcgtcccctcgcctcctcgcactctttggatgttgccgctgtctgtttccctccccttctccgctacaacagtttcttcttccgttcaatagccattatatcgacgcccctcggtctccctcgccagcctataaaatcccacggagctcgcctccttcgctggtgccctcggtcccctgtcgtcgtgctgtcgtcagctgtgctctcgcttaccatcgcgccctgttgctcaaacaaccttcgtgcctcactcacctccgctcacctgcacgcttgctgctcgctgctgcgcgccacgctgctgctctatgttcgccgcggatgccgacgcagcttgccggagttgccgtctttgacgctgttcgccactcaccatcgcgccagctacccgttcgatccacctcgttggagtcgtttccgtggacagctgcgacgccgcgtgttgcatgcgctagcagtgtctttgacctccctccataccggtgcgttgcctctgcttagtcactcccggcacctgctttgctcatcacttgcgtcgccgagccacgcccctcgccggagcccgtgcttgcccgtcgttcgtcatccgtggagcctcgccgaagttcgcgccccacagtccgaacgcatcgccggaactacgtcgttcgccgtcgacgcgaccacgcagcaccccggcgaccgtacccacgccgttcgccgtcgtccgttcacccaaggttgaagac

SEQ ID NO: 1556 - DNA, 739 bp, Zea Mays
tgatgatgggatgatacacccagcctaggtggtgttagccgaggcccaacaaattagggcaacccggagcccaacagttcattaagcacacccaacttagggaaaagtccaatcgtcccaaaagactagtccaatgggggaagagtggctctcccttttaaagtggcttcctcctcccaagttaagcgaggtgggatcattataaggctcacatggtcgccgtctgactacaattgggccaactaggccaattgtgtatttgtcaacgagtaatagtggaaggctagcataacgatacccggtcacctaaagcccccattcccaaggttagtggattgtcactggatattttagaaaagattagggaagagatagtcaggttgttcagggacaaattcagtgttattgtgtctagcatgggacagacatattagaagccttacgaccaccgatttgacaccatgctatatccacacgggactaggataccagatttctccaaattttccaatgagtgtgggaagagcacacatgagcacataggtcatttcctagcacaactaggggagttgaccgatatggaagccgtttgtgtctaattactctcattatccctaactagtaccgcatccacatggtacactaccctgccacctaactctattagctcttgggggattataacaaaaatttcatgctagctttacaaagcacttggaaagaatagagtgagaagaag

SEQ ID NO: 1557 - DNA, 740 bp, Zea Mays
tgaaaagccacaacgcgtaatagcacaagatgaagatgaaaggtatccgtctggatacgtggaggcagaacaacccgacagagctgagggccgccgtgcttatgacatagaatcgcaaggtgtggctgatgaaggggagaggataataagaattgtggatgaaatggaggctgaagaccgtgaggcacaggagatggaagaatgtggggactcatcggacgacgaggcatacccagtgccaactgagtgaaggggttcggcaaccctattatacaagatggcagatgccaagagtgggagtaccgagagaacgaggtagtgcaaggagcgaagtattcaaatattgaagccgtgaaggatgctgtaaagaaatgggctgtgtcattaaggagagaattttgagttgtcaaatctggcagtaaggagtacgaggtgaagtgtttgaaggacgatgggtgcccatggagagtacatgcctacaagggtagatggaaaactcactgggtatgttctattgttacggagcatacctgtgtgttggatggcgtttagaaaatacaccaaaatatgacatcggactttgtcgcccaagaagtatatggtttgatcctcgaacggctcaattacgagccgaaattgatagtcaggcacatatatatagagcagaaagtatcagtacattatcagctacgtatgtaagggcatggagggctaaacaaaaggtgttcgagatgagattt

SEQ ID NO: 1558 - DNA, 742 bp, Zea Mays
atggcctagtgcatttaaatgatactccctccgtcccaaattgaaattcgttttgcctttcaatagattcataaaataattaatgtatatctctactactacttatgttagtagtgtaggcgtccacaaccacccgttctatcgcgcgcagatgcccgcatcgcgcagccgctccgcaaccgcccgcatccgcgccagcaccgtagccgctccttccatcctccgccatccttccatccaccgcgcggatcccagcgctccctcccgcgcacccgcagccgcgccgcatcacgcagccgccccgcaccacggataccagcgctgcctccaccacacaagcctcctcgccatgccccatccgcagcgcccacaccaccgtccgccgccagatccggatcccgcccccatcatcggcgcctcctcccccgcccgcccgagaccctttcgctcgccatggacgtcgtggtctcatcccgaggctcatgcccaaaaccctacgggcgccgcctactccgacgactctgacgagggccgctgccctgcgccaggagagaggtcaagaagccctttggtgaagaagccgaaggtgacggtcgcgaggccgtcatctgatcgacgccaagaacctcgcatcgcactttcttgagatctcggtaaggccgcatcaaacctctcgtccccgtcgaattcctgttaaaaaaataagatgttgtaacaccccaggatccacaaacatcctgaa

SEQ ID NO: 1559 - DNA, 745 bp, Zea Mays
aaaaaattagtatttgactgtacctcttttacaacaaaaaagaagtagatcagtagcaggcagttgtgatatgtatcgctgctctgctgcttgaagcctcatcatgtgattgggcgcaatgcagggtaaggacgcaagaaggctacgacttttgcaggcgatgccggcgcacattggatgcagagttgtagtactgaatatccgtcgtgtcgcacgagaccaccgttgagcgcgagcagcagctcgtggcaaagctgcgcaggtcctcgtcgctgcacatgcggagggcgccatacaggaatgggaggccgagcgagtcgggcaactccaagagccgccgcgtggtggccgtcatgcggtgcacgcaggtgccagtcgtcacgaccgcttccgtcgggcggaacagcttgcggctgccgtggcagacgaggtctgacatgagcgatggccactgcacacattcaccgatgttgaggcccactgctcaccaagatccgatccgtgatgttgtggcagctagggttagggagggacgacgctcgggaggggagtgaacgactttaatagcggcagtatcttatctgatggaggaggtgaccgtcgccatttgaggagtagaggggaaggcgaagttctcgaagtcgacgcggcgggcacggagccgcgcggttgctgctccctagcatcgctcgggagagtggtggaggtggtcaccgccatttgaggagcagaggagaagacggag

SEQ ID NO: 1560 - DNA, 745 bp, Zea Mays
gtccagcacacaggagttccgaccgcatacggcggaccgtgaccgtgaccgtttctctcctcaacgcgcaaagtgggtggctgagagcgctgccgcccgccgccgtcggcgaggagagttcgtgttcgagatatccatcagacgtcgccgtcctggggcctgccggccgtaggcgtcgccgtcagacgggattgaacgctgcgccggaaatatctctgaatctggcgtccaggtccagcgcgtggagaattggagatcacccatctccgtcgcgcgtgaaacttgggggttttccaaggaattaaaaagcgaaaaggctgccgcagattttcatgagttgttggagcaacgccggagagcccagcccggccggaagcttgtgaagcgacggcgtcagcagttcgtcagctcgaccatgcatggatatggatcacacacacgacacgattcgggcgaagcggaacacgaaaatggtacggactagccacgtcatgcactcgatcgtagcagccggccggttcactgaccgccagcagcgttttgtctggcctctcctttcttcacttgctactgatatagtattagcagttcatcagcttgaaaaggattgcacggatgcatgatcaggcgatatatatatttacatcacgcattcgtagcaaccggttcactgatcgtcagcaactttttttttttgtcctctccttggctcacttactactgtgttgttagctgtgcctgatcg

SEQ ID NO: 1561 - DNA, 747 bp, Zea Mays
tgcacatcgcatcatccatcttgcattttgaagttatgtcgtgatcttatggtccgaccgtaccggtacatttttagcatcgtatgttgcccgaggaggggtacgatgcggcttcatatccttagaggtatgaaggcagaagtcatccttgcatttgcagacatttgcactcatgaggaatatatgaagtgtgacattactatgttactattgtggtttctacctgcgaggtgtggtaactaggtgcgttgtacgttgtatacgtgctgcaccttcgtaataagaaggttgtggaattaagtggtggtaaaacaatgttcttatgtggttaaactgtttgatattattttacttgctgagatgtgtcatctcactcttgcattactcaatgcaggtccttgatacatgttgggaatgaggggagtagcagcacgtccactttcactctcacaataacgctgcccaggcgcagccatgatttaattagaaacttattgtcagaggaagtttgtttatttttttatatggtcgtgcgcactggttaattcagttcaggtcgtatgtttatctttccttgctagccgagtaataatacttagtatgttttagtcatgatatatgtttatactctgttgctccctcttttatgcaatcttgcaaaggggatgctgccgaaattttatatatggacgtcggaagtgtagtacagtagcataccgggttgtttgtggaacctggagtgttaca

SEQ ID NO: 1562 - DNA, 748 bp, Zea Mays
atttctcctcgcatgcatcttcatccggccgccgctcgttgacgaaaaatcccaccgccgaagacctcctcttcctgatcaattccacggtcggcagctcctgtacgcgtccctctctcttccgccgcccgcgcttgatatttttcccggcgccgcccctgggctcttaaagaggaattcagccgtcgctctctgcaggtgactgggcgcctggaagcagctgcatttttttcttcctctccccgacgtccttctcatggcgtcttccagttcctgctcgggtcccatggccgcgcgcagctccaggctcgccgtggccgcgtaaactcctgtgtcgtgctctgctcgcggagccctcctctgccggctgagctctctctctctccctctgcgctcccagcatctctctgtggctgcgcctagctcctgtccatccggcttcttcctgcgtcgcggcttccctaagctccctgccagaccttgctcgagctcgccgtgtgggtggaacctgcgtgtacgctgtcatcgacaccatggtcgtctccctgtgcgttgcatccctcatctccagccgacgcactaggaatgggtgtggagtatagaagaaagtgaagcccgaaatggcgctcgccaggcgctcaacaaaacatctgaaccaaagttcgtcgtcatcgttctagctgatatccagacgaattgtgatgtggtaagccgattcgttatgatgcgtcacgatgcccgatcttca

SEQ ID NO: 1563 - DNA, 749 bp, Zea Mays
tgaacatatagtgccaaccttcccaattttaaactatttggaaaacaagaattctctaagcctttcataccaagtgcatggagcttgcttaagcccatagaaagctttagaaagcttgtacatgtggctatgcttcttggggtcctcaaaaccgagaggttgctccacatacactagttcactaatcttagcatttagaaaaaacgtcatttacatccatttggtagagtttaatgttgtaagcacaagcataagcaagaagaacccatattgcctctaatcttgcaacatgaaaattatctcaccaaaatacaatccttctatttaaatataatcttgtgccactaatcgtgtcgtgttcctcactaccaatctatcttcattatgcttgttgtgaaatacccatttagtaccagtaacattgtgattcttgggtctttcaacaagctctcaaacttcattacggatgtagttatttaattcctcatgcattgcattcacccaatcaacatcaagtagtgcttcatctatacggttatgtttaatacaagatacaaaagagaaatattcataaaataaagcaatgcgggagcgagtttaaacacccttacttatgtcacccataatttgatcgaccatgttatcttttgcaatataatgatggatccttgatacaatatgagaatcacttgatgaagcttgaggaaccgaatgacttgttaccattatcatgagcattctcaacttca

SEQ ID NO: 1564 - DNA, 749 bp, Zea Mays
tatacactaattaacatagcatatttaaatagttatattcaccaagtcatttccaaatatggttctaaggttaatgaaagtagatcatcggtaattaacacagcagatctctagtatacctggtggagatgtgttttccattgagtaccagctaaacctaacagcactggtgaaccacaacttgctttaacatgttcttgtacaacttagtttagtttttcattctagaatagaccaatagttctatttgtgtgcaggttatacatagagcagcatatctgaagagacgcttccttctttttttctgaatgagatgtccgatgtctagattcagttctaaccttgaaccgatgatgattcttttaattttcagcttctttatgaggttctgaccttgagccttgtgatgccttgtgtcgtcgtgactcaggaccttgggggcacacatgaagacctaggtggtcgctcaaaaacaatgaagattccagtttttcacgttagtcaaacaagttattatgaaatctacaacaattgatccgatggaccaactataataatcttcttcctagttgcaaaatgtcccaaaaggatgagcagaatatatatagaataggtatatagcacgacaaagctaacttaaattatatttgtcatcaacacgtcactacgtccttttcaatcatgtggttatctagccggtttttgtattctgttttcattaatagggaggaggataggttttagagcct

SEQ ID NO: 1565 - DNA, 750 bp, Zea Mays
ctctccgccatcagcgctccccggttccccgcgcgccaccgctctccaccatcagtgctccccagtccctcgcgcgctctccaccatcgaccgcgtgaagctcccccgaaaacctcctccacatcagcgccccccgccatgccctgtatctcgcctagcacacgccgtgcccacgcaggtagccacggatcttgcccccaccgtcgagcttccatggtaggcatcccccttctatactaggcggccatggcatgaacccatcccctatccgtgcccccatcgcacgggcccaaatcctggaatgatgccttcctcctcctctgctgcctccgccctactcaggcctttgagacttccactggcgatacgcacccaccaggtgtacgtgcaccccttctcctatgctcctactatgcgaaaccaaccactcaaactctagctacgttttcagatctgaagttgttgttcatagaaaggatctacagtttcaagcagttcgggaaatggtccatacaaatccacaaattttgcagcttttgtattctttgtttgggattacattctatggcctcttatgtagcacctgcctaaacattttgctggtagcacgttatagcctatgctggttgaattgagcaagaataatcctccaaatctaaggtttattgatagtatcatgatgagtgtcttcaattactaaatgagccctttgagggcggaggggcaatcattctcttatttgattaaatt

SEQ ID NO: 1566 - DNA, 750 bp, Zea Mays
gatttttgaatgagcgtgtcatccgtaaagagtgagaaaatgaggttaactatcccctcatggggagtgcccgtatcgaggaatgatagtgtcgtgcatttccgttgcggtcgaatttatgcgcgctgccaccttgggcccttgtcgcatggctccgccgctccatgcctcgggctccggggtcccccggccgtagttggcagagctcgctcatgtttggtcgcgcggactgcggtgagcatgaccaaaatcattgcggggagcgaggtaggtgccgaggcgggctgaggatatgcgtcccgttcggtcgaggtcgaggtcgacgaaaaggatcggagatccgacgagcgttctcacgcacgtagtaccactatcttctaccaccgaattgttcgatagcctggcggccctggcggcaccaccgcagcagcacagcggcagggccccaggcaacggcgcaccgcggaagccgatgccctggagaaggccaggccggggccgcctgggactactgttgcgcccggccgcgcagcctacccgacgaggacgaggcagaccggccggcgagcggaacggaatggaccgtagcgcgtgtcatcgtgattcgtgtagcgacgacgggccgcgatcgcgaccggattccggagcagcgcactgtatcgtatccgcggcagcctgagatcagatgttgactaggtgtcccccttccgggccggccttccctcctgtcctgcctgcggttcattgatt

SEQ ID NO: 1567 - DNA, 750 bp, Zea Mays
ttcctgtttaccccatgaaaaggaaggacacgatgcccaaataagcgcacacacacacaatggatagaaacttgactgagttcagctacatgcatctccatggataccctcaattccatttctgctataaattgcaaagtaccaaatgccacaccaggaaatacatagaggaaatgaaagtgcatagtagctgctcaagtatatagtaaaccattatgttgctagcatttcagacagaagataaaagaaaatatctaatatcatgataatgcaaaccattacaatatgttatatcattgggtactgatgcatgatcatgtgaggaccaattcaactcagtataaaagcataaaaggaagaacataaaaatgtacaatttggtggtctacgtgtttacaaagcggagcatacgcgcgatctagtaattgggcgtaatagcgtattgaaattagcataaaaagacatatttaggaaataaaaattacagaggtggatcatgcatgctggttacagtaagtaggactagatggctgacttactgatgcatgtttatgtaaggaagcagaagcatcagatgagtctgaatcattgggtactgatgcatgatcatgtgaggacaaattcaaatcagcataaaaggaagaacataagaaatgtagaaaagtctgactatatgcacaaaatagtactgaaaacactaatcatgaaaacttcacaaatgaagtgtaaattttgtgattcttgtcttgg

SEQ ID NO: 1568 - DNA, 751 bp, Zea Mays
tgaatatataaatatacaataaacaaaaaaagaaaaataatacacacgcacacgcatgcccctgaccgaatcctctactggccgaagcccatgtcccaacagtgtcgcacacacccacgttccctcgctatctttcacttgtgcaagggacccacacgtcaggccatcatccccacagaacaaccgtttgtctgcaccggtcttctccacgacgcatgcgcccacgtcgtgcgggcggttggacaactccccctcttctctctaggacgccagccctatcccactctctcttctccacgcctcgcctcgtgctcaccacactgcctcatcgcacgtcgcgttcggccatggacgccactgcgagctctatcgtgctggcctgctcgtcgacgtgcgctgctggacctaggccacaccaccttgccgagcactacgcccgccgttgcgcctatctcttcgcgtcgttgctggccaaagccctagccggccgagaccttcttcctcgcgcggcagcagggagctagcgctgcccatgtccctgtgcgtgctcaccactgccgctttgcagcagcctcgccatcatcacaccatgcgccaggtggctcaccgtcgtgtccggggcccgccatgtccgtccttgtcgtcgaggtgagcgtgttccctctctctcctttcatctttcccctacgcacacatgtctaccagctcccgcgccttgcctccatgtcgtgcacattatcgtgccgcacgc

SEQ ID NO: 1569 - DNA, 752 bp, Zea Mays
catggcatagctgtatcgaattcacaatatatttgtccacgatcttgctaccaatttgagacattatctgacaaacaacttcaggagcaggttcagtaagctaaacaaaaaaattcttcaacatcatcttctatgcatctaggtaagcaacacagtgttgtgatgtactgtaaaacaataattttatcttagcaaaatgtttcaaaagaagtaattatattaaccaagtcaatagtttccatattgtactctaaatttatttttgaagagcgagtgtgcaatgattgaatgtgtagctataagctatcgacaaaaaaaattgcactcaccatcatcaccagtttaataattagttctacagattaatctaataggctacaagaagcaaaagcaaatcagacatccaccgtctccactcgagattttagatctagaaaatttgtacctcggaaggctcctcctccatcagaatccagagctccatcaccggccacctgccatggcaggatcctccagtcgaaggagacatcccttaatgtacagtcctgacgagaaacaacagcatcccttccgaaagcatcacatcgcccgccaccgcctcctcaaacgccgcctcctcctctctgggtcaccgctgccgcttgccacctcgaccacgacaactgcacaggaaaaagaacacggggagtacgtacggatgggggagaaatgctcacgcgaaaatttgtgggagatgaggtctccaattagga

SEQ ID NO: 1570 - DNA, 752 bp, Zea Mays
ctcgcactgaattaagtcatatataatttcaaaattaagggaagaggcattttccaaaagaatgtaacggaagtatttagtatgatagaatagaataaatgaaagtaggaacttcctctcgttcttcgaaacgtaatctaaggagtggtagtaatcaaaagtgccacactaactaactagctaactaaaccgaactttctcgtgatgagtttcgtgtttggacgacgccggcttcttattatcaccaactcgttatcaatccatcccatcaacattttcattggagcacatcagctgatggtcacgagtttatattttgctccactcgtatatattttgcagtcgacgtcgtcaaaaaaagaactcggggggcggagacagacgacggctcagagtttccaacgcagagagaacatgcaatatgcaaggggagtgttattagtcgacacttttcatacctcaattattacttttgtgctgataattacgccatgtcatcagctaactattaactaatcattgcgtgtggaataaaaataaataatgtcactaataaagcttgcctagaggccatgtttgtttaccctgtaggttatataattcagctcaaatgctcatctcgcatcacgataagtaggtttaactcacgtttgattaaatatatatacaaaactatactaaaatatttataatgctagatagatgagttgtattatatttctgttgtaaacttatttagagatataaatgcc

SEQ ID NO: 1571 - DNA, 755 bp, Zea Mays
gtcacatcgcttgcgcctctctctctcggggacaactgcttcacccctgccgccgccctacgcttggtgcctaggtcttcatcggatcgttcaccgggcacaagcatcacccagcagactgggatcgcttctcccccgccgaccaagccgtgcctcccctgttgccggcgtcgcccctcccccaccagtgaaactcgcggtctctctccaccgcacgcacctcgtgtagttgtcgccgcgtgcaccccctgtagccccggcgttgggtcctactgctccatccggtttgcttccggcaacaagatcaacaacaagcgagcgaggtagtgaaaagctgcagctgtgatctctggaggtgctcttcctactctttgctggtattttgatggtggcttgatggccagtaatatgcaggcttctgggctgcctcagcctcccagacctcccatgatgggttctagcgctcagccacaaaatcttggaccaccaatgcctatgcagtatcaaccaacatcgatccctcctgtagtgcaaccctggagtacaggcccaggacagagtgtaactcatgtgcctcctctagtgcagtctgggcaccagcaggtgtcagctccaacgactttgcctcctgtcaacttgtctgaacctagctcttcagattggcaggagcacactgcagccgagggaaaaaagtactactataataagaagacaaggcaatcaagttgggagaaaccagttgagttgatgacacc

SEQ ID NO: 1572 - DNA, 755 bp, Zea Mays
cctgtgcaatagactggatctagtgtaggcaagaacacagaacagcgaactgcgagccaatgaaacaatgtcacgtgaccatcagtgggagagagagaaagacaatttcttctccaggaaacacacacgcacgggatgggagtcacgggcggttctttcttttcctaatctcacgcatgtgctgtaacaggaccacacatgcagccaacgaaacgtggacacatggccaagatggaagagacacaaatgcagatttcttcctctattgcatgccggcaaaagcggatcgtgcaacatcacatatggcggggtggggcttcgccgacgagggaggtagggcggtggtgtgagaactcgccggagcggcgcgacgagactgcgcgggcggcttgccggggcgggcagagatcgctgaccgggaacggagcagcaaggcggcgcgcaggggagagtagagctcagccaatgcctagccatgacatgccgcgcacaacgaagatgaagagggggtagacgtagaccttggggcaagctcgaacgaaggtggctcggtggggctctgggcgcgagagttcgacgacatgcgacgaatgatggcgtgcgcggcggggactcctccgcacggcgcagcaacgcgcttagcgcatgccggacggggtggctccgagtgctggctgcgcgggcgtcgaaggcagggggcgcaagtgtggtggttgttttggagagaggagggagagtgggggagggcgtcgagg

SEQ ID NO: 1573 - DNA, 757 bp, Zea Mays
gttgtacctggggcaacagcatccggattcatcgcatacttggagatggtactagggcgcaacacaagactcgggcatcaggttccctttcagtgccaaactcagctgcgcctcgtacatacttgattaaatcacctaaccctaaatccatatggaactggtagaaaaggaagctcaaaaatggaatgttcagttttgaaaatcagacttgggcaaatttcagacctactgggttttgcagtctgaagcagttttgggatgctccttaagggctgatcctcatagttctggtttataagttctgtaccaaagtagaagtccatactttggtgtacaagtttgattaaggataataccactaaaaccatttggattcagtggtccaaagattcaatgttttaaatctggattcagacttagcccattttagcacactgaaaatgtgtgtttggctcaattttggagctctctggtgcttgattcttaaggtattaggccatactgcttatgacaaagttgaagagcatctattagtgtgtaactttgcttaaaagagaggggcttgatgctgtgcaaaataaggagtaaagtgccctcaaagtcgatctgtcagactgtgtaaagggagttcagtttcagttaactgaatctatggtcttagggaatcgagctccactttggggcactctaactggtgatccatgcatgtttagctctggaatgctatagcaaagtaaaagccctatatatggtgaac

SEQ ID NO: 1574 - DNA, 758 bp, Zea Mays
gggccctcggtgctacctgggccgcctccgatggctgggccaccttcgcctggcccacccctaccggcttcccctggatttgctggtgctggcccaccacctcccggctgactgcacaaccctggcggtttctcctgggacacaaacatgctggcttcaaacttcaacacggtgaccctccagccaccgccaactcaagaatggtatatggatacaggtgccaaaactcacatgacatccaactccgataatctttgctcctctcaaactccttctttttctactccatccaatattgttgtcgacaacggttcccttttacctgtcactcatactggctctgtcacttctcctgccacatgtggtcccctccacctacataatgttcttgtttcacctcacctcatcaaaaatctggttgttcgtcaattcactattgaaaatagttgttcggttgaatttgacccttctggtttttgtgtgaaggacctccaaacccggaacgtgatcgtcaggtgcaatagttctgggccgctatatccacttttgctatcagttgttcggccattagcactcaccgctaccgtcccttcatccactctctggcatcggcgtcttggacatcttggtcgtgaggctttgtctagcctagtgtcctcgtgtgctattacttgcaataaaagtgatgttgaacacttgtgtcatgcttgtcaattaggacgtcatgtgcgtctcccctttcccacatccagttcgcg

SEQ ID NO: 1575 - DNA, 760 bp, Zea Mays
tgtaactcaaacataatttggttcagcatgcgtggagacttaaccatcattagattgttatgtaattttgttaattgtcatgtaatttttcttctaattgttatgcacttcgtaatttttaattcgatgaagaattattatgttgtgtgatttgtaagcgtgaaaacaaatatgtgcggttacttagttctaaaatagaaaagaacttatgtggcagtgggttcagactatgggtctgtttggttgggttgtgactgtggaaaaaaaaagtcgatgtgagctgtgaaaaaagttgttgtgaggatatgagctattaaaaatcataaaatctagctagcctccctgcgtgccagtcaacttatcaggaaaggaaaaacaacctagctagcctcccgattggaccatgcatggagtatatagagaagaaagcgaatcgggattagcgcaggaagagatgatcatcaagccagcggaacaagaggcgtgccaagtacacaacctcctttcgatttccaggcaccaccatgcagcagtacctatcaagtgttaaagtgcgctaccggcctgttagaatgtagtgacacgtacggactcgaaacaaagaaactcgtttttttttatgtctgttggtttgactgcagaaattgaatacggctgacgcatgggggtccgatctgacctggcccggaccggactgacagttgcaggacgtcacggtagagaagccgctcgccgccacacacacacacacgatgtctag

SEQ ID NO: 1576 - DNA, 761 bp, Zea Mays
caatatttgctgaaacggtccaccacggtgaggatcaccgacttgcccccacccggggcaaagcctcgatgaagtccaagccgatgtcggtccacacggcctgtggaatgggcaggggcagcagcagtcccgccggatggagatgctctgatttgttgtgttggcaggttgcacagccgcggacgaagtcttgcaccacccggcgcatggcggggaagtggaagtcgcgacgtagtcgatgtagagtacgttgtaccccttcatggccgtccccgtgtatagccgccaccaattccggcagcagtagcgagtccgagggaacgtagagccgggcggcataagccaccatgtcgtccaggagggaccacggcgcccccctggtacctgcggtaatctcatcacggatggcgacgagagctgggtcttgaagttgagcttgacgaagacggtcgatgaagtcgaagcgaggtgcagagagagccaagactgcccctcctcgcaggtatcatgccgggacatgggcatcagcgacggtgttggcggtgcccgacctgtactcaacggtgaagtcagacccgaggagcttgcccacccagtggtgttgtgggatcgtcgcgagccgctgatcgagaaggaacttgaggctgtaatggtcggtgcggacgaggaacggacgtccccataggtacggccgccaatgtcggacggcttggaccagcccaatgagctcgcgctcgtacgctaccaaggagcggtggcgg

SEQ ID NO: 1577 - DNA, 763 bp, Zea Mays
ccaaaacctgccctctttttctcggaacagagacgacaaacctgaacatatcattagcgtgacgataataatatacaaagatatgaatgaggccagcagcagcaggtttgtcgtgtgcatgcgcaatacctgcctgatcgactgcccctgaggatgaccgtacgtacgtaggggccagctgaggaacacagacacagacacagggcccccatgcaggctgcattgtcttggtcgcattaggacacgagattaagggaagggtgggtcttggatatgacaggatgcatcgccggccggccgcctgacgacgaatgctgatgggacgacgctgcgcgcgctgctcgatggatggacccggagctcatcgatcgatcgatcggtttgctctagctcaacccgacccacggcgaacgggtgaattccggcgatgcagcagaggagagcacagcgctgtcggtggattgatagacatgttgagtaaattgttcgtctctctgttagtttaagctgcttgagtccaaaacggaggcaggaatgccggcgttggaaggtgacaagcaggtcggactcgacctcttggcaccgaggtcgcttgtgcggtgacgacgccgatgagtgccgtcgtcgatcggtgacctcgggacgtcgggggaggaccaccgccggcgacggtgaaaagggagtccacgcgtttacgatgccgtccagcgcgctcggcactggccatcgccgccagctagctgcaatgacgtcgtcgtacgtc

SEQ ID NO: 1578 - DNA, 766 bp, Zea Mays
gaaaagagcgcaagagtcaaaacgtcagagtcacagctcaagaacacgctcaaatctctatctaatgaatcagtagcatggtcgcggagtcttggagctgcagtatgcttttgtaacagctccatgcgcttaggggtccttttatagccctaagggaccaaggagccatttgatcttcatttggaaggcactgattgccttctgttcgtgggtgcaccgaagtgtccgatgcacaccagtcactacacagtgcaacagctacagattgtcgattgctgctttccacttctggggggcaccggactctccaatgcacctgttgaccgttggctctggctgacgtgtcaagtatccattggccgactatcacaccggactgtccggcactccgcacaaactatccggtgaaatatagctgatgaagtctgttttcccaagagtggcctgttcggccagactatgcaccagactgtgcgatgcacaccggactgtctggtgcacaccggactatccggtgggtggcaccggactgtctggtgctacgtagaccagtccaacttgcttgtttttcatttcagttctcttttgctccttttgacttgacttcatagcctaacacttatacaaatatgattagtacctaaaacaattgaataagtgttcggagcatacctttttcacttggaaccatatggatttgtggtattcccactttcaagtctaaaagtgccttttcctcaatttgttttaactacctgtgctcatt

SEQ ID NO: 1579 - DNA, 770 bp, Zea Mays
tttaattctcatattattgtttatgagcaaaaagaggagcagaaaaaaccagactatcatttaactatttaagtacagcccacgcacttatgtggacttctggtaattgagaactaaatgaggaatagcaagcatttatccgtgactctccaacgctcttacacactcatcatatattaaattgttgccatgtggtagtggcagtgtggcacgctgcacaggagaaatgtactgcgcgcgtacaaaaagctggcatctagaaccactagcaggtacagaggaaaaggcaaataatagacactagagatcattgactattcatcagcattttgtaggcccgaccagtttcatgggccaggcctcaggtacctcaattatgctgggaggctgggactcgtccactcatgtgcgtgatgcttcatgcacattcatatcggtctctcggattctcggttagtagtggtcatcattgtctgctttcatcagacattgtcagagtaattcttgattctccttgctcttgctgatcacccgtagccgtagccatacataatttattttatcctggagtgacattgaaatcgaaccttttaaggtgattattagagaaagggtttcttactttgttcgcagacaagaaaagagctagtacatatttacctggaccgtacctttacttggatgacgtggttagtttaatttgtactttggaatagttagtagaatatatgttttgacaactcttcttttggatgaaagaaacactccct

SEQ ID NO: 1580 - DNA, 772 bp, Zea Mays
ctctgatccaagacatgctacgcgatatgggtatgaaggtgagttgataggaatcggtcttaccattgagggttgtgcagagatccctgcccatggggatgttcgggccacggcgaacactattgctccggtgagcaatcctccttcctatcgccgaccgagcacctgggggccacgaaagcgatcgggagcccccgcgactccaccaggtgcatccttagggccacgacgaccacataaatatcatcgagctcacgacagatctccgtgacggactctcgatattggcgataaatcatcaccgattcaaccatctgtgcgcccaaaattacccgcacacctcctccaatttgcttcccttccaccatgagaccagagcgatgatgggtgcgcgcatgacgtcgatggcttcatcttctccttcaccgtttgtttgtatcgctacgtcgatgcagctggtgatggttttgactactgcagcggctcatgacgggcatgcagagatccgagggtcgtcgcattgatcagattttataccccgaggagaagaccgaggcggatgatcggccggctaacacgacgaggttgttataggatggaagggatgagcctgatgaacctggctccattattagtgatcagactccattgcgtgcgcgcgagtgtaactggacaataggccccccttgtctgtccttatcaatggacggctgacgcgcgggcctgcgaggcagagagacattgcctcctgaccagcgcctgggaagtggac

SEQ ID NO: 1581 - DNA, 774 bp, Zea Mays
gttaattccttaaaacatcaagggttttttataaatatgctcggcgcgctacaggcggaggggtacagagagtttgaggctgttggatctacatccagtggtctggattagatccagcccgcccgtgaataggtacgctacaacagccacaggatagaggatcgacggtctataattaacaaaggtcgaaccattcatacccattcgatcctgatcggacggatcaccgatcgtctagacgaaacggtccccgacttcaatcgtggccgcccacgaggagatcaacggccgaggcttcgtcttccacaacccacctcagccacagaggcggagtagccaccccggtggtgcgcccaccggcaacatggacgatcgaccccaattgctcaaacccaagcgctaattggtgcaaacggaagagatgaagatgccgaaccaaatggagaccttcctaccagaaatagtggtgacagccatgctgcccacgacacggtgtggattggtgagtgccatcgtgcaattgtcggcgtcccgaccacggcccacgcctgacgaggccacatatatgtgaggagggatccttcgctgccccagtaccacctgtcgagactgaaacagatgccggtgggcgcactggcggacttctcatgcacaccatgcatgcgacaacccccgatgatctcgccatggactttctcggctcagtccccttccaccacgtacgagcacgcgctgatggttcgacacaagggccccgcgtgtgggatcttcaaa

SEQ ID NO: 1582 - DNA, 775 bp, Zea Mays
atttctgacctattacggtttttttccctgttgcggatactggaaatgttggagcctttgtttttgcattcaagtgccatttttttttcttggttgggtaagtgtgctctatcagctgattctactctttgtgttcaatgtataataccagaccagtgttttagggagttccctttatttgacattgtagattgaataatgcactgactgatcaagagtccattgattgacttcggtgttgtttggttgcaccatcttgtaaaaataattttccgtaaagctaagtggctagctgtatgtatattgcaggcataataaggtgatttatatcaatgcgcatgtcttggtatttgctgatatttttttccttgttgattctcatggtgtagtgggagtgtcatcttcagacttacgttactgttagcctggttctaatcaacgacttatctatttcttattatataaatgaagtgatcttctgagttctgacctttgctgtacacccagagatcatttttctgagttctaacctttgttgtacacccagagattatgcgggtatcaagcattgtgcacaaccatggatttggcgatttcgacaggcatcggtttagaagtcctagtccaatgtcttctccaaaccctagagctaatctccctggcaatgggttcagtccttggagcggactacaagaggttttcctcaaggaaccagcatggactggcaaggagcacccccaagtcctagctcccatgttgtaaagaagattcttcg

SEQ ID NO: 1583 - DNA, 776 bp, Zea Mays
cccagcagctcaagtgcgtcaaccacctcgcagatggggcgcgacctggtgtggatctgccggagctcgcagaccggtcgttggtcgagctctaccgtggtatataattcccccctcaagcctcgcctcctcctcaaccacccgcgccgccaccggagaaaccacggagtagagagaaagagagctcgtcatcgcgagaaaagggtgagatagacgccaccgatgcactcgtgtgtgcccaaccattcaggccccactgctggcgctgaacctttctaaggcctccttgggttgttgcgcggtgaccttggacacggaggcgacctaggatctcggggattcctcgccggaattggagaagccgtcgtgctcatgctctgccgtggccagggatagcggcgctgcgattcacggtgaagagcaggtagcctaggaggaggtctactatgaggagtacgagcttgtctaggaggtgtctcccagtcagctttatggcgccaaggaataattattagttcgctttattgttatcatttatttttgtaagacacttccgcaatgtaataatgtttatgacatttatctctatacacttgtcattatttgtgtttttctttggcgcacataagatacgcacccgactttatcccttaaatccgggtgtgacaggtttggaatgatgaaggcatgaaaggccttgatgaattaatcattcaagcaaggtacctatgacagatacaagttttgagaaatagtttaaaatgagactagacgct

SEQ ID NO: 1584 - DNA, 780 bp, Zea Mays
gccgctccgagccggctcgcgagcctcgagcttaattcccagtcctacttatgccttctttctcgcttccagtcatgtcatcctcactgagtccgcctccccgctccactccgagccaggccccgtccacctcgcgttcggatccctcgattccgacctcggcgcgccacagttgtacgcgtgggggcgtcccgtgagcgtgagcctcctcccgatcgaggcccaacccatccccactgcgaagcagaaagctgagttctactggcccaaccacgcggcatggttgctcgccgcgatcgacgcgctcagcgacgcgaccaaggaggagctggccggtctgatccgcctcttccacgcggttggcgctgctggtgtgcaggctctatggggtctggatgtcccctgcggcttacgcgtcgccactgtggatggtctctgaacgacagttatgtacgattttccaattgttggaagtggagattatcagtagggagaagacgatggtgcagaccagattctttgtaatggaggcatgtgaagtgatcatggggttgcacagcgaggggctggtgttggggtgcctcggaccctcggtctggactgtttctgcctcgttcgctttggagtttggacactgtctgcttgatttcaatcaggcgatggccttgtactggaatgtgttttcataatgattgctcatatttccttgtgtcattgtgccttttgcttttatatctaatacaaataacagttatgcccattttttggcttccatatatt

SEQ ID NO: 1585 - DNA, 780 bp, Zea Mays
aagaactagaactcgtcatattcctggaactcctcgaagtcatccatgttgccagcatcacctcttgagcattgggtgcactggggacaacctagggtgggggtggtgtgtaaagcaagggtgagtacacagcaatgtactcagcaaatgtcccgtttggctaaagtggactagttgtatatggagttgtgtaacaccccggggtccaccaacaccctggaatgctactaaacatcacttctgacatctatatataaaatttcggcagcatcccccttgcaaaattgcataaatgagggggcaacagtgtataaacatatatcatgacaaaaacatactaagtattattaatcggctagcaacgataagttaaacatacgacatgaagtgaattaactagtgcgcacgactagttaaaaaaaacaaacttcctttgacaacaagtttctaattaaatcatggctgtgcctgggcagcgttattgtgagagtgaaagtggacgtgctgctactcccctcattcccaacatgtatcaagtacctgcattgagtaatgcaagagtgagatgacacatctcagcaagtaaaataatatcaaactgtttaaccacataagaacattgtttaccaccacttgattccacaaccttcttattacgaaggtgcagcacgtatacaacgtacaacacacctagtcaccacacctcgcaggtagaaaccacaatagtaacatagtaatgtcacacttcatatatacctcatgagtgcaaatgtctgcaaa

SEQ ID NO: 1586 - DNA, 781 bp, Zea Mays
cggagagagagagggtggcggtgtgcgccgccgggggcctcctcggttgtggtcagaaacgagtcgatgatggggcctcggggcatgtccgagacgtcgtgaagccatgtggcgtgtgggagatgtggtggttgtgtgcgggagccccagtttaggttgaattgctcaccagaatcatgttggtcgtagatccgcttcgattggaaacggcgctgtcgacaccacggatccaaggtaatgcgacttgcttaggttcaccaccatacctacattgtgaagtcgtgttcaatttacaaattggagcaccagggaaccccgacaccggtcgtcagtggacactccgctgtgttggccgcgcgactctatcgtggctgggaagaagaagggctcccagccgtcgttcaattgatagatggcctagattggtaggtgtattctctcagctagagttgatatgtgtcgtaagagggagatcgggtggatctaggttggtcccgggctgtcacaaccagttttggaaggccaaccgaatgcgaaccatgtacgtgccaggatcagaaactcacgtacacaacgattaggtaattggacatcatcacacaatgctcaaagtaaacagcagaaaggtactttaattacatcaaaatgtccaagacatccacagagtctaatacataaccattgtctttaacataaatatcaaagtgcggagaaacgaaacgtagatgataagcctacacaggcagccagctggaggtttgccactaagataaactagaac

SEQ ID NO: 1587 - DNA, 781 bp, Zea Mays
cttgcagccaccgttgcttctctgcctcaaaccgcaggacgcgctccccagttccggcgctcccctatcctccagcggagggccctgatccccatcagctggcggcctactctgatctcgcagccgccattgcgcctcccatctcgattggaacctgccagcgcttgctgctcacacatcggcgcagcacccaagtgttcacacgccggcgtggctagtaccgatcatcacccgccagcccccactcccaaatcgccggtgcgcgcgcttggttcctcacccatcggcgcgaccatccactgctatgctatgtgcccatccaacctcctcattgtcccatgaatttcaggaaagcagcaataggcacagatcaagggtcgtcgtaggtcctcgttaaacgccgccatagatgcaattcgcaagagtctgcaggtcccatgtctgccgcgcggcgtcgctgcacggccacaacctccacaatctgcatctcgactgcaatcgatgttcagcagtagcgatccttctacgacgatgtctgatcggccgcaaccttcgtgagcagtcagtgatcggcaacgacaatccatcttggatgatgtctaattacaagttactcatgaacttaagttaactattttggttcatttattgtttagttggtgctcttatcacaaatccttaccgttggtatagtgtttctagtggtgttgaattgtttggagtggtctgtcaacatatcataattgtttagttaaccatatcataattgtgtccattaaca

SEQ ID NO: 1588 - DNA, 782 bp, Zea Mays
tcagagcgatggcttgctttgagcactctaatttcttcaaagtaacggccgccggaggcacgacccggccagttaaggccaggagcgcatcgccggcagaagggtcgagccggtcggttctcgccgtgaggcggaccggccggcccggcccaaggtccaactacgagctttttaactgcaacaacttaaatatacgctattggagctggaattaccgcggctgctggcaccagacttgccctccaatggatcctcgttaagggatttagattgtactcattccaattaccagacactaacgcgcccggtattgttatttattgtcactacctccccgtgtcaggattgggtaatttgcgcgcctgctgccttccttggatgtggtagccgtttctcaggctccctctccggaatcgaaccctaattctccgtcacccgtcaccaccatggtaggcccctatcctaccatcgaaagttgatagggcagaaatttaaatgatgcgtcgccggcacgaaggccgtgcgatccgtcaagttatcatgaatcatcggatcggcgggcagagcccgcgtcagccttttatctaataaatgcgcccctcccggaagtcggggtttgttgcacgtattagctctagaattactacggttatccgagtagcacgtaccatcaaacaaactataactgatttaatgagccattcgcagtttcacagttcgaattagttcatacttgcacatgcatggcttaatctttgagacaagcatatgactactggcag

SEQ ID NO: 1589 - DNA, 783 bp, Zea Mays
catggagcttgttctgaagtcactaaagtcaggttcgccacccagcagcttcgcggacccgcaaggacttggtgggaccattttcttgccatgcagccagaggatcgagaggtggaatggagggagttcaaggcagctttcaggggacaccacataccagccgggattatggaccaaaagctcaatgagtttctggcactcactcagggcaacaggacagtgttgcagtatgcccaggcttttaatgacttgtgccaatatgctggatatcacgcagacacgggtgagaagaagagagacaggttcaggagggggctcagcactaagctccgtgatcgtctcaacaccgtcagggccaacaactacaatgagttggtcaatatggctatctcccaggaggactgcattacagctcggcaggcagaaaagaagaggaagacccctgtggcaggaccttcagctcagccacagcgtttcaggattgtgtccgacactcagaacaggggaccccaacagcagcaggggagatgggtgatccgaccacagcagcagcaggcacccaaccgtacccagtttcccgcttagaggaacaaccagcagcagcagcagtatcgccaggcaaacgacaacaggtgtttcacttgtggcaacaccggacattacgccaagaattgccccaggaaccagcaggggcagaatgttaatcagaaccaaggcaagaggcagaaggtgcaagtgagacagggcaggctgaacttcaccaccatggctgatattccagag

SEQ ID NO: 1590 - DNA, 787 bp, Zea Mays
cgcaaatccaatgattgtaaaacagcagtttcgatggtgagaagtttgcaacacagattcagttaacatgagagttcagagagtaacttcagcgctcagtttcaaacatagataaaatatcagctgactatcagccgaccctccaaatctaaacgcacaaattttggttctcaaattctattaggggacctttttatttgggtaaatatggggagtatttagtaaatgaaattctgtatggatgtgtcctctagcatctggtacaaatgcaagttgacaacatttcatacatggcaccaagaatctaccagaatcagataacagcatgatgcattcatgtccgtatctgaccacataaaaatgcagcccctttcattcattgtgactataaatgtgttagttcgtacccagaggcggatctacagtgtgggcaatgtgggccatggccccacatcaaattttgtaatattcataataccatataggattagattagagggagcaggagtctcagcctctcaggtccatttcgttccagcgtccagccggacagccggtcacggcccatgccccattgggccattcgttgttcacccaggaggccagaaaatctcagctctttcgtcacgtcttctgtcggccgcctgccgccgccggccgcctgcatcccaccgcgcccgcggcatcgccgatcgcgacatcgccccacaccacaggacacagccacacagagcaaatgagaaggtttttccagccactttcaagaggctctaacactggtgctaat

SEQ ID NO: 1591 - DNA, 788 bp, Zea Mays
ggacaaaactgatatttcagttgagttgtgctgagccaacaaggtattggtgcatggttgccatgtgtgtttgagctcacatcgtgctggcaccctgagaattcttcatcgcaatgagataaacaagtcaagtgaacctgccctagccctatccttttatttcagtgctgttctagtgatccagctctagttgttcctctggtgtctctgtggtctgtgttgcaagccaaagctcttctccccagccaccaagttagctctctccaattcatcaagtgccactccattatctggtgaccaaagcagccatccttccacctcaccgtggccaaggatcttcgagaggtgtttcggccatgttgtgcctgttctctactcctcacaggagcttcggaactagaatagcttcgatacggaacaatggaagagcaacgaaggtagcttcgtcataataacgcaagaagatgatgcaaggagaatgtgtcatcttaaacactgagagcaaaagatagtattgtccttgtattatttgtaaacccagtgtgtaatctctaagggcataaatataataccgtacgaagttgtacgactccctataaatagacgaacagtgccctgcataaagtacctttttggaggcccgaaaaattgttgtgtgtaatcttctctttgcctcaccttcgctctaaaccatttttctagagacgaatgtatgtttataaacttaatatatgaaggaggagaaatatcctattgatatgtaagatgaatcatcatgcttaaacgca

SEQ ID NO: 1592 - DNA, 789 bp, Zea Mays
gtaaaattctagtattctggtggccatggagatcgcacgatatgatcatggtctgtcaacgtgatatgataaatcgcaaggtgaagtttgtgttcgttgctgctcgtgttgaatacttgaaactcagtacaccattaagatgagctacttgtgcagcgaaggatgcaacaagactggtcgtctgatgatgctctgaaaactctaggctgtgctccgaaaaattatgcagaccccacaatgcttcatgtgtgaacccaacatgtattgtacttgtacatatagatatagatggccaataagcaccaataagcacgaggcccgcgagcctggcataaagcccgctgtttaggcccaatctgagcccggcacggctcggtactacgcgggctctggccggcccggcacaaataagcgggtcgggctcggacaggaaattaggcacggcgggctagcccgtcacggcccgtttacctctaaaccagttaagcccgcttttttgcactaaaacattcttatcgacccgcttaccccattttttcggcccgtttttttcgtggtccgacccgtttaggcccgctgtgggccggactcggacagaaaaacgagcccgtgggcttagatggcctgacccgattttttaactgtgtctggcgggccagacttcaccgggctcgggccaggccgcattggccatctctaattgtacatcaatgaaactacacttatgactgatgtgacttgagattggatatttctgaaacagaagcatagtgaataataagaatctct

SEQ ID NO: 1593 - DNA, 792 bp, Zea Mays
aagccaccgatcgccgtggccagcgtccaaccctgcagcaagttcagtaagaagacctcggttgaatccgcggtatatacaagatcgtgtagctcccctctgatcgaagttttgggttgcgaatgggagaattgggggagggcgccaatggatgccgccatgggttgggcggcgctgccatctgttgatggctggtggatgggtaggatgggggaaaacgttgtggccaccgatttctgcatcaacagctgggattgggccgagcatacctctttggctagattaaatcttggtcgttagatcggatccgagggatgggtgtggctgatggcgtggacgcacttcggccatggatctctgatcctgcggctaggaacccttaccagtgtataaagtatggggatctaatcgcagccgttgatcatgtatcggaaggctcagctttccccataccccttcgtcgtgacttttagctaaagtggccctcagattgattctatttaacccacagtttaggttagtattaaaaccattactgagaggccctggaattaatgaaaacaaccctgaatcctcggatatttatgcccgcggttaagaatactcaatatacttataaataaattcaaaaatagtttcctttataaaaacaattcatagatattggaaaaccccataacttcttcattttaactctgctttagtctgttcctgttgcgttagcttcttaataagtttgcctacacattaaaagcattatttctatcatcccacatacttttataattggat

SEQ ID NO: 1594 - DNA, 793 bp, Zea Mays
gcggtggcagtggaaatcgatttttactagcggttctcagttaaccacctataataatgttgatttctagtgaccaggtctaaaaacgaaagtgaaaataagttcacaatacttagtgtaatattctatacaaatctaattaattaatcctatgaatgtttgaccgatataaacagcgctgtgacgtttttttaatagaggaattaagcatgagttttcttgccttggtaaccgtttcccttggcaagaaaagctcaatcttccgacctcctctagtctctacactagtcctactttcttacacagatccccgcctgtgatggagtagttagctatacatgatactttgcttgaagctagctgtcacgaagcaccatatactagattaccagtggtacactacacacaatcatctgcgctagtgacttgcgcgtgccgacgaatcaagatgggacggggcatgagtcctgattgcatgctaatgctgctggtagcgcagtcagcatccattccagctgatatgatctgctcctctactccacctgcgctgctaaggtaaggatggacttgccttttgccgcgcgcaaccacacagccgacgcaaaatggagcgccccccgacgccccccactactagtgtatagttagcgacggagacgaaaagggcggtaaaagttaaagatcgcttccaagctaggcaacgctaaaaccagcagcggggtggcgaagggaggatggatggctgtggagcactagtactagcgtgcacccacgcaccgaaaggcccggtggt

SEQ ID NO: 1595 - DNA, 795 bp, Zea Mays
cacaaatatatacttgatgctgaaattaacaacacactaaaactcaaactgtcacgttgtctcactataacgctattattattgagcaaacaaatccgcccacaatagtgcaatcacacccaagtatttaatactagcagattgcacaaaattaaacagtaaataaagtgaggcaacgggcaactcacaacacgtagattgtctacgtgggaataccagctcaacgaacatgaagttctatcccagaaaaccaattccgccgcccacgttcgggcctgcacagcgggaagttgacggagatactagagccgctgctgagatcgtgtgagacgtccacagcaccagcccgagaagacgaacaccgcgcagcagagagtccaaacaccaggccacggtggacaataatcagacgaacacagcgccacataggcgcacaagaggagcactagaacacgggagaaacacactgcacaggagcagcaattcctccttattttcttccaatcaccaccagccagtcaaatagaacgccaggaccaaaatagatcaaaccgattggaacagagagcaggagagaagaaccacgaaccggtgttttgcagcctgtcgctcaggggttgactgcccatcctttaaggagccgagaaacgaaggaggcaaatagattagcgagaagagcggaagatcgagccgtagaaatcggcgtacgaagaacgccgtcgctgctgctctcaaccaccgcctatgcgccagcctctgccttactcccgtaaggcagctgaaggcaccgaggtg

SEQ ID NO: 1596 - DNA, 795 bp, Zea Mays
ttctacactttacgatggaatagtttgcagattcctctattcatattttttgagtttaggtaattaactttatggatcgtcttaagtcctcatggttggggagtatgtactaacaactaaagtcaagactaagcaaaatgaatcaaacaagtaaagcctgtggctgcctgtagcttactgacaaataaaaacgaatcaagttggtaccatagtaacacaagaccagttgtcattatccttttattccatatgattatgcagtttatgatggtaacagaacacttgagggagggggaactgctgaagcgtgtttcatcaagatccaagcaacacatgagctattgattcatgatgaaaggagaagggcatatgatagagagcatcatgtgaacccaatgaagattaccaccatatcatgattcatcagctctaacatgtgtgagccaacactatgcttctccacttcagtacatggatatgactcttctatgtttaagccacgacaacttggtgtatttatgccaaagatttttcgagcactaacacaccaaaccaacgcctatggagtgcttttgtatacaacaatcacctgcttcttgcaccatccatggataatctacgtagttacatattactatactgaacatcctttcatagactacttgtacactgcctttttagaaccattgtaaaacctcatacggtacgtcagcgcctttgaaacagagatcaactgaacaacctgttcaatgtttccttttatttcatatgtattatgttgtcatactatgtcca

SEQ ID NO: 1597 - DNA, 797 bp, Zea Mays
gcacgttttctcttttcacgtgatctccccatgcttaacgcgctccgcctcgccaaagtcatctaaatggttttaccttcatacctccattgtgtgtctcgaaggggtacactactccgtcgatgaagtgatgtgcagaagacaagacagagtactcctaattccgttttggcaaaaaggggggccttccaagaaacgagaactttccttttggttgaaacctcagtgggcgtgtacaacctagttgaacccatcgaaaagccttgaagtgatctcctggtcttacaccgaggaaatgtgcaagtgacttgcaaccatatactagatggagatattcacactcccaagtatgggagaatgacatcacttctcctggggaatatgttgatgaagctagcgtacgagtgtatgttgatgaagtccaggcttatggtcttctcggtcgatgcatgtggaggccactagatcgatccgctgaacttctgatgtttgatgtatcaattctaatctttttttaacctatgtgtccatatgtaataaataacgtcgtgttatgctggatatggataattgttatcattaatgaattcgatgtatatctgagtaagctttctggacacacatacatggtgtgacaaactagctaggttggggcatggtggtctttaggccgcttggttcagggcctaatctgttgcttgatatcgtgctagagttactcaaagttttcgccaagtaatttagttgtaatcacaacacaaggtgagctcaggggggttgtttggctctgtaatcac

SEQ ID NO: 1598 - DNA, 798 bp, Zea Mays
ctcttccatggcgccaagcccttttcactcgctatccctctgcttgacgcccagccccagctcgcccctgccctcagccatggtgcctagccaccgccgcccctactttccatggcggcacttcctacttcctggtggccggcgccctccccaacctcttctctactggtggtcgtcttaagaccctcccatgtcgcctagtcttcttcccatggcgagcaccgtcgtcgatctgcgcaaccgctgtttggttgtcgttccacctccgtcgacctcctgcatgcatgaacagcagcagccccgtgatctccacgtcgcatgcgccgatccgatccgcgcagccccaacgcgtcgatgtcgttggctgcatgatttttgggcagcccggttgcggtgtcgtgaaacccgatgaggcctcacgtccctgcatgccttgtgtttgatgtaatgccaaacctataaattgatgtcgtttcttgtagccctctgtcgatgacacgtctgctctttatcctagctcctcgtcgtagttccgtgcgttgtcggtgaggcatccttttctttttatattcaatttagttttcacttggcatggatggttagctgttgattacatttatatgtatatgtgtgttttgtaaggagaggaatttcatgtgtgtgaagagaagcaaggcatgggacgtttgctaggtgtcaaatagaaagaccgaacccaaaccatcgccgtgttcacggacgccgcgtcgagtttagttgtggtaagtcgatccattgtttccgttggtcggatggatg

SEQ ID NO: 1599 - DNA, 798 bp, Zea Mays
gaaaaagaaaaaaaatgatgaacagggttgagccgaattcagcccgagttggcccgcgaacagggaaaacgtgcgtgctcctacgcccgcgttgcttagtttgcgtcgaggtccctagggttttaaacaatcgcgaagcgccccctggtactattcttatgtgtcactgacatcttcacttagacccttcccttctatctcccatcacgcccccacgctcgactacggttgaatacctggccccggctgcgagtctcgccgtcggcgacccccatcacttgtagtaagcacactgacatcaacccagaggctccctaagtagtttaccgagactaacttgatggtcccgctcatagaccttgtctgctcgcaacgatggcagagcaagagctccagcgagtccgatccgagcaatagaacgcggtagtgtttaaattgagggtaggacgagtaccactaactcaccagaggtgtggtacgcgcatgaatttggacggagcaggcatgggaaagtgggtcggcgtgcaaggtgtccatgatggcattcctagcgacgatgcggtgttctcggagctctgcggcggtagcattcaatcggctggcacaatgagcaaccatatactaaaggcatgccaaaacaagtgatgcggacatcaacaccaacacgagcacatctacaccagcagcaccttctctagcccaagcgccaccccttccacctgggccagtgactcgggcccgtgcaagagacttgaactacatcacgttgttaaagaacgaaggcccggaagaatagac

SEQ ID NO: 1600 - DNA, 798 bp, Zea Mays
gttgataatagatattcatcagggtctctatagcaaaactacaaggcggcttaacctggacttggttcgagccatccgatcctgatcctaaagcccagattagatcggaccagatctaaaatggtacacaatatcagccgctagattatgaatcgtcggttcagatttaaatatacgagatcaccacggatccgtccagtcgcatcgacggcctagattccatttcacgaagagttacgctaacacctaatcatatccgtccgcttcaagatcaaaggctccctgaccaaccctggataacacctccctttccccaacagctcgaggtggcgccgcctagggccatggcggaggttcgccggagagtggcgatccagcctccaaataatccctcctgaatccgaaaaggtgtagaagatagcagagacagtggggaacatgatggagacgatcttacaggcaatagagttctggggagccggcccacgacgacctgcggcttcacggtgttgaagggacttcgatgagcaattggtgtatctccggtggatctcctcgcttggaaatgccacaacaactggcggataatactggcaatcctccctaatcgcccatcgaggacccgatgtcacgaatcaaccggtggcgcgatttgctctctttctctctctgcttcgcggcggtggaaccttcctccgccctctctctttgggttcgccattgtttctttggagctggtcgagggcacttgggttgaacgcggctccacattatactctgagcggcgcaagaattccg

SEQ ID NO: 1601 - DNA, 799 bp, Zea Mays
aatagcggtgaggtcacgagaatctgaagaccaacttggtacctgggatctcaagtctaaggcaagttgtgcccttgatcacttttctttacctaataatgttcctgttaaccactgtgacatgctcaggttaatttgatggaacccaataggtttccctagcattatttattccctaccttgcaaacaaaggcactattgggtagtttcgctattgctctacctggttttgggaaattaatgttctattatgatcatgttccagttatattgttgttttaattattgttcataacaagatcattgtgttaattggaacatggagcgaccacccaggaaaacagtgctaccacgagggtggcatgggacacccttggttgactaattaggaaagctagtggaagactaccttacccgaaaggggcaaaggcggtagaagagctgcgtatagggaggttctcgggtcgatcatgctgcgatggcttttcagacgagggattcctatattgcccttcttagaaccgtagcgggttttcggaagctagtggaactttgtaaaggcctcgttgtggtaccctgcctcgtctcctcggtagagatgaatggaaagtcgtgatcccttggtaagggtaaagatgtgcaacctctgtagagtgtaaaactggtatatcagtcgtgctcacggtcatgagcagctcggaccctcacatgagtaatttatgaaactaaacttaatttgccatatgcattgcattgtgggtgttaattttgatctcttattaattgggttggtatctac

SEQ ID NO: 1602 - DNA, 802 bp, Zea Mays
ggaaaaggggagtggcctactcatgtttctctccaccacaccgctcgtcctctggatgagaacaccagccgactagacagagtggatgtccctcccaatccaccgtcgatggccactggtctccagagaacgtgggcgacggcggagtggaggacgagcatgccgtcgcgccctgtttggagcggtgcgaggtgctggtttctgcgatcgcggggatgctggccggcgcgctgagggagcacgacaagcgggcggccatcatcgctccgatccacgacggggacgccgctgcaatcgaccacctcaacggaggtacatgcttttctggttctccccaccctagcatcgtaccattctatgcagacaactagagtatgagtactgtatcgtggagttcattcgaaccaagattagtgtcatttagatgacatactaacaactgagttactcttttctaattctgtcaccatggcgtggaaatgcggcgacatcccaaaatgtacttggcctctttgggattgaaacctatctgttgtttcttgcgactattcaggtgcatatggacctgatctcaactttgctttgtcaaactatacattgtttcttgtgactgaggatcttgattgaatctacttctgctgttcttagttgcacttaacattgttagagtatatcacgactaggatagagttagttggtgttaggatccttgtgtaccggctttggcccaagtcatgtaaactctatatagtgtctgagaggctcaatgtaaataatccaattccacctaatccgattcgag

SEQ ID NO: 1603 - DNA, 803 bp, Zea Mays
tattgtaaaattaggtatccaacaaaaaatgtatcaacccttcaactaagaatggtctaagcaaaaatcaagagaaacattttaccaaaagtcgcatagctgcaatgaagttctgaaactaatgattctgatagtttgtcgattagatcctcctttcttgtttcattgcaacatccgactgaatgggatgataggtcgtcatcttcaaaagtatgcccatttgatggcagatgaaagaaaaataatccagcaggaaatctgtgcctcctcatcacccatagagttaactcagcataaggagtggattggattagagcaatgacaatttccagcatcacacacacccagataaccgttgttgtcaagatagagaagaatacatagaatacagaagttgtaggtataagaagtaggattggtgtaaacaacagggaaccaaccacgtgctgttcaactgtgtagtcataactatctaacctctgcctaagaggattccatttgcgccctctgttatggcattagcaagtgttagcaaacttacgaagcaaatatgaaaaaaaaactgacaggaaacaaacacctcatcagatgctatcgtaacaacttagcaatatttatggcatattaaataaaaaccatagaaaagttacaggcaacaaaaatgacaagaaataatattaaaaatagctaatgttttatggtgcaaacattatgcttttacacacattaagttatctggctccattactagcttctatacacggacataagtgaaaagtaatcacagtcaaacttacttatca

SEQ ID NO: 1604 - DNA, 810 bp, Zea Mays
tcctcttccatccggatccgtcgatcgagtcggtagcttcatgtctgtcgaggggaatgacgtccggtccgaacgagccacggctgctgctgcgccgccgcgggcttcggaccaggcttcattccccgtgactcatggagacggcagtgatccgccgagcttcccgtgttgcagggcaggcgtgaggcgtccatgttctcatcagcaaggccggcaggttcgcttcgcacttcagagcagggttctaatctgaacccgtgcaagataccatgcacacgaacatcgcagtggcatcacgaggaaccaagacactcagaaacaaatgttctctctaatattccatgatccagtgttcatctgtagtctgcaatgaacactaacgccgctgctgaagcgctactctgctacgtgctacctaagataagatgggataatcatgctaagccagccatatatccttgctagctacacttcatttcgaggagcagatgctacttgcagccgctcagcatagaagaaacaaccttgctagtaacaatgtaacatcaatacaatgtagacattaatggtttggcaagaacagtagatgtcctgctcagagcagtgaagatgttgattctgttggtagtgtgttcttgttgtgttggtattgtatgcattgaagtaattggaccctgaaatgtgtgtggttgtaagaaaacctctatgtgtagtacaataacaatcttaactatgtccttcttgtttgtgataagtttgagtcgattaaatggtgagaaaaatgtgtccataatcgaagaagtcataaaa

SEQ ID NO: 1605 - DNA, 814 bp, Zea Mays
ctggggtactattttgcgaaagactaggggctaacgtataaaattccatagactcagtccaaccccgcagtggaccgcaggttgatttataaaggttccaggggttcttttgcaacttgacatgcgcgaaggggtatgaaacacccagagtcgttggatccacgtcgcacggcccaaattaggttggcgatgtatcaaaacgttatcttctaatctctaccgtccgctgtggatcgagcggtcctcggtcccttcatataaaccagcgcacgatcacaaccgttggtgaccagatcaacagatagggcgcgcctcctacctctgctataatcctgcccgctagtggtcgatccaacggccaggaggccatcgccttccacggtccgaagacagcggcgcgcgcggcaaccaaggtctccacggcggcggcatcaccggacacagccaacccttgattccgagcccaaaaggttcccccgaggtagatatacaaagtggagacatacgtgaagctggggaaggagtgcttaccacgaatcgcttgcggtgaagctctgaccacggcggcgaacgagtccgcggcgtaaaccggtgagtgcacaatctcccacggcggaacccgagctcccctcactttgctgtggtggccggcgatggtgtcctcgagcacgagtagggtagaactcacggtagggagatacaggggggtccgcgctgtgcatttatgggccatggtgagtccgcgccgtgggggagaagtctaccgcggctgcgatacttacgaggaggtagttacggtgatcacgcggttgtt

SEQ ID NO: 1606 - DNA, 815 bp, Zea Mays
tgcatgcaggggtagacatctcaccttcgcgacaaactaccataaggtgaacgtggcgtggctccctcctcgatggcgagagggcaatgtcgtcgacgagctcgacgatggcgaggctcggacgcacggcgaaggtgctgcgcaggctcatcgcgtctctcctcctgatgacgacaaccttgcatggtggggcatggtcggcgtgccgatggcgaggctgtgcaactcctccgcgcaacgaccgggcgcgcgcggggacgcgttggcgaggcatccgcactgggtcgccacgctgggctggccgcgggctgccgcgctggctgcacactaggacgccgggacctagggctagggtggggatgaggcagggctacacgtgctgcgcgggtggctggagctgggcgagaacgagcgggaggagcgcgttgggcgagatcgtggtggcggtttccgtttcctgtgcgcgcacgaacgagcaggagccggatcgagtggagtcagtttttctgaagaggaaacatatgacaggtgggcccagcatgcagagcaaggagcgatgtctaggccagagacgtggtcaggtgcggcggcggctgggcattgccctcgcgcggccgcctggggctgagcgagccggccatagccgactgggccgagggcgtgggacgtgggccagggtgagggggcgcgtggcgctgggcctcaggtgggctgcgcgctgcgttggtggggcgcgcccgcggcgtgggccgaccaggggagggggcaggctgcgataggaggagagcgagggggaggagctgggccgggatacc

SEQ ID NO: 1607 - DNA, 817 bp, Zea Mays
cccgtccgtgcggcacttcgtctatagccgctgtccgccgtcgagtctagctacccatcgcgaagtccctgctgtcagcctccgcacatgtcctaaactgtcatagccagtttgcctccatctcgtggaggcgttgcgctgccgtcgagtcctgatatcgatctggttgtcatcgaagtgaagcttagtttaatgctcgccaaggtttcgatcaaagattttattcggagactgtcgacgttctcgcaagttttaaatcggatttaatggacggtctaaccttgtgctgttgtgatggtgttaagtgccggtgggctcggccttcttataagtctaagtaacccttctatacttcttattgaggatggtcatttgagctagcatatatttcaaacttatacttttgtaaccactccgataaaataatgtaaaatttttgtaacttgtaaaatttggtagtaagaattccgctgcaaaaaggttggtgtatgtgatttgtgttacttaatcccgcggttctggttgttcgtggtttatccgatgtccttgaggcaatcggacggatcctgttaagttatctgatgcacatgcatagcagtctgaggtctttgagacaagaacaggtgcatgtgggcccaataacttgggaggttctgccacagttactggcattgtgatttttccaggtgctacaatctgccttcctccgaagccacaaaggggatgtatggcatcatggatcttgtcttcgggctcttgcatctgtctgaaggccttagcaaatatgatatcagctgcactgcctgtatcaaccaaa

SEQ ID NO: 1608 - DNA, 819 bp, Zea Mays
ctacaacactaaaccgacacctagacaagtgcacacagtatttgaacaagctggcacaagctaagaaaaatcttgctcaaggtagtctctcctttacttcagatggtggacctgttgttgttaatcccactgaatatgatcatgagcacactagagtgttaattgccaagatgataattgtccatgaatatgcatttagaatggtagagcataaatggttcaatatcttgatgaaatggatgaataacaattatgaatctattggtaggaagactattaaaaatgaatgcatgaagatctatgaatctgagaaagaactaatcaagaagagtcttagagaggctgaatcaataagtttaaccactgatttatggacatcaaatcaaaacattcagtatatgtgtttagtggcacattatgttgatgttgattggatcttgcaatgtcgtgttttgaactttattgaattggatcctccacacactggtattgtcatagctcaggctgtttttgaatgtttggttgaatggaaaattgaggataagatcttgacaatcactcttgataatgcttctagtaatgattctgctattacaaatctgaagtccaagtttcttgctagaaagaactcgagctttgaccctatgtactttgtagaagtttgcaaccaatattctgttaaagtaggacaagggttgtgccttgatgttaaaacaaggtggggttcaacatacaaaatgctagattcttgccttgactataaggaggcctttggttactattctgaaatagacaacaactatgaatggaaacctttag

SEQ ID NO: 1609 - DNA, 819 bp, Zea Mays
aaacaagcgaagtagtccacgggaaatgtaccaagtaagggtcctggttggttagttttaatttggttgtcaccctggtcgtcctctctggcgttgtcaaactatttcagtagctacacctagttcaatggaactgtgtttgcattgtgtgcatgcatgcaccggagctagctgagtgtacatagtgaagtgtttgagggaagtctgggtgacaagtagcaattgtgctggctagctaggtcccttagtgcagcatgcgctttttcccccccttaagtgcagcatgaactttggagatcttactagatcgaggaccagcatatgatacaggatagtgggggaaacaattaggtttggtgtccccaggagttctctacaagcacttcatgcggcactatatttatttttcagaccttttgtgaagtgtttgtgtgtgttgggggggggggggactcttgatgccaccaaccatatttggaaataatgtttagtgaccgcgggagttctctgcaaaaacttcacaagctgacacttttttagagcttttgtgaagtgtttaggagaattctcggtgccactaatcatttggagcatgttggtcaagtgtgtgtgccatgtcttgaaagaattaggtttggtgtccctaggagttctctacaagcacttcacgaggcttcgtactgagagcttttgtgaagtgtttgggggaactcttggtgtcacaaatcatttggcggatcttggtcaagtgtgtgacagaagaaattatttaaggacgtggatccatataccttgaaagaattaggtttggtgtcttca

SEQ ID NO: 1610 - DNA, 819 bp, Zea Mays
acgagaagctcgagttgtagtcgatctcagcagtctcaaccatgacaacaacagggacactaaccaccaccgtgctcttctccacgaccggcccttgatgggaacacatctgagaacctgacgggagtagcggcagcctgcattttctgatctaaacttcctgtatgtgatcaagtgttctattgaagtggagcgacagcttggtacagtatgatctaaaagggttatcgatcttgtgtggtgagcttccgttatatactgcagagccagagtggggtcccttgaccattgtttctaaaaataacttcattagtcaatagtggaaatataagtgtaatattctgtaagcatgacattcatgaaatagatgtcctcactagatccttttgctacctaggcatagagacttgaacacaaaggatacaaaagcacttactatgaatttagtaacatcaatggagctagtaatagggccaaagagtccaaccttcgtgtacatcataaggatgaagccacacatgatgtcactgaccatcttgtgcagcacccgagctacactggcactcagcgcaccacaacaagcgcatccattacagatcatgtaatgcttagaatatattggatggacaagaaagggtcgccgttgtccgcgacttgtgacaggttcacggcctctggtcttgagttcttcgagacccacttcaggtaggagctcttttgggtgttaggcttcgccatgatgcttcccgaccctgagctcgctaagaggctggggctcgacattggggtgaagaactcctcaggctcgatgagggggac

SEQ ID NO: 1611 - DNA, 819 bp, Zea Mays
tctcacatgtatttttgttattagggcttaattctaattaaggctttaagggctcaaaagggagcagacgatgagagctgtcagatagctcttgggaatcatcggtcagaggtcatttcactaaggaatgaagttctcaagaaagataaaatattgttttccttagtggacaagattaaaactagagaagtcaagcttagtgcacaaaccgaagcccacaaagctgaagtcgaaagtttgaagaaaaagcttgcagaaatgagtgaaaattttgaagttgaaaaggcgaagcaggaaataagtgaaatggtaacatcaagggtgcaaaagaatgttgaagagctttgggattccaaggagagatgctacgaaacaaccttggaatgcgccaaaaagctagaaaatagttttgcaagggtgggtgcatactctttggaacagaagtttattcgtggtgatcccgaaggggttatccagtggatcggcgaggaggccgaagcttttgatgaaatactcagcgatcgtggggatttttgcgctttcgccggtgcacgaggggtcgcggcaattttagagaaggccggttgtgaacatgttaaggccacagcccagccagaatctattttctcagcagatgacaccaaggacccctcagccgaagcctctttgctaggcgggaggttttactctgatgtttggatgaagggtggtcatgagatggctaatgaagccattaaaaagaatgagagagaatctcacaacgcccgagaagaggctaaacgagctgaagaagttgctgaacatgccaggatcataggt

SEQ ID NO: 1612 - DNA, 820 bp, Zea Mays
cttcgattgtcgtcgaccggatccctaggggttgtgaccttgggcttcttcagacttgtggacgggtaaccgggcgccgagccccctccccagcagcctctagctcatccgcctccacaccgcgccgttaccctgcgaccctgggtgcccaccgcggatgctggtggtgtagctgcgcctctgccccggaggtctccttgagtccaagctcgccgacgcactcaacctcgccaactccctcgtggaatgccgcgacggcttctactaccgcgaggtcggcctccatggcgcgcggcacctcaaacgctggatctccctgcaacactccgtcgcgccctacctctctacctagccccgcgaccaccttgaccctccaaacaaagtcggcctatctcctcgtggccggtgcggcggaatcgaagctcaccagatgtggaattcgcggcatggccgccgttgccgctaggcatagaatttggacctcgccactgcacaatcgccggtaaatcctacacctccgtgtttgccatggcctcggcatcgtattgcgtcaaccaatttcggggaatcaggctccagggagttgaatcctggattccgacgaacccaccgccatggggtaagccggtgcgccgctgtctggccaccaggtttggggaatgctgggatgaccattgatctggccatgaacggccatgatttggggctccataccgatctggcaccagctcatcttgaccgttgatcgttggtccagcgtgtggagttcaatcatggttttgtaaatcctgaccggaggatctagatcctgcggccttcg

SEQ ID NO: 1613 - DNA, 822 bp, Zea Mays
tttcattctgccatgtatcatgccaaggatcttcctagtgcattgtcattgaaggctcaagctttaattgaagcattagagggaaagtggcttgacatttaagaagcttgataaaaggttagagaggacaatgctgcattcctatcgcaaggatttgacagcacaagtttcatcagagaatgatcctgttgcctttcttccaaaagtcgttgctttacttttcctgcaggcatataataaggctattcaggcaccaggaagagctgttggtgctgttatcacactgctgaaggataagctgccagctgcaacctacaaggtattgactgattatcacagcactactgtgaaacttttagcactacaagctgctgctactgacgatgaagaagattgcacatcagaccgaatgcgagaaaggaaggaggatctggaagaaaggctgatgccagaactgaaatccctggtcctcggcacaaacaaagagtgatcaacaacattcttgtgcataccggaccatttcggcgtacatatacaaagcaacactcagcttaaaagtttttttttgctctgtttttgcaatttgcaccgtttgaaagcaaaagatagcaggaaacaggtttactgattgtaagaatctgactagtttatactcccgtttacattcctgcactaggtttctactgataacaacaaaattatactatggtgtaatgaagagcatagtggatgttaacagggaatcagggatgaaagtagatatctgaattgttaggataatatatatatatatactctattcattacctagggtgatgatcc

SEQ ID NO: 1614 - DNA, 824 bp, Zea Mays
tttgcactttttgcttgtttggcacatagcaactcacttactatgtgttggacacttaatcaccaaaacattatagaaatggcccaagggcacatttccctttcacatgagacccgtcacaatgggtgggagcgactctagctcatcctgcagcaaccccaagaagcgggtccccacctcctccctgatttgtcgaaggggcagtctacgtgccgaggtcacggtacgcatccatgaaaagtgtgtgcgcccgatccacccaagcacgggtgacagattctgtcctctcacggtggccacgcatattcttcaattccagctccaagtcggcaacacgcttgcgggcagcctgggcctccacgcgagcgttctccgcatcctctttttcatcattaagtgggcgggcgaggtcccctttttcctattcaagcactgtcaccttcttgagaaggtttcggctcttattttcggccgccgatttgtccctgattgcttcggtatgctgcattcgaaggcgctcaaccctaccctcaagtcgtttcctctcagaaaccagctgcgaggtcagcgcccccgaagcaacttggtcgacgaaggtcgtcacctgacatcgcaattttctaagctcagtaaaacagagaagaaaatactcacatatcgcagttgccgcacgacagacgcaactacgccagcggcggcagcagccgaggcaagttcgccttcgccatcagaggcgacacaaaatttcgaccataggtccagcgaagtctctatgtcacccttcgctgcaaccaccaggccggcgggcaccatagacggtacca

SEQ ID NO: 1615 - DNA, 824 bp, Zea Mays
tggggctcggtgtatgcggctcgctctgccaaggttgatttgtcccttggggaggagtgcggtacatttaggaaacctaacgggcggctacagccccggagaatctttgtaaaggctacgtagtgatatcctgctgggtcaccttggtagtgatcaatggagagtcatgatctctgggcagaaagggaaatcacagcttgtgggtaaagtgcacaacctctgtagagtgtttgaaaactgatatatcagctgtgctcgcggttatgagcagccaagggagctccagtgattagtggtacttgatcagagatgttcgcattgcaggtggcaatgagattgttggttttggtattgactctgataatggtgagtggtactctttccgtttggaaaggagtacgtttgggttaataacgtgggctgaatctaaaacttggcttcctctactagcaataataataatctgaccaactaaaagcaactgcttgacttaaccccacataaagctagtccactacagccaaacatgatacttgctgagtatgttgatgtgtactcgcccttgctctacacacaaacccccctaggttgtccgcattgcaaccactgctcaggagaagatgaagccgtgaaaggagacttccaggagttccaagaatacgacgagttctaggcgtgggttagcggcaacccccagtcggctgcctgtgaaggccgcttttatctacgtttcgttttcgcactttgatttattgtaaagactatgtggatgtctcagacatatgatgtaaccgactattatttcccttttaatactatttgag

SEQ ID NO: 1616 - DNA, 828 bp, Zea Mays
cgctcacctaacacccgaggtccgatcgtggatctccgtggatctctagcggttagttggcgtggtcctggctataagactatgcctgggcacgcatctgaagccagctgaactccacgcttgggtcgtgcggcctaatcccttgaacctcgctgccgcctgctaggggaaaggcctgccattggctctgctctcgccatgacggttgtggagccgaattgaagcccttggacaatcggtggcgattaccaaaaccggccacaaccttccgctacggggaaatccaccgtgaggccactaatttctcaccgtcgtttcccctacgccgtgattttgcctggtacttggctggccgcaaccaagcattgactcacggtaagacgccttcctctcgaatcacctcgtcttcctctgcgtgtagcacgggtttgtgtaggatttggggccctgtctccgtcgggcggggtgcgccggcgagttgctccgctgcggcgtgctgttcgcccccgctcagccgcgtcgaggtggggaagatgtgctaggaccgctgatttggtcgccaacggccacgatcagagccagtgtgcggttcggccagatcttatgtgggtcgtccgtttgctgatatatttgtaataaagtttactacactatgacaaacatcccgttgtcatatcacatactcttttagttagttatttaattaccctatccatatagtagattaatattttatcaaagtagtccgactatgactattaattgactatcaaatgaactctaattaggttataacctatattaaaattagagtttgttatatctttt

SEQ ID NO: 1617 - DNA, 828 bp, Zea Mays
catccttcgattttttatagcttggaatcgcttcataattttttcatcatcaagtcctctaaatatcactccctcggtatagcaaatcatcaagtcattgagccattcatcacctatcttattgcacaaaatagtcttgattatattcatacctgaaaatactctctctacagatgttgttgccactggtaagagcaatgctaactcgatgaggcagtagaccaatggaaatactacatgtctttcagttttaaccatcttaatagccaaacttctgagatcatggcaagtaataaagtcatccactcttcttacatgaagaataaatgtctcaagttgatcctttatagttgcacgatccacattggagaagtatgcatcgtaaatatctgcaagacgagaaagcttcgccacattgaacttagagaaagagtctcttggatccaaagaataaaaacttgttgagaaaccctaaaagaggttttatgggctaataccaaaactgccctcaggaggttcagagcttatatatatgtatccatacccctcataataatgacaaacagaaagagcttccatccactgtgtctcttgttcctctgtgtgttgggttgctgggaagggagcgggcttctacaacttctcgcgaccctactgctgttgggagggtttggagtccggatcggggatctgcgacgactacgttatttaacacgtcatcagcactgctctaactcgactcgtggatccgatcggcaccgactctccatgacgccggcaggtcctccggcaaaaccgaactgtcctacgcgtcaggcttcatcttcg

SEQ ID NO: 1618 - DNA, 829 bp, Zea Mays
ctcaatcaacgggaacagagacgtcggtgactaaattttttgggtgaagccatgatgctggaagggaagtcctaccttgtgtcgtgctccctgttgagctcctgcgagacagagacgcagtgggtgtacctcgcccacgaggtcctcggcggcaagcgcctggcggtgactatgtacttaggggtgatcatggtcagggatgagtcaattcattgaagacatcatgagaatgctatggtgttgcccagtttcatttaagtccaagaagctggtgaagatggagagtatcaatgggacattggagaagatggcaaactaaccaccgaaagttgtgtcaactacatcagatttggaagtctgggtggggcatggagatcagagccaacatgtctcttcacctgccagttctcatatgaagagtggctggagtatgaatgcaaaacgcgaggcattgagtgcatccgtgccatgggaaagtaggaggacaaatggcagttcgagtagtgctgctcgtttagctgagattgattgatgtgatgatgttgcttatggcagggcacaaaccacaaatacacacaaaccagatgagaatgcctaccatttgtttctgtaaaaagttgtagaattcacaacacagggagaagaaaaatcacttacatatgcccaaacttggtgccctgctcaatttgcagatcatacacaaaagtcatgatactgcagagtacgctgaaggctgcgcggtttctcccctgttcgtgcccatctttcccccttgttaataatttctatttagaatcattaatctaggacacttgtaatgcacatgatg

SEQ ID NO: 1619 - DNA, 832 bp, Zea Mays
caccggtccgtgcgcgccgttcgctcgacaccgtagggagagagagagtgaattggggcgccatgtggccaaccgggtgtctgagtcgctggtgattcggatccgggtcggtgggcattgcgggagcttggtggtgttgctcacgggcgtgtcgaggaggatcggacgtcagggcgacaggaattcctcgtcggagcaaagaccaagccatccgtccgccttactctgagaacgtgcacagcaacacctacttcgtgatgagaaccttttcccaagaatcgcattcattcccgcatcgtgtagaacctcggggtcagggagttcgtgcactacagccgtagttggcgttggcgtcggtggggattcgccgtggttcaggcagcgccaccgtcctacttgggtgcgcagagaagatgaaggcggagccgtgtgatctagaatcgatggccacgattagaagcaggttaacggttcggccaacgacgcgatggccgtccgatcgggatcgtactggtctggggcgtgttccactgttttaaatccggaccgcagatccaggattgtgcggttaatagggcgtaccgattcatttgacagtagatctaatcagagtcgttcgctccagatctgacggcttatcaaacctgtgtccattcaatgaaggcgttatgcgtatgagcccctactgaattacaaaatagaacccagcgtcctatgcgactattcactaagtctcgggatacttgcgccgtagcccctgtgcatcctagtaattgacgcgtcgtccaggaagttagaaaatcagggaaataaatttggtaatggatttttt

SEQ ID NO: 1620 - DNA, 832 bp, Zea Mays
ctggaacaggggggaagaccgagagagcggagagggaaagggtggccaccgcctaaaccaaggattagagtcaagtaatggggcatggcgcttcgcaggagcacggtagaccttagtggagcttcgtaaagcacgatgatcaacccagacctactaaattgctcgccgaagcaatggtggcgcctcagatctgtgagccaccgtgtgcaacgccaactgcgtctcgatcaccagtaatttcacgattagcggatttgccttcactcccttttcgcgtagcgtacgatgaatcgagctttggggcgctgggtcaccatgtgtgaatccggcaatggctctttcgccggagacccgttcaccgccgtgtccgactgctcgggtggagacgatgggtagttgccgctgatgcattaaccaacggtcccgattagaacctgagtgtaccgcttcggggttgagcctgaatcgttgatctcatgggttgcagctgggattgaaccgtgggtaccccccttttttggcattttcaatcgtggtcgtgggtcgtccatctgagggctgggcgtgggcactggcgtggttggatctcggacgttggcttcagatccaaagggtatggtgacgtaccggttcgctgcttatgcgatctgatcctaactgttgacgtttgattcgagggctcgagtgcgatgcatgtgatactaccgtggcagattatcataaaaccccataggcttctcgattaacaacctgccatccacaatggttcgaagagtactagagtccggtccagaaatttacattttagccatcgtagttaattaaaatagta

SEQ ID NO: 1621 - DNA, 836 bp, Zea Mays
agcgcaaattaaaactataaattagttttcaattggaaagttattttaataaccaacgaacaaactgattattaattaaataaataagacatgcgtcgcgataaaatattgttactaacacgtagactatattattacggagctggcgcaaatggaacaggttggaatggatttataacacaatatatattgaataattagcatttcacggattttacatcgacgtgtcgtgatattattggccgcacacaacagcaagggctgggagggccggtggccatggctgctcgcacgctcgcagcaatggagggaggagggctacaccggccatgggtcttggtcacagtggagaggccagggcgcggcagcgtgggttcgccggcagcatgtagctcaccggcgctacgcatggtggcgttgaggcagagttaccacggtccgcgatgcagagcaagcacagggtagcatggtgcgtggctatggcgacaacgagcagcgctcgcatgggggcaaggcagcggcggtggtataggcacaacaaagaggagatgacggggctcaccagaggcgtcgatgtccgtggtgctctggcgtagcttcgggcgctgcaagccttcggatgggggtggctgatgtccattctccagcgctcgacggagctcggtgatgtgtgatgagacactggtggcggtgcgcgggcgcggcatgacgcggcaccgcagcgagcctagcatgggcagtggtggatgtgcatagcgagggtgggataaggtgaagattagccgactaggggccggtggtttttttatgcagcagctgaggtgggcagttccacg

SEQ ID NO: 1622 - DNA, 837 bp, Zea Mays
gaaagagggaacaactgccgagatttcgtccgcagattccgctccaaatcacccgggtctaggccgccaacgcggcaacgccgccgctgccacctcgagggcgcggaacctggccgcagcaccagccaccatccggcaaggcagagctcggtggtgcgagtgcgccgcgggatgcctggccgccgccgccccgaccactctggcgagaacgacgccggagcgagcgcaggcaagacccgcgctgggccggccgccgccgcctcgggcgcgcacgctgctacatcacccagtgcacaagtctgggacttggacctcttgcgccattcgccgccccagccccctccactgcctctctcccgctgacgacaacgctcctgcaacgcaacgcaccgcccctgccctcgccgacgctgacgtcctgctgcgccgcccggtccagctctatgcgacggactgcggcgctggcaggcccacggccgccaggaggaggtggtcgtctccagcagtctcggcaggaggaggctcctcctcaacgccagaattgaagcacagtcgtggcgtggcagcagtcgcgggatgttctgctgggagtgcacgaggagatccagagcatgatgcctgcgaaagcaggcttcccttgcggctcagaatcccgcatcagaaccttactatagttgtaaaattttactgatatctaaagatgacttttgcgttttagttatacattcttggctccaggaaatatggttctgtagttggtcaacgttagcatcgcagcctttgtgtgcattatttactggacttggtcgggtcgggtggaccaagtttttgtgtgtg

SEQ ID NO: 1623 - DNA, 840 bp, Zea Mays
tcgccagctacttcctcgtcagtcgccacaactcacggtgtgatcctctcctccacccatgtcgatccgcgccaacgcccacgcgactactccgaggggttccgccgccggccctgcaagtctgcgctacctgtgccgcgcgccgccacttgcgtgcgggctgtagccggagccggagaaattccttcaccgatcaccgcttcacgacacgacgcactgctcggcatttgcttcgagtgcggccgggccgcctggccgacgaccgggaggcgtttgatggaatgccgcacggggacgtgttcgcacggaccgccgtgatgtaaggcctgtacggtggtggtgttggacctggagtcatcatgtcttcacgagtcaggtgcatcgtctcgtgtgttaagcctgcagcagcgttttgggtgacccatgtatgccttggctcgtcccgaatgctgtagggacttgtgaagtggacactgatgaaagaacgactgccagccgttgccaacagatgcatgcagtgatgcatcatggaatgcccctgctcaatgtcaatggggctggaagtggaaactgggaaaaactgacgctgacgggagttagatgcttgattgaagcacatcatggtcatggtaatgtcacgctggaagtggaaggaggcggttaacgcatcattttcatgttcgttttcactttgcatgtggaatccggtgaagcaaagacgtgctggagtccgccgcttttgcaataagttcttcgatgcgaaatttggtgccgtccaagccttcaagtgatgtcggtaccagacttctgaaatatatctgctagatcatgggggtaaag

SEQ ID NO: 1624 - DNA, 841 bp, Zea Mays
tagatgatactagctctttatcacttaaggatgcaattgaagctttacttgttagtcatggcttgactttgacacgaattggtggacaaggttatgatggggctagcaacatgagaggtgatattaaaggattgaaaacattgatcatgcaagagtcatgtaacaccccactggtcacacacaatggatattaccaaaaaccccaccctcctaacttactcaacacaagaggcgtaataaagacaggcaatatagcaaaatccggcagcacctcctttgaaactaacataacaaggaggggaaaacatgaagttcatacaggatataaagacttataattcacaaagtagaagctaaatgcaaagtggtaaactcatttatgccccaactgaagcaaaacaaatgggatgaggaactcagcccaccccaagataaacgctcaaccaagaacaatgcaattcactagacttgaccacttctgattaacaacattattaaatggtgattcctttatcaaaggtgtagtggtcgtgctgctacatccctctattcccaaagcagaaattaggtgcctgcatcaaacaatgcaagatgtgagatattacatctcagcaagtaaacataacaacaacaaataggacattgtaaatcaactgtgcttacacaaccacatggttcagaactcctttctttctgttgaacagtaaattgcagcaagtaaacaaataactaaattcttatcgccaagaggaatcatcatgcacaagtccaaattatccacatccccaaaatatattccacacctctcccatgaatgcacatggctacagatgcaataatg

SEQ ID NO: 1625 - DNA, 841 bp, Zea Mays
gggctggttcgggaaacgcgacgcccgacctcccctcccggggacgcaccgatggcgacgcacggagtggcgtcgtcgcgcacggccggctttcggcagggcccggcggttacgttgcgcgcggccgccgctaaccacgcggggggggaggcgaggtgcattgaaccgtcgcggctggggcggttagcgatggagcggaaccagtggcccgcgcgcggcggtggattcgactcggttacgggctggcggccacgtgaaagcaggttggaacatgctcatcggcatcgccagggggttgatccggtccacggccggggatagatcatgctccagtccactcgtagagatgcctgcggacggcatggcgtagataaataatctttctgttctgtcaatcactcggctcgcgaacccccagcgcgcgccgtggcgctgggagaatatactaacaacgcgaggctgcgagcagtgtgcagccagagagatccggccgggatacggttcgcgtcagacgaaacttcgaatcaccgcccatggctgcagaaatttatattccaaagacgggggaggcgccggccgctggctgctcgtgctcgtgctctggcgcgttcccatcccagcgcgacgccgccgtcgccctacgcgggccgccggggggtggtgactcggactcggacgtgcgatgcggctgccgccccccgccggcccgccagtgcgtatgattgattggtcgggggggcgggcgagattgcgagactggcggccatgccagcctttggggcggtggcgcgacgacgcggccgcgtgacgcgtgcgtcggttgcgtggctggccgcgtacg

SEQ ID NO: 1626 - DNA, 842 bp, Zea Mays
ttcgaacttacgaacacaaggttgacttgtcccttgttgtttgggttgatgatatgagtgattgtcaatgggttgcacattggattgagccatggactgaccaaggcgtgagttatgtacgtcgtgcaatcatgtcggtcggattgtggtgtgcaggtgtgtagcataggtatagtggtcgacgacgaaggtgaaggtaatgcgggttcgtgtcgatggaccaggagcggtgaaggatgagcgctaggacttgatcgaaggactggagttgccgggatgactagccatgatggctgacacctaggaaacactcgcgtgaggacgtggcagaacgggtcgtgttgctggcatggttgaggactgtcaggacacgtgtcgaggacgtgggggatgcgcacgcggtgcgatactcacacctgtttggtggttgagcctcaaaaccacccaacgctatggacgtcagattttcgactgggtttggccttaaaacccggcggtggcagttttggtggatactagaggtggcatgtggcgtgatcatggagggtgcatcaaggcgaagcaacttcatgtgaagagcatgtcggtcagatgaaaactctaggagttggaccatttcgccccccggtggagtggataggctgtatataaatagcgatagtttaggaaatggaaatatccctctataaatagaggggagtgctggttagttcaatatctctttggcttagtttcatttgcctctcattttagaatttctagttttcctctctaggttttcactagtttagccgggagatccgcaacgattttgttctgtcgactgtgtcttgtaatctgct

SEQ ID NO: 1627 - DNA, 845 bp, Zea Mays
ggccgaggcggtcaacaccgcttgctacgccatcaaccggttgtatctacaccgaatcctcaagaagacatcatatgaactcctaaccggtaaaaagctcaatgtttcttattttagagtctttggtagaaaatgatttattcttgttaaaagaggtagaaaatctaaatttgctcctaaggttgtagaaggctttttactaggatatgattcaaacacaagggcatatagagtctttaacaagtcctctggactagttgaagtttcttgtgacattgtgtttgatgagactaacgactctcaagtagagcaagttgatcttgatgagctagatgatgaagaggctctgtgcgtcgcgctaaggaacatgtccattggggatgtgtgtcctaaggaatctgaagagcctccacaagcacaagatcaaccatcttcctccatgcaatcatctccaccaactcaagatgaggatgaggctcaaaatgatgaaggagaagatcaagaagttgagccacctcaagaggaaagcaatgatcaagggggagatgcccatgatcaagatgaggaagatgaacaagttccaaggccgccacacccaagagtccaccaagcaattcaacgagatcatcccgtgaacaccatcctcggcgatattcaaaagggggtaactactcgatctcgtgttgctcatttttgtgaacattactcttttgtttcctctattgagccacataggatagaggaagcacatcaagattcagattgggtggtggcaatgcaagaggagctcaacaacttcactagaaatgatgtatggcatttagttccacgtcctaaccaaaatg

SEQ ID NO: 1628 - DNA, 845 bp, Zea Mays
atgtgttagaggctgatctcacgtcagactcagtcaaagaattggatctgcttttattttactgatcggagagatacaacaattttttggtcgtggctttccctttcctacatcacgtctaaacaaaaaatagatcaacatttatggatagcttcttatcctacatacacgaccttcttagtgaagggaaacgtagatggtgtccaaacaccgattttgacacagatcaccagagtccctccctttcattgcaatctccttctccaatccttcgggtgatttctctcccccactcccgcttctaggttttaggcaagggaagatcctgcaccttctaaaagtaacattggagccgaggtttgcacctaaaccctgctctagaacctaaagccttcaaggtttttatctaatcgatccatatccacaaattggctcaagcctagttgaatgtttagatctacatcaagttaaaagagaagaaatgggattccggttcgttacctaaccctaagtcagaatcctcaaaaatcctaaacaaactctaactctaagatccctaaattgctcttggcaagccaagaaaataagaggaagggactcatcggtcttaccttggtcatcggtgttggcagcgacgtgtgtgcatacacgtgtcggtcaagggcactgctatagggtcgctcaacggcaacacgctctcccttagcgtgggagtgtgaccaaccaacggctatgtggtagcaccaccactctactgtcactctcgccaaagttgggattgaggcgaaggaagaggaacacttgggggtggagaaagccgcaagagagagagatcaaaggagaga

SEQ ID NO: 1629 - DNA, 847 bp, Zea Mays
gcggcggctggactggaggctgagggaggaagccctctgataccatgtagaatgaaaccctaaccctatactagggtgggcctgtatattaatagtagactgagttgggcctggcccattacagacagaggggtgaaatggtaaataccccataaaccctaatacatttctaacagttgtgagtaggaccaatgaattggtccgtttcaacatacaacaacaggcccatgtctcttaacttcggagatattatctctgaacaaaagactggggatccttcattgcccataaagcttaagtctgttacctactgatggggacacaaacacacatcagtgtttctgcaagagaggctgtcttcagacagtgagaatccccaacaacaatcagcttgccctctgttcaacaataaggtaaaatgtgtcaatgatatcaaatacaaggctctgaatactaacactgacacgattggaatcacctcattacagcttaatggatgtggcacagcatggaatcaggagcatcgagagccccccaagcctccaggacctgttttcttgcttttggttgtctgagaatccactagttgcagccacaaaataaaccagtaaacccccataaatggtggaggtgccactgccacagacaacttagccaggatggtgtttgcacagctccattggtagtcgttgataccgacaacgaaagtaagtgcattatgttcttctccttgaccctgagagagcaatctttccatgctccaggtgtccacattcctgacataggcccaccgatcactagcaccaataaccgaatcaggtaggatcctaagaacacaactgtctgc

SEQ ID NO: 1630 - DNA, 847 bp, Zea Mays
cgccacctactcagttttccctacgctcttgggggcgagactgagcacctcgcattatttataagctctagttggtgttattcgtagccaccccatggccctcatttcttaattaccccttatatgggctccgtcgatgggtcaatcgatcgatctccagtcggaaggagaccacgccgcatagagccaggggtcggcacagggcttctccttccccgagcctttctttcccactcttataggagcccttttgacttgtgtctttccaacgcagggtagcctccattgctcctggtcatgaggtgtgctcatctattgggtaatggtggctgggcccaagggaccctctcctctcggattctcggaaggaccatggtgctcttcgtgcgacactagacgtgactgaggctaaagcaggtctccttcggaaccaactcactaaatcatactatcccttggttggtaaggttgatgtcccattgcctttttatttcgtattacattttaattccttttctcatttttcttctatcgcccctcagctcttgaaaacgagctagagaagttgtgccatcaggcgggtcaggttgcggagtacgtcggggcccgtggttcttccatggtggagcgcctgaacaatatcccatgtcgtgttcgggatattatcgacttcggtgtacaccgaggggctgccgtagcgctactcgtcggggagcttcggtcgggctccactctttaggacatcctcggacctcccttgtctttgtaagacgagggactagaggtaatcctagagggctatgacaaagtagccagccgcgtcgtggaccggttgtctagagacgac

SEQ ID NO: 1631 - DNA, 853 bp, Zea Mays
atgtgcatctacgtcggatcgacaagaggggagaaaactcaaatcgagagctccgtcgcctggggcgagaagaactagatcgtgatctccctgcgtcggtgcttggacgacgactccatggacgaaccgtgtagcacagctacgacaatggatggccgccgctccctctcctccttggtccatgcccagccgccgccacgggactctggcgcgccttcgccctgggtgcttcaccgaagtacctgcggctcgggcgcaggtcgacgggcaagcttgggcctggctgccaccgaatcgcatagatacctttccctcttcatcgagcttcgtcgcaaggtcaaaacaccctgcacatggatgtaatgtattccctctcgatgttgtcccggtggccctcacttgagcgaccgtgcggttcatcgggggccatacgaatgcctgtgtgacgcgcggtcatcctagacctgggcaataggaggaagacgatcgctgacgtgttggatgggttacacacggcggggattagatgtgggttgtccaccgctggatctttggtgaacgggtcagattagaagtagcgtacaccttcggctaaagttgatctcggccatttggtgttgatccaacggctcaggtgagggcagtattattgatctaatctggatcattcggattggattggacggatcaaagcgccccataccccttcagcgaggcgtttttctaaaagaacacatgtaggatttatgaaatatcatgtcgtccatttcactgtgtaatgagtctggtgattcttgcaccaaggtccttgcacttcctaataataatgcgcccaatccagaagattagaaaa

SEQ ID NO: 1632 - DNA, 853 bp, Zea Mays
cggtacgcggttttctaatctcgtacgcacatctagatcgaacggtcaatactcatccaagcaaaagggtatgcgagatatgattgccacagtcggtctgggatcaacggccaccaacgcttctcccaccccgcccaacagggcacggcggcgcccatggacggacccccttctacatgctccggcgccctatttctagttcaaacagatgctacacgttgctcagtgcaaggcgaatggagcgggtaacaacttaccagaaactagatcatgtgcgacgcggcccagggagaagagcggcaccgaggcggcgacttaaccatagcgagaaatcacgtgctcccaagacacggacgactcagtgcgatgccgcgagcaccatccgagcaccgcaatggagcatcacaggtggtcttccaagggttgggaaccggcgcaggcgtacaccggcgtatgcgcacagattccctccccaaagctcgacggtgggcgcgcctgggtcgaggatgcgacgaggccaagcaagggcagcggcgacaggactcgggtgcgctgctggagagcatcaatcgcgaggacgccgacaccaacgaccttagcgagaaccaatggcccgtccgctagtcacagggccagagggaggaggacgaagggtgggcgccgttcaccggagagcgagatccacggccatggtgtttgggaggtgagcggcgcgaggcttggggtcttatagcccagaggcgagggcgtaacagccacgatcgaagcaagcggggcaggtagacatcggtcaagcatggtgttaccgtgcaagatctgcggcgagttggggaaggcgacctgagagtgtggt

SEQ ID NO: 1633 - DNA, 855 bp, Zea Mays
gaattatatgtctttatatcttgtatgagcttcatgtttcccctccttgttatgctagttttcaaaggaggtgctgccagatttttttcttgctttatattctttctttattacatctcttgtgttgagtaagtttagtggatgaggtttatggtattatccattctgtgtgaccagtggggtgttacaaagggtttgatcggcccgaggcaagagggaatcacggcttgtgggtaaagtgcacaacctctgcagagtgttatgaaagtgatatatcagtcgtgctcgcagttatgagcggccaagggagctccattgattagagatacttgatcagagatgtatggtttacaggtggtgatgaggatgatggttatgattatgcttatggtattggtaagtggtattctttccatttggaaaggttacgtttgggttaataacttgggttaatgctaaaacctggctttctactcgtaaataataacctgaccaactaaaagcaactgcttgacttaactccacataaagctagtctactacagccaaacgggacattttgctgagtatgttgatgtgtactcacccttgctttacacaccaaaccccccaggttgtccgcgttgcaaccactgctcaggtgaagatgaagtcgtggaggaggacttccaggagttccaagagtacgatgagttctaggcgtgggttagcggcaaacccctagtcggctgcctgtgtaggtcgtgtgtatctatgtttcttttccgcactttgattattgttaaagactatgtgaatgtctcggacatcatgatgtaatcaactattgtaccctcttttatgtcattatttaag

SEQ ID NO: 1634 - DNA, 858 bp, Zea Mays
gaagatttgtataccttcagttacactatttatacaacattcatgttttttgcaaccagaagatgcttcaatatatggcgcctctgtacatagggctacatagttgaattgcacggctattatgtgatatacaatcttaactcagatttaggcatgcggtcactgattccatgtgacacgagcatacaacctgaaaggcagacagcccaggaactgaaacagcacaactacattccccctacggcctatgttgttattgtacattcataatacggactattcctacgacaatgaaacatgtgatttcgggggatgcggagaacaagaaactagggacaaaagaaagaataaaatcactgttagctcccaaagcccactgcaggccagcctctggcatccatttgttgcgccctggccaggtgatgagcaacacctgtgtgtgcttcggctgcaaagaggtcagctaatctgtacagggcgcctcttcccacttctatgatagccgacatctttcgatgacttcagtcacagctgaatgcgtttcccttgtcatcatgttgagctgcagatgaaataccacaaatttctctagcactggtacaagaactttcaagttgttgtccggaaggcaactagaaatggctcctcgaaccttcatactgtggcagcaaacatcagttcataagctgacggcagtggggtggggctcacattaaaattataactaattaagaaaagattatgaaataaggcactatgaacctttccgttgaaagaaaggcgagcacaagagctgcataggcctccacaatcatcatttcagcttcgcgttctccttgcaacagagattcttcatca

SEQ ID NO: 1635 - DNA, 859 bp, Zea Mays
tcaatctggattgttcgcaagggatcagacggccgggaatcttcccccctatcccggccggccaaacacggcgacgccgtcggcattcccatggcagcctcccgccggagatgcccgagccacccgagaactcccaatcgctaccacccgactcctacgctgaatattaagtacgatgaacagcaggggccttaccgaattttgtgctacgcaaggaattctccacggagatggacagctttacggtggcgcacgacccaccggcggagatggcctcgccgggcactaacaaccagcgccatcctcgattccattggtacaatgcgcatcagagagaaactcactttctgaaggtatgtacctcacggaacacgacgacgggaatgcggctggccacagcacagggcggaagaactcgattaagaatgctccggtgacgaattcatcacacgccaaccactgattccgcacaccgaggcttctattactcttgacgcacccagacgagattcctcagcctaataatcgcgagtcacaacatcaatggtgggaacggcgacctcacttctctcacctatctctcgtgttcccaggcggctgtatgcttcttccgcacagctatggcttgtgcgtggtcttataggtccgggattacggaagttggatagcgcacgacacggcccaaacggttgcaacgacattgacgaaatgctcggagaaatcccaagaatcgcggcgctgtgacaacggatccggcagacctgagctaggagaaatgccctgacagggttgggccacatgctggggcaagagggagggagacgccctgggtcccacacagccgcggcgctggggcaaa

SEQ ID NO: 1636 - DNA, 860 bp, Zea Mays
ttgactcgttcatgcttgcacatggttattctcgaagcaattatgatcattgtatttatttgaagcaattcccaaatggatcttttgtgtatctactgctttatgttgatgatatgttgattgcttctcatgataagtcattgattattgaattgaaggctcaacttagtcatgaatttgataggaaagatttcagaccagcaaagaagattcttatgatggaattttagcgtgatcgtcatgctgatattccttttctatctcaaaaagttatattgagaaagttcttgaaaagtataatctcagtagttgcaaatctgttgctacaccatttgcttaacattttaaattgtcatcgaggcaatatccacttattgaagatgagaaagaacacatgtctcacataccgtattctaatgctgttggaaatcttatgtatgttgtgatctgtacaagacccgatttggctcatgttgttagtgtggttagcagatttatgcacaatcctggtaaagaacattggaatgcagtaaagtggattcttcgctacttgaaaggtacttctcattttggattattatttgacaagaattcagtgaatgaaattggtgttatgggatttgttgagggaattattgattttgactttgctggtgatcttgataaaagacggtccatatctggctatgtattttcattatgcggttctgtaatgagttggagggctttacttcagtctattactgctctttccactactgaagcaaaatatgtctcaactactaaacgggttaaagaagctatttggatgcaaggtcttatttctgaacttggtgttactcaggatgtcattaatgttt

SEQ ID NO: 1637 - DNA, 862 bp, Zea Mays
gttgcatttcatgtcgaagcatagtttttgtttgctaaaggagactttgacagtatttacgttcgaaagaaaaagaaattatcgtatttaagttatttaggcatggtctaaaatgaacaagtacatctatttatgtatatatatatctttacaaaagaaataaaaaaatagaataataaaaaaagagagaaataaaaaaggccatgcagccccgcgcttggcctttggcccggtctagcacgtggttgcccacgcctgcacacgcccacgtcgtgctcacaagtgcggcaaccgctcgcctggcagctgcacaaaagccttcgatccctttcgtttatacctcgctacactgcatcttgccgcgtccacgtaggaaccatcacgcgctcgcctcgtcggagcagccacaggagcatcgtcgcgtccgcgcttcatcctcgccgtcgtcgagtcgtcactttggagctccaccagactccacgaggtcgccttgccgagtcgccgacgtccatggcgcggagttctctgtcgctgtccacgttccatcttcaacggcgagcctctgtgtctccgtgtctagatcgcgatttgttcctgcgcttcgaggaatcgatgatcaagcttcggcgatcaagtgatctagctcttcgagttccatgaggctgaagaacctgagcatctgtttggtgaaggcaagtgtcctctgacccattatgtcctatttactttataattcactgtcccgcatactatgaacaacctaaggattgactagctttctatttacctggtccttgattaccttttgggctactatggttagcttcatgctagcgctttactttaatcaatgaacatgatg

SEQ ID NO: 1638 - DNA, 863 bp, Zea Mays
gacaatctacgtgctggcagtggtgggatccatcgtccgtggcaatcaacaagtgatgagccaagccaaccggagaatggagcgtcgtgcacgcgggtccctttccgcgcgcgccaacacaagtgctcgatggccctgctgttgctgtgctccaggccgcgacgttttgtctcgcctagtcgtctcactcacccgcctactaaacccatccatccatcaatcatcgaacggtacaacctcaatgtgagaagcggtctaggcgataaggttaaagacgaggatcgatcaaaatatccagcctccagtggccagtggagcttgtttcagtcaaatggagttccttattgtccgaggtttgcaagtcgggactttctgaaaacccaacttgccacaggatccttggaccgcaatgcaatgcaatgcacctaaaatgagcaggctctgtcactgacgacatggcaatgattccaactgacagcacacaagcaacagccagaggcccaagctggccaacttgctccctagtctaccattcaaatcaaatactaccccccacccccaaaaaaaatgaggtttttttgcagtcgcgttaatattgacgcttgctcgaaagaactatcactaggtggaaaaaaaaaagatatgttaacagctactgcaattcaatccaattgaagactctgttttttttggtctaaaaggttcccaaatgaattcggctttgtttatgtgtctgtatacctcaagtgccaaactttaaaaaaaaacaaaaacaaaaccaggtaccaaatcccgtgtgcaactcaccacctcagtgccaaaaccagtcacagtccaagaagacttggaagaaggaaagaaag

SEQ ID NO: 1639 - DNA, 864 bp, Zea Mays
cttctaccaaaccctagcaaccacaaaatacaaaggactcaaactcctatttagcgccttagtaaatagaaatctcccaatcaaacccataacaccgatagatcttaacggacatcgctgaccaatgaggctccaccccatgatccaacaaacatacaaggaggaggggcaagatcaagatggaggggctcaactcctaggcccatcccctatctcttctgccaatacgactaccatccacctaaatcctgaaggtatgatcccatactttgtttctcttcctctagctcactagtgcacaagtcttcagtctattgagctacagaaaggacctagctaggttaagggagggaatcgattagttccaaaggtcaaaaagatcatattgttgttatcagagtcggtctatcgattctccaaacttaagtctgctagaacaacaatagaataagaattatgtagtctagggaggttaggataacttggggagaagatccctgttggctgttgggggccttcggcttacgaaggtcctcaaaaacgtgatttaacaatgtttctggagtataatacatcagcaggtaccttcggacatggacctttcgaacttgagtcaaaatcactgtatgaagaaacacaaggggaacgaaggatggaacagagccgaagctgtgcgcaagggagcttcggcatgatgacaggaaaaggaaaccgacttaaagaggaaaaggctatctagaccccgattaattactatagagttattatcaaatgcaaggggcctggatgtaattttacatgggctacgacccgtgcctataaatagatgaacagtactacgctaactgggaatttgcttttgcg

SEQ ID NO: 1640 - DNA, 869 bp, Zea Mays
accgggaatggcccaaaccgtgctcctgcgaccaaactctcccccgaacccagctttacatagaataggcaacatggaatacgctctgcgctcccacatcgggtttcccggcaagtagcgggatgcccccagcccgcagcggactccattgcacggcgtactccagcgagaaatccccatgcaaccagcccaccattcgaccaagaactaggcgctatacaacgtacagaggaggatgaaaacatggcggatgtctcaccttgattggcgcggtaaaaggccaagcccacgacggcgtgcggaaactgaggcggcgacaccttcttccccaaattccccctctcacactctgctctgtctatggcaaaggaacctctagcacgaggtggcacggtcgcgtgcgaaggaaggcggccacactcttaaacaaccccggtatggcgaggaccccagagtgcgtgcaatttagtcgcggcggacgctacattgtcggccattctgttttgccggggcacgaagtccgcggggacatggtctctgggccccaccgcgcagcgagcgtgttctaggtcggtgcgactagcaggtaggcccagcacgcacgacgcaaggtgaaggttcgtgcatgcactgggtccgttgttgcggcggcggggatgacacgtggggtcggcctgacagtcactagagggatgcctgtttcacgcgcgtgaccagtggcttacctgtgggccccaggcgtcaaccgacggcatgtgcgcgaggtggaggaactaataggccacgaagtgagaaagccctagttagttgggtcgagttgatctggtggcccgactgaattcttttctttttttccttttatattttca

SEQ ID NO: 1641 - DNA, 872 bp, Zea Mays
gggcagtaggcgtgtagggaggttcccgggttgattttgctgcgatggcggtcagatgggggattcccgcattgctcttcctagaaaatgtagcgggttttctgaagctagtggaactttgtaaaggcttcgtagtggatccctagccattcacctcggtagtttttaagggtctagctaaccctagtgacatgggatacacgacttgtgggtacagggtacaacctctgcagagtgtaaaactagtatactagccgtgctcgtgatcatgagcagctcaggactctcgcatgattaatttatggaattaaattcaatttgtcatatgcaattcattgcgggtgttgttatcaattttgatctattattactctggttaggtatctacttgcacttagtaactactaataaaattttgaccaactttaaaagcaatgctcagctttaatcattctctttggtaagccttacacttcacatgagctcccacctttggcgagtttatgcacattattccccacaacttgttgagcaaagaacatatgtgagctcacccgtgctgtctaaccacccccccacaagtcaagaacaggtaccgcaggatgaggcgcatggaggatgctgagatgtgttcgtgagaggtctagaccgtcgtctcccagtcagcttggggttgctggatcgttgtcttcatatgatgtaattatttatttattttatacagaactcctattatatagtaaagatgtgacatttttttctgtaccatgagtcatcatgtgtgtaagacttggtcctaacacacttggtgattatttcgcacccgtgttttggacccctaaaacctaggtgtgacaagaaacgactgttta

SEQ ID NO: 1642 - DNA, 876 bp, Zea Mays
gcaaaacgcatggcgcccactctccccacgtctcggtcgttccaaagaggcttccaaaacacctgctcgtcccttcctttagcgcaaggccatccgcgctcggccgggccttcctctcccccaaacggctccccctcccctccgtcctcgaccggccggccggtgactaggcgcccagcacagcggttttgcgtagctctgtagccagcccagcgcagccgttgccctgtcctcgctggaccgcccccctcgacgatcgtccccgtcgaccgcatccttccccatcgcatccacgccgaggtaaactcgcccccaccctccttattcccccacttccccagtcgagacctcgccgtgtgcggcccagtcgtggccatcgcggctcgcctgagcgcgaccaagtgtgccctgcggccctagcgtgcggcgccggccaaccgtcgcgatagcctccccctccacgcaccatcgatcccagcccgctgccgcttgctagcatgtgtcgtccgactgcgagcagccatgttgctagccccactccccgcaagccacctcgctgcgcctagccacgctgcccctgcacgatgtcgagcagccccgcgagccctcgttcggcgagcaggatcgccatcgcctagcccggccgccggtgatctccaacgcaccctgcgctcgtgctggccggcgagccgctctgaggacgaaggcctggcatggccgaggagggccactgccgaagcccctgtggctcccctgccacccacgcaccagtgcagcccgcgctatcggctagagcctcgtcacgcttcgtcgacccgcctcgccgcccgccgttgtcgcaaggtgagcttcgtcttccccttgcgcgcaaccccg

SEQ ID NO: 1643 - DNA, 885 bp, Zea Mays
gcacgcaccgccgtcgagttccctgctgcgcactgagctttctgtcgcaccctggccccaacttcctctctatttcccagccgaagcgcgtccctggtcccagtgtggagctcgcgagcgcttctttgggctccatgtgtcgcgatcacctttggtccctgttaccctctaaaccactatcgcgtcgggttatgccccgatgcgcgcgtcatcagtcttcgtcgtgccactgttccctgatccgcgctactccctggtcggtctcacgctcgcctttagcgtcgtgccgcacccaggttctttggccccgttctagctgcaacgacctctcctacggggcatctcgtcgtcggctggccatcagccttgatgtccattacactctccagtaaacctatggcagtagatgagagacctcggaagttggttagatgaagaaaagaaaagtaaagtttgtacagcgcccgtctggtgttcggcaaaatgagtggaccagtgctcgtcgcgtgttgggaagatcggcaccgaggttcttgccgaatattgcttgatttgttttgaggacaatgacgcacacatgatgttcaatgaatggttcaaaccggatagcctcgtcaaaatcttggctccgagccaattcgaacatggtacgttaaataattgtgtgatgtggaggacggcccaagtcgacgccgggaaaatgcggagattggacatctccgcaagacgtcgtcatcagtcggaccaacctgaagatggacagacgaagcaagtatcgggacaaaggatggtcgtcaagtgatcgacgcctaacaaacactaacctagtgttatcctggcaagccccgatgcatgcaaccccttccttgtatttttaaataattt

SEQ ID NO: 1644 - DNA, 887 bp, Zea Mays
aatggccacgagggccgcggaggcgccatctcccccgccgccgagagaagaaaggacatgagcaaactctagatagcgaagcggttgggcttcctcctgatctcctcccgcagctcccgctccagcctgcacctgcgaaacacgagggagatgcctgtgcccctctctcccctgacgcccctccttcccgcgcccctccctcccccaccacctcttcctccacctgggttgcaggggctctcacgcaaagcccagaagccggcgagcagaaaatctcattctccctggacaaattcgcaaaagagcaacgcagggggaaatcggcctggttcgtggattcctgaagagcatggatgggccgtgaaagcggatgacccgaggaaggggcagccaaggtgtctcgactcgggctccatctccagggggtggatcgcagcccagaaggctggcaacaagttgaacgagaaaaaatcggcaagaaggatgctggaggaaagaagcaatcatatcagaaaaatggctagtgagttcttcagtcgagcttggggatggtctccagttgacaggaggctgacacagtgatcggttgagtgggggatcctttttggcgatgatgcttctttctgttcttgaacctagagactcttttggctattatatcaggatgtcggtctgtaataatgtcttggttaaatcccctttcttgtcttagtcgtcttggtttggcaatagattttgggtcaggtctgatcatagatgttgctggattagttgctgagcttttgttgccaatggcttgttttggctaagacatttctggtgtgtgtctgtatgtgtttcctgtttcttaatgaaataggggggaaaccccttttcgtcaaaaaaaa

SEQ ID NO: 1645 - DNA, 888 bp, Zea Mays
gggcagggcatgcaaacctgcgtggagctgaagacaggccacgtatgattggtccatgcgttgctggcacccttggagtctctcttcctcatgctgtggttgagctcggtgacacctgctccttattcaatgatataaaacttgattcagtgaggatgctccctgtccttaagtctggtccgtgtttatcaccagagtgacacagctcttgagttcaagtcgatatacatcctctccccagccaatagctcggtctgcccttgtgcttagcgctccaacactcagtctggtgaccacgctcacccaactgctcacctcaccgtggccgagacgcttggagcaattgcatccccgggtggtcagaacagtgccacgctgccgcagaacagagtcgtggacagctccaccgctggctttccaatccatgttgatctcgaatgatcttgtgcgagcactgaaggtgtggtaggtcgtcgacgtcgtggccagcgagggcgggtgcttggctcgagcatgaaaacattggagcttgttaacatggacgtgttttgacggtgattatgatgcgcctgaggtcagcgccgctgtggctggttgggccggctgagtgatgaggagtattcaaggagttcctgaagctaggagggcgtttccagttctgggggaggattagttaggtttgggtataagctttggagggttcctaccttcttgctattgtaataagttatgcactttgagtatatcaggacttgtaataaatgtaactcttcctatgtaatgaccttcagttttagaaatgaaaataatattttgtaaagtctttcgctcttatctccgaagtgtgtgtatcgaatgtgattactgtaatatacatgaatgtgggag

SEQ ID NO: 1646 - DNA, 891 bp, Zea Mays
tacgactactatttttcaaaagtgtaaggtccaacctagaagttttaggtcgactctgtaatgttctttacattattcagaactgggggttcattctttgcaaccttaagggctctttaacaaaacttcacggctgagtaacacctggacaattctggccgttgatatctaaatctagggtcctaatttcatggccgagtcggtatcttcaatttctaatctcgggcgtgcgtttcccggtcagcggtccagatcacacctcgtataggtattcccccacgatgtaatctcagccattgattcatcgatcgacaaaccaaggcacatctccgacctccgatgctgagcaacggcggcggcctctgctctgcggcggtaaggctcgccggcgtcgcgcacgacggccatccggtgctccgttcctcgccccgactggtgcttttcacgaatagaataactggacggaacactgcttactagcaaaagcgacgtggtggagccggtccatggcaggaggtggaaccgcggcggaggaattgctccgttgagcaattcttgggtccctaatgattcatgcactgaatcgaggataccaacacgtgcaaagctcgccgacgatcaccctggactgatctccgtggacttggcgacgatgtgaacaggatctagcttgcggcgggtcttttctctttccctgctcgccggcgagatgctcctcgactgctgctaaaattcttggctcggctaggctacggaaagacttagcacgctccgacgaacgcgctcaagtattgtctgtggctgggtgatggcgtgagcgcgacttcggtcgcggcgatgacctctatctctcggtttctcgctctgcctcgacgtccgcgcccctcgtcg

SEQ ID NO: 1647 - DNA, 892 bp, Zea Mays
cacaattccatattctgtagatgaataaaactaatattccagtgagcatacaaactaagtggacaacactgaactcagttcacagcatcaccacttgacttcacatttcagttgagtttgcacaaacataacagcatataataaaaagttgacacccacgagcaacttgagtttttgggtaccctcatgtcaaagaacaggccaaacacagcagctctgaccagcggccctcatgtcgaagaagaagagttaccatgcaaggacaagagcttcttgatgagcacattggtctcctccatctccttgttgttcttctctgttatcttcttgtactcctccaactccctttgtgtcgtcgcctgttgttcctcagcttcttcacatttcttcctgagctggtcgagttcaccttgaacagcagccgtcgcttcagctgcaagttgttcccgaagctcactttgatttgatgatgatgccttggaggatgccgatgttttgatgccaacgctcttcaggaattggtgtgagctactctgggacaacaccttggacactaggtgcacactggatgctgcaatctcaccttcagcaacaggttcagccctcaaagcctccatacgatactgaaatattatggccagaaaacagttacatgttaatgctaatgagcaacaacaatatgccaattgttagttattgcaataatttgaagaagacatatgacacaaagtgtttataatgaaataataaccaatgctacactgacagaaactgattgcagttggcatttgctttggagaggtaaaaatgcagagatttaggcacaaatgatctctgatatcatgttcctttccagaagactgtcagttggacaatcaggcaataaaatttc

SEQ ID NO: 1648 - DNA, 893 bp, Zea Mays
cccacgcgccgcagcactgcagcagccgccgtcaagtcgaatcggtcggacgtcggagaagccagaagcctccgcgcacggcgcagcggttgctgctagcctgctacttccactggccggtacgtatcttgttagctcaagcacgatctggtcgtatctggtcgtcgttagcctttttgttagcttttaagcagccgccgtcaagtaggatcttgtcgtcgttagcttctactttttaggtaaatagaaatattaaaagcaaccaaactccatgagataaactgaataaaagtacttgtgttagttaacttgtttaggttcataggttattgtcattttttgtaaatataaatattaaaagtagatacttgcttaccggttaatatacaattatttgagattattgtagtaacacatgacatttgaggttgagaaagataatgcacatcctagagggcgttcaaatgcaactgtgacaaatgaacaaggcgattaccatcacaaaggaaaatgtgtcattggagcatcatcaagcggcgttgctggtatgagcacaatgcatgtaaacactgttgaggtgatcacacaaaacggtaggtacatattagtgtatttatatgtgatggtcaataaaaatattcgtgcacttttaaaatattgtggttttacattaaagggaggcgtgtgaaattaaaaggaggcattgagagcccatggagccatggtgagccttatggaaatgattttagttgtaattattgcactagtcgtatcaagggtggaggtgcgactcgtctaagagagcatttggggggattgcctggaaatgtggctgcatgtattaatgttcctcttaatgttaaggcaataatgactgatgaagtggttgttcg

SEQ ID NO: 1649 - DNA, 894 bp, Zea Mays
ccccgggcaaaacgggaatcacggctcatgggtaaagtgtgtgacctctgcagagggtaatgaaactgatatatcagccgtgctcacggttatgagcggccttgggatcctctttgattagagatacttgatcagagatggttggttcacaggtggtgacaaggatgatggtttgactatggtaatggtaagtggtattctttccgtttggaaagggtactttgggttaataacttgggttaatgttaaaacctggctctcaattagtaataataacttgaccaactaaaagcaactgcttgaccttaaccccaaataaagctagtccactacagccaaacgggacatttgctgagtacgttgatgtgtactcacccttgctttcacaaaacaccaggttgcctttggtgcaatctatgctcaggtaaagaacaaggcgtcgaggcggatctctaggagttccaggacgtcgatgagttcgaggattaggctagtgacctcccccagtcagctgcctgtggtgggttatttacgttggccacgtttcgattctgtgtactttgattatattatgtaaatgactctagtttgtaatattattacttactctttattgtaattcgaagcattgtgctatgatgagtcatttatgtaatcgctgtgtacgtgaattactgatcctggcacgtacatggttcgcattcggtttaccttcaaaaccggtgtgacagatttccacattttgtgtgccttatttgcatcataaaaagagcatacacaaaatttagagattaattcaaacaaatgataaaaaaatgcatcattttggagttttatatgtttgtgcattaaataaaataataaggatgatgataataaattaataattccaaa

SEQ ID NO: 1650 - DNA, 894 bp, Zea Mays
tgcatgatcacaggagcatgctaaagaggtcaacgaacggttgaaccacctatcgtttgtcttcaggattggttaagatcaccaagggtaaatctcaattccaatatattcactcacataatacttttgtatcactactgaaaaaatagtttcacgaaacagtgtgaaaggttaacagtgacggacatatctagcgaccgcctccgtaaatgatatgggtgcttaaaaaatgcacacatcaaaaatcatttgcggatgcggtcctccgaaaccattgattaacagaggtggcacatattgtcggtgttttgggaacaccgtagatggtgtgcaagggagacacaaacattttatactagttcgggtaagaaatgtccttacgtccagtcgggtgcactatgtaccctacactaatgtatgtatcggggaatacaaactcggtcgatggagagctcgatgcttaagcctttggtgtagaaagtgaagtgctccatggatttacatgtgtgcgctattcgaaatgacttgttcacctccctccgttctagaagtcgcgttctccttttatagcccaaggagtagagggctcaaccttgtcctattgcttcttgttggtgattcttgtttttgatgagagtggtgcctgctaacgttgtttccgtttcgtcatattgtcgtggttgtgtgtcttgtgattagggatgaaaacgggacgggtacccgggtcaggtaccagatacgagtagtaaaataatccaaattttcagatacggatatgttggaactcactagcgctcaagaacaatagacgttgggaggaggaagacgaatgaacaacaactcagagacaaggcaatggcgcccgaacgcctggtgcccaaacaccagcttttc

SEQ ID NO: 1651 - DNA, 894 bp, Zea Mays
ctgaaaccaaaagtctcacgcatatcatgaatcatagtacagaaacgaatgtcacaactttactatataaaaggagttctatataaaataaataaatacatcgtaaggagacaacgatccagcaacccaaagttgactgggagacgacgacctagacctctcacgaacacatcgcagccacctccatgcccctcatcctgtggtacctgttcttgacctgtggggggtgtgagacagcaagggtgagctcacatatgttgatcgctcaacaagttatggggaataatgtgcatgaactcaccaaaggtggaagttcatataatgtgtaagactgatcaataataggggttaaagctgggcattgcttttaataagttggtcaaattttattagcagttactgaatgtaagtaaataccaaaccataataataataataataataataatagaacaaaactaataataaatctcatacaatgcaaatgataaattaaatttagttccataatttaatcatgcgagagtcatgagctgctcatgatcgcgagcacgactagtataccatttttacactctgcagaggttgtaccctatacccacagtcgtgtatcccatgtcaccagggtttgcaagaccattagacacttccgaggtgaatgactagggatccactatgaggcctttacaaagtttcactagctttagaaaacccgctacagtctaggaaaagcaatgcatgaatcctcgtctgacctccatcgcagcaaaatcaacccgagaacctccctacatacctactcccctactgcccttgctcctatcggataaggtagtcctccactagctttcctagttagtcagccaagggcatcccattccacccttgtggtgg

SEQ ID NO: 1652 - DNA, 895 bp, Zea Mays
gtgcgggctgcaccaccggtgctccttcagggagcatgagcctgcctgagaccatgccacctctgagcggttcgacgccacttgttgagcggccggcgcctccaaatgcggtcaccactcagcctctagccaatgaccacagcatgctaacgcgtggcaaacggggctttcgtcaaccaaaggtactgcttgatctgcatgttgctcctttgtctcccgtgcccaaatcctaccgaggagcattggccgatcaaaattggagagccgctatgtctgaggaattttctgcacttcagaagaataacacctgggacttggttcctcgtccctcgggtgctaatattgtgactggcaaatgggtttatcggcacaagtttcgctctgatggttcactagagcggtacaaggctcgctgggttcttcgtggtttcactcaacatcctggaattgattttgatgagactgtcagtccggttgtcaaacctgctaccattcgtacagtactcacagtggctctcttccatcgttggcctgtccatcagctcgatgtgaagaatgctttcttgcatggcacccttgatgagactgtctattgtatatagcctgctggtttcgttgatagctctcggcctgatcatgtctgtcgtctgaacaagtctctgtatgggttgaaacaagctccacgtgcctcgtacagtcgttttgccactcacattctctcttttggctttgtgagtgccaaatctgacacttccttgtttatatatcaacatggccatgacacaatttatttacttctctatgtggatgatattgtgctgacaacatctttagcctctctgctacagtgggtgattacagctctacagcaagaattctctatgacagatctcgg

SEQ ID NO: 1653 - DNA, 899 bp, Zea Mays
tgtgtatctatattcatgaaaaagaagtaaatacaaaagaaaaataaataaataaataaataaagaagaaaacaaaataaaaaaaactagcggccctgctccccacgtcccccacgcgcgcggcgcgtctgcgcccagcctcgcacctggccgttgcacgctggatcccaccggtcagctccatcctccctacgtaactgcagcgcccacatcgctctctcccctcggcgaactgctctgcccgcgctgatcgctcttaagaagttagccgcgagacctacagcacaatccccttctccactcgcgcttgtacagccacagggtgccatgcatctccctcgcctctgtgccgccgtagttcgtcgcaccctcgttgttgtcgccgggtagtcgccgcgcacagagcctcgccagtaccctcgatcatgacgtcctgtcgccaaggtacttgctatgcttccctctctctcttgtctctcttctttggcgtagttggccacgaaggcctcatgcgcgtgtcccccgtgcgtcttccccctcgactctccctgcacgagttgcagcgttgctatcggtgaagcacgcagtgccagccagtctatccctgccaccatctgtccccacggccttgggctggtgtcccagcccggcgcgcgtgattccttcccctggccgaatcagtagccggtgaaacccctccgttgtcgcggcagcagcaccgcccctacgttgcagccccatcgtgccccttcttggcctcgtgctcggccccggcaagcggccagactgcctcgccaccagccgagctcacgcggtcacgctccctgtagtccccatgtcacgtccttccccgacccgaagcagaacctgccggcacccagccagcgcccaggtcccag

SEQ ID NO: 1654 - DNA, 901 bp, Zea Mays
ctgtccctcgcctttatctgttcggccggccctggatacaaatccagctgcgcgcagccgtggaggccactgccgcctcccttatcttcatcccacccgcgcttcctcgtgcttgctctccaccgccgctcgcccggctccctcacctcgctgctggtcgcgtgcaggcggcgattcctggtgcacatggcctggacggagtctaccggcgtcatcttcggcttccgcgcgccggatttgaagtttcagccatggcgcacccaagtttctccctgtgctcgcgtccttctctttctccctcctctctgctcggtctcccttgccgctccctctctgcctcccttctggccgcgcgcgcccggccgaagcggtctccaacgccggcgcctagttcctgtgccgcgttcttgctcgcgcccctgttcctcacgtccctgcggtcctccagttcgcgcgctcctctccctctcatctctctcgtctctgccggcgagtttcccatggcgcgcgcctgtccgctggccgtcagcacgccgtgcgtgctctgtcttccctgcacgcgccgagcagctccctcggccggcgctctgcccagtctccaagctcgccgttgaagctcccctgccgcgtccctggctcggcctgcgcgccgtgcgcgccgctccccgagctcacccaaatcagacagtgcctccctcagctcgatccctgccgtgcagctctccggctcgccggtgtttcaccagtgcgcgcacgctcctgctgagctcagtcctgtccatctcgccgtgctcggtctctagctccccactacacgacggttgatctttatcgacccttattaggtaccaactgttggttgctaaaggttagggaccgacggtcagtcgctaaatccttt

SEQ ID NO: 1655 - DNA, 903 bp, Zea Mays
cccgtcgcgaccgcaacagcttctccggactccctgggcatcagctggtcctcgcagtcgtcgctccgtgcgtacaaatagtgtcgaggaagcctcggtcgcgtgcaccaatgccttgccatccgcattctgccgctccctctcctctttgatccgcgcccagccgccgccgcgggaagcaggggggtcaccacggatggtcttcgccctggccatcggactcgccacgcgggatgatctatggatgaatgcggggctcgtgcgtggtgcactgggtaacccaggggcttggcgatgtctgggtcatcacgaattgctcaccggagcaatttgtactgccgcataccacacctcgccatggccgcctgtcgggagagaagaaaggaggggattccgccgccgccgagccccagttcaagctcttcttcactcgcatctccggaccgcctccctgggagctccatggacgatggcttctgctgcgccaccacgggtcgaacagagagaaaacgaaggagagagagagcggagggctctgcgtggtcacagcggctcctcatcgtcgatccggatccggggaagccgaccgagacctcgcggcggaacctacgtcgtcgcagcgcggggaatttctcggcggacgacgggggaagcaccgcgcctctggtcgtcgcggactgcctcacctacatcaatattctgggtcaagagcaggtaccgcaggatgaggcgcttggaggatgctgcgatgtgttcgtgagaggtctaggccgtcgtctcccagtcaactttgggttgctggaccgttgtctccttataatgtaactattatttgtatagaactcctgttatatataaagatgtgacattcgatcctgtgccactttacatcatatgtgtgag

SEQ ID NO: 1656 - DNA, 905 bp, Zea Mays
cttaacttgagaaacacgtgccgccacaagggtagtatggaatgcccttggctgactaattaggaaagctagtggaagactatcttacccaaaaggggcaagggcagtaggggagttgcatgcaagaaggttctcgggttgattttgctgcgatggcagtcagacaggagattcttgcaagtgctcttcccataaactgtagcgggttttcggaagctagtggaactttgtaaaggcctcatagtgttgccctgcctcgcttccttggtagaggtgtatgggagtcgcgatcccttggcagatgggtaatatgacttgtgggtacagggtacaacctctgcagagtgtaaaacttgtatactagccgtgctcgcggtcatgagtagctcaggactctcgcatgattaatttatggaacttaaattcaatttgacatttgcatgggattatttattaattttgttctattacttttattatggtttggtatttacttacatttagtaactgctaataaaattttgaccaactaattaaaagcaatgctcagctttaacccctgttgttgattagccttacccatcacatgaacttccacatttggtgagttcatgcccactggtttccccacaacttgttgagctatgatcatgtgtgagctcacccttgctgtctcagaaccccccacacaggagaagaacaggtggttcaggaggagccacaaagcgaggagtttgatctgatctaggtggtgtttcccagttgacttgcgctaaggatgatccttagttcattttatatttatcttttattttgtaataagacttccgctatgtaataaatactctgatgttattgtgatatttatctctgtacactctgttattatttatgttgtcttcttg

SEQ ID NO: 1657 - DNA, 906 bp, Zea Mays
ccatgagggtggaatgagacgcccttagctgaataattagaggaaccgtggtgtagttcgcttcgccgttgtgccgttaatggggctcagtgtatgtggctcgctctgccaagattggttcgccccttggggaggagtgcggtgcatttaggaaacctaacgggcggctacagccccgaggaatctttgtaaaggctacgtagtgataccctgctgggtcaccttggtagtgatcaatggagagtcatgatctccgggcagaaagggaatcacgacttgtgggtaaagtgcgcaacctctgcagagtgttatgaaaactgatatatcatccttgctcgcggttatgagcggccaagggagatccattgattagagatacttgatcagagatgttcggattacacgtggtgatgaggatgatggttttgatattgactatggtaatggtaagtggtattctttccgcttggaaagggtacttttgggttaacaacttaggttaatactaaaatctagctctctctattaataataataatctgaccaactaaaagcaactgcttgacttaaccccacataaagctagtccactatagccaaacatgacatttgctgagtatgttgatgtgtactcacccttgctctacacaccaaaccctccccttccccaggttgtccatgttgcaactactgctcaggagaagatgaagccgtggaggaagacttccaggagttccaagattatgacgagttttaggcgtgggttagcggcaacccccagtcggctgcctgtgaaggccgtgtgtatcttttcgcactttgattattgttaaggactatgtggatgtctcagacatatgatgtaatcgactattattacccttttatgttattatttgagctcta

SEQ ID NO: 1658 - DNA, 911 bp, Zea Mays
attgcggatgataagctgagctcatacgtagctggacatcagcaagccgaaataattccttccacaggttactgagaaacaccttgtcacgatcggaaactatagaatgaggcaatccatgatgtttatacacttgatcgtggaaaaggcgagcaaccgtcagagctgtaaatgggtgtttcagtggtaaaaaattggcatattttgaaaacagatcgacaaccaccaggatgcatgtatacgaatgtgaactaggcaaagcctcaatgaaatccatagaaatgatctgccataaagaagaaggaaccggaaggggttggagcagaccaggtagcctagcacgatcagctttggcttgctgacatatcaaacagtgagtgacatatgtgtgcacttcagttttcagaccttgccaagcaaacagttgcttcaaccgggcatatgttaccggaaatcccgagtgaccgcccactgcagatgtatgaaaagcagctatcaacttctgatgcagatgagctgaaggtcctacccaaatgcgcttcttataacggagcaacccatcttgccaggaaaaatgtggaacggcggacgaatccacagcgagcttagcaatgatatccgaagaatgggtatctgccaaatatgtatcagcaacttcggtgacccactgtggctgacaggacgacaccgccaggcaactcgctgacactataggatgtcgcgataaagcatcagcaaccccgttctctactcctttcttatacacgatgcgatattgcagtcccaacaaccgagtaaacattttcttttgccatggtgtgtgcaaccgctgttcatccaactgagcaagactgcgatgatccgtatatatgatgaattccttaagttgcaagtaatggcgccaatggtcg

SEQ ID NO: 1659 - DNA, 913 bp, Zea Mays
caaaagttctcaagtgatgcacactaggttttctattgtaccaagcttcataaggtgttctgccttgaagacttttggtaggggcacggtttagcaggtatactgcagttgtgacagcctgtccccaaaattctcccggcaaattcttactcttcaacaagcacctagccatctcgactacagtcctgttacgccgttctactaccccattctgctgtggcgtgtacggtgtagtggtgaaatgcttcacaccatgctgatcacagtattctttgaactccttggaattgaattcacctccacgatcactgcgaaaagcccgaagcttgcctcccagttcagtttcagctagtgccttgacacgcttgaaacacatgaaagcttcattctttgtttccaatagttcaatccacatataccgagaataatcatcaaccaaaagtagaaaataattcttaccccctggtgttttcggtttgatctgaccacagagatcagcatgaaacagatctagttgactgtcagctcgataacttgttacccgtgggaatggttgtcgatgctgtttaccaagcacacagccatcacaaaattcttccacacgatccagcagcggcaacccttcgaccattcctttctgtccaagctcacgaagtgctctgaaattgaggtgaccatagcgaccatgccacaaccaagccttatctgaagtctttgcagccaaacaaacaggagcagctagatgtactttcagtaaatatagacgattcccaacacgaggtgcgtgtgcgagcaatgtgcgttctacatcaaacacactgcaataaccatcttcaagcactactttgcatccaccctcttccaattggcctaaactaactatgttgcttttcagtttgggaatgaaataaac

SEQ ID NO: 1660 - DNA, 916 bp, Zea Mays
cgcaaagaaaccaagctaccatggatcaaacacacacagatacagagaagtagtgaagagtggccgtcgtcatggatgtgtgctttcaccatcgtcagggtcagggagactcgccctatcccggcggatgtttccgtggcgtcgttgggcggatagggccacctgctccgactgaattgctcaccggagtatcaaacccgccgcagatcgacctgcgcgcgtggactacgtcatctgtgcctataccgtcgatgcgaggtgacgatgaacttgaagtccaacctttgggtcaacatctgaactacaaggttatctcaagtataaggtaagttgtgcccttgatcactcttatttatctaataatgttcctgttaatcactgtgacatgctcaggttaatttgatgggacctaataggttaccctagttttgtttaccccacacctttcaaacaaatgaattattgggtagattggctatgctctacctggtttttgggaagtaatgctatatgacatatgatcatgctttatcattgttactagattatttattgttcatgacaagaatatggtgttaattggaacattgagcttaacttgagataacagtgctaccacaaggtaggaatgggacgcccttggctggctaattaggaaagctagtggaggactaccttacccgaaaggggcaagggagatagtggagttaccggtgtaagaacgttctcgggtcgatcttgctgcgatagcttttcggacaagggattgctatatcgctcttctcccgaaatcataacgggttttctgaagctagtgaaagtttgtaaagatctcgtagtggatgcctagccattcacctcgggagtgtctaagggccttgcaaactctggctagacatgatacacgacttgtggg

SEQ ID NO: 1661 - DNA, 918 bp, Zea Mays
ctacctaaccctagcagtcgcgcgctcccgggcttctctcccagccgccgccgccgcctctcccttccctcacctcgctcctctctgtcctgaccaagcagcaacggctgagccctggccgagccgctctcccccgacgcacctgcaccgaccctagtgccactatgagagttcggagcggaggccgagcgggaccgcgggagggggcggccggggtccggtccggggaggcggggaccagggcaacgcacaacgcgccggcggtgaccagtagcccgctctgacaccagctcctcgcatcgcatctcccctactaggcctcctcgtcccggacagcgatggcgcacacgggcgctggccggaagacgacgccggaacggacaaggacacgcacgcaaggcgatcgaggacaggcaggcatagtgttatgcctttgagagagccagccagacagacaggcggcaacacaccaccacgctgatcgacgcagatcagtctaggagggagcgctcggcatcaagcggagtgttatgcaatggcccttcatgctggactgtgtgatcagctccaacaagatcctgagttgtccacacccaagctgcttgtttgatgccacccttccatggactttgggctgcccctccaatccttctgaaacttttgtttgaatgcttctcgtagtcggcagctatacttatattagctgaattttggttttgtcatctaaatatatttatgtcaatgtcacataatgtgttaattagttgaggtctggccagccaggtagtctaaaaaaataaactgaaagccaattttttcacggcgattctggaacatatgcctaacaggaaaacaaaaaagtgggcacctgaatttctttagtaactctatttctatctttcggtatgtcgttccttc

SEQ ID NO: 1662 - DNA, 918 bp, Zea Mays
gctcgtcgccatggccgttgccttctccctgctcgcgttctgcgcgcgtcccttagcccttgcgctcggcgcccagtccctggccgagctcgccctgatgccgcaccctcaagctcccagccgcggtatagcctgcacgcgtcctccctgcccagtcggtctccaatctcccagccgagccgctttttcttcatcttcctgtgcgtcacggagctcggatcgcgtcccgtcttctctgcttgcccctggaagccgcgtcctagccatgtttcctgcgcgcgttctgcttcctgcgcgcagctgcaagctccgctctattgctcggtccctgctgcagttcgcgtccagtttttctgtgcgcgcttagctcgaagctcctctgtgcgccgagctgcgtcgctgcctcagcttgccgcgccgtcgcgttgctgttcgtccggccgcgacctcgctttgctctctgcgtcgctgtttgccgggtcaagccacatgttatcgcgtcctgtttcttgctcaccagtgcgttctctcggctcgctcggctttaatccccaatcacgtcgtcgacctggtcgttcgtcatcgttcgtcgtcacgttgttcgccgtcaagcctcactgtcattcctactgtgcctcgcttccgatgtgttcgattaaatgtcggaccaagaatccaagatatcgctcctcgctgtgaaatcctcacgctcacctttctctattcgatatcgtcgtcaagctgaaggccattgtcgttcaggcaactaccaaatcgagttgtgatgtggtgagctgattcactatttttactcttggttttatgatcgtaaataaagacgctttgtatatgtatacgattaagttagaaataccagtaatgcgaggtgtgcgcttggtaattatggctcgatccgtt

SEQ ID NO: 1663 - DNA, 920 bp, Zea Mays
catgaactcaccaaaggtgggagttcatgtgatatgtaaggctaatcaatgacagggggttaaagctgagcattgcttttaagtagttggtcaaaattttattagcagttactaaatgtaagtaaataccaaaccttaagtaaagtaagagaacaaaattaatacataatcccatgcaatgcaaatgaaaaattaaatttaagttccataaattattcatcggagagtcctgtgctgctcatgaccgtgagctcggctagtataccagttttacactctgcagaggttgtaccctgtacccacaagtcgtgtatcccatgtcgccagggttagctagacccttagacactaccgaggtgaatggctatggatccactagcttctgaaaacctgctacagtttatgggaagagcacttgcaagccccgtctgaccgccatcgcagcaaaatcaactcgagaacctccttgcatgcaatcccctactgcccttgcccctttcgggtaaggtagtcttccactagctttcctagttagttggccaagggtatcccattaaacccttgtggtggcacatgtttctcaagttaagctctatgttccaattaacattaatgatcttgacatgagcataaatagaataacaaaataattgaaacatggatataataaaatattatcccaaaaccatgtaaagcgataacaacactacccaagtgattcagggataacaaggtaaagagataaacaatctagggtgacctatcgggtctcatcaaaattaagcctatccatggtaaatgattataaagaacattattggttaacaaaagtggtcaagggcacaacttgccttaaatgagctcctgctcagctacttctatctgctggtcaccaggatcctcagtcacaggttcttcta

SEQ ID NO: 1664 - DNA, 927 bp, Zea Mays
tcttatacttagcaatgccctcagggcccaaaaagatgccaaagacgaagggtgtgttatggccctgagcaaccttcgttccgaagtaattgaactaaggaacgaaggtctcgaaaaagataaaatattgcattcattgatagataaaataaaagaagatgaagctacttctaaagttcaagttgaggctcagaggcatgaaattgaagatctccgaaaacaactagccagagctaaagaggaacgcacacttgaagaaacaaaacgagaaatcagtgaacaatgggccaaccatttgggaaaaagcgttgaagagcttcgtgcatctaagaaaagatgctatgaaaaatctatggaatgtgttaaaaaagtaaaaaccagctttgccagcgttggcgcattctcaagtgaggagaacttcacaaagggtgaccccgaaggcccaatcgaatggattagccacgaggctgaggcctttgaagaaattttgaatagccacggaaacatatgtgccttttcgggtgccagggggattgctaccattttggagaggaaaggctgtgagcatgtgaaattcttggcgcaatccgaagccgccttatcctccaaagatacaaaagacccctcggccgaagcaagcctggtcggtggaaaatttttcaccgacatctgggacaatggtggccggaaaatggcccaaaaaattattcgaaaaagcgaaaaaggcattcatgatgctagaaaagtagcagaggctgctgagaaaagtgcagagcccgaagggcaaatagaacctgttgagccatctgcgggccctcacgtgaagggggatgacgaaattagaagaatggccgaagccatcatggataaagttgttgatcagctgctaaacgaagctgcagaagtagtcctaagggaagattagat

SEQ ID NO: 1665 - DNA, 929 bp, Zea Mays
gtagattttttttaggtaatcatcaaagcaaggcctgagccggggctggcggcggagacggccaatttcctgagccctgaccgcctgcacgatgactagctgcctagctgcagctggagctgcaaaattttcagcggaaactgaaagccgatcgagcaccgggggctatgtttggaacagctttgctccagaaaatttggaatttgatggggttggtgtcggtttccaacatttttacccgtgcagtaattcaaaacgagccgtacaattatttacccgtgcacgaacagtgcgcagcagattcgctcgcccccaccgacgccgctatctcctcttctccgggctccggccgggcgggcagccaccggccgccagtgcgcgcgcagcggcgcagcaggcgtgcaggatgcagcagcagtgaagatgaagcgagccgggcagggcgacgcgcattggataggtcaggaggtagccgaggcccgagagagggcagcacaccacacaggcgcgcggcgcacacagcagcaagcaattcaattccatcgttgtctctactcaccctcatgattgccatgatttcttcgtttccccgctcgcttttctctcctctcccagctctcctcctttctccttgtccaaaaggccaatacgccatgcattgcacgccccgtgctctgctcctccgatccatggcagcaggcggcagcgcatcgaaatgcccctcgatcttttcacacgcgctccctatacagaccaataccaatagccactactagccggccagcagtgaaccgtgtggcaggcagtgcgaggtagctatatagtatgactttagttttagcctcgtggctatatatgcgagcgagctagctacgtgtactgccacaggccatgcgtgcaccagctactagccttgctttgcttagcag

SEQ ID NO: 1666 - DNA, 939 bp, Zea Mays
tagagatctcacctccgcgacaaactaccataaggtgaacgtggtgtggctccctcctcgatggcgagagggcgaaggcgtcgacgagctcgaagatggcgaggctcggacgcacggcgaaggtgctacgcaggctcgtcgcgtctctcctcctgatgacgacgtccgtgcatggtggagcatggtcggcgtgctgatggcgaggctgcgcagctcctccacgcaacgatcgggcgcgcgcggggaagtgtcggcgaggcatccgcgctggcgagccgcgccgggccgccgcgcaggcgagccacgctggctgcactgcacgggccgcgccgcgctggccacgctggctgctcgccgcgggccacgccggctggacgccaggacaccgggacctggggctggggcaggatgaggcaagggtagacgcactgcgcgggtggccggagctgggcgagaggagcgcgttgggcgaggtcttggaggcggtttccgtttcctgtgcgcgcacgaacgagcaggagccggatcaggtggagtcagtttatttggagaggaaacatatgataggtgggcctagcatgcagagcaagagcagtgtccaggccagagacgcggtcaggtgcggcggcggctgggcattgcccacgcgcggccgctggggctgagcgagccggccacagccgactgggccagggcgcgggacgtgggccagggcgaggggggaggagctgggccgcgaagaaagcgcgcgctgctgctgggtctgggcgattgggcgcgcgcaggggagtgggctggggcgcgctgggccgagcgagtgggccgcctggcgcgctggcgagggtgggaaaggcgtgtgggccgtgcgtgagaggtgaaggggggagggagaatggctgggccgcggggagggaggctgggccggctaagaagattggg

SEQ ID NO: 1667 - DNA, 939 bp, Zea Mays
tgtgtgattaatagaagaactaatgaaaaatcgtagcaaattaaataaatgttcatacttgtgatgtcgtagttgtgttgcgtaaataaataaaatgttgtggtcctttcaatggtgttaatgttgaacgccgataatgtatagataactaatgctaacgtgtggttgttcacggtgtcttacaatttagtgtttagttcgctactgtgtcttcaatatcttgtgctatttttcatcatattcatacatatgcatcctgcatctcatttaggaccgagaggtggtgatcgtgcaagtgatgtggtgccaaccacaagatgcagttggtggacgacccaaggaaggatggacttaaccagtggatgctcgccaagagagtaccccccagcaaacactatctaagtgttaaattaaaggcaagccccggttttatgcataaccgttatatatgctattttacaacacttaatatttgtaggcttgtaccgtgcacttaagtgtaggagttgtctgaaaccctagttgcatgaactcaggattccttttgagatggatactagtatgctaggtcgagtagctgctatgctaaatcaggatctcggtagaagtcaagtgatttttctagcactcgcgcgaggtcaggaattggttgtatccattttgataattgaatgatgatggtctgtggacacggatccatggggatgcgttgtctatgagacgaaattggaataaggattaacgtgcggatacatgtgtcaagcttttgaacgtactaagcacatgtcgggaaaaatggtaaccggtaaacctagtacctgagtgaagccgggcgcggactttatccctcacgcgacctgagactgggtctcccattctagatatggtgggtacaagtgcggccactgcacggcggcggccggggtcagtggagcattg

SEQ ID NO: 1668 - DNA, 940 bp, Zea Mays
tcgtgttcaccaagtgtggtcgagtttccttgtccctgccaacatgtgcagtgatgcctgcccatgttcaatgcacatcggttgggttcagtgaagcttcaccttgccctcaggttctagcttaaaaccactgcataagtgttggaatttcagtggtcacactagtgctcatgtctcctcagccaccaactcggtcagcccttgtgcatagcgcgctatctccctgcttttagtgaccacagccaccagctccttcacctcacagtggccagaatgtagtcacgccaccgcaaatcgtcgtcgtgtttagtttcgtcgtcgaccagccaacttacgtcttcctcgagcagtttcatgcacccactgcaaacttggactgtcagaggtcccagaagaagaagtggtagctgaagggaagtctactccagtgcctgctcatcaagaggatagagatatccaactgatggttgggtagagagatctagcacctcttctctgctacaaaggcaagccccggtgcatttgccccttccttgtgttttaaatgctttatcacctgatatgatgcattaggttgataggagttgtgtgataaacaattgatgcattaccattccttggaaattcctaaatccctgttttataaaaagaattattactgcttagtcctgcttagaaactcaaaaatcatttgtttttcaaaagaatgatgtgtaacattggttatgggcttttgattcaaaggtgaaagcaaacttatgacgatgagtccatcagggctccggatgggttcatcatccgaaaagagtacccgtgtcgggtaccaaaaatggggaaatggtttgaataaatcgagaccagacgctgagctgacatggtcacccgtctgtgttgattaaggaccgtaccgttgactggcctgttgtggttgagactttgc

SEQ ID NO: 1669 - DNA, 945 bp, Zea Mays
attagtgctcaaaaatctcttgctctagaagtcaagaaaaatgtaataatatcctttgaattgtctacctgtcatgaatctatctctagtctaaagaatttaaatgatgatttgaatgttaagctagagaaagttaatataactagttcatgtgtagagcatgttgctatttgcaatagatgtaaagactttgatgttgatgcttgtaatgaacatgtttctactattgctaagttaaataatgatgttgcaagccttaatgctcaacttaagacttgcaaagaaagttatgaaaaactaaaatttgctagggatgcctacaccattggtagacacccctcaattaagtatggacttggtttccgaacggaaaccaagaacttaacaagccaaaggacctccagtctcaacaaggagaaaggaaaggctccttggctagtagttttcaaaagaaccatgcctatctttatgataagaaatttactagtcatgctcataatgataggtgctatgataatattggttctcatattgatgcatttaatcttcatgctatggttgcatctaactctacatatgcttatgatagaaaaaggcctaggcgtaatcatgttgtgtctcatgtgtctaggaaagcatgcactggtcctactactgtttacaatacatgtaatgcttcttttgtactctcatgcaaaaatgcaaaagtagttgctagaaaattgggatctaaatgcaagggagacaagacttgtatttaggttccaaaagttgttgtaactaaccttgtaggacccaacaagagttgggtacctaaaacccaagcttaaataccttgcaggtttatgcatccgggggctcaagctggattattgacagcggatgcacatgcactaaccacatgacggggaaaaagaaaatgttcacctcctacgtcaagaacag

SEQ ID NO: 1670 - DNA, 946 bp, Zea Mays
accacgtctcaggtcgcgtgaggggcaaagtctactgccaggttcaatcaggtactaggcttaccgatttaccatatttctcggcatgtgcttagtacattcaaacgcttgacacaggtatccgcacgttaatccttatttcattttcatctcgtagaccacgcgtccccatggacccgtgtccacagaccatcaccattctgttatcaaagtggatacaaccaattcctgacctcgcgcgagtgctagaaaaatcactcgacttctaccgagatcctaattaataaagcagctactcgacctagcatactagtatccatctcaaaggaatcctgagttcatgcaactaaggttccagtcaactcctacacttaagtgcacagtacaagcctacaaacattaagtgtagtaaaatagcatatataaacggttatgcataaaaccggggcttgcctttattttaacacttaggtagtgtttgccgagggaggcactcgcttggcgagcatccactggttaagtccattcttccttgggtcgcccactgactgcatcttgtggttggcaccacatcagttgctcgatcggcatctctcggtcctaaatgagatgcaagatgcatatggatgaatatggtgaaaaatatcacaagatatacaatacatggtagcgaactaaacaccaattagtaagacactgcaacgactatacgcaagcgctagctattcgtacgttatcggcgttcatcattaacaccattaacaagacgaccatattttatttatttacgcaacacaaatacgatatcacaggtacacgcatttatttaattgctacgactttgcattagttctattgatcacacaaaagcatcacacacaagtttaacagaggaccgatgcatcgaagtcgatggactcatctatcacaatcaactacagcaagc

SEQ ID NO: 1671 - DNA, 947 bp, Zea Mays
ctcaatcatctccactacagcacaatcaagaaagctcaaaactccatcaaattttgcatatcacatcagaaacacgccgaacaaaaaaaaacacaaacaatccgtaaagttcgattaaagaactgttgcccacctcggcttcctgaggacgctggtggtcggggtgtctcctgctcctcctcctcctcctcctcctcctcctcctcctcccccgccgccgccgcggccggcagcattagcaaccctgctgctcccgaacttctccaagttaaggcgcctgtggaaaaccggcgcctgcttcatggtgacaatgtacaccgctgtgccatcatcgaaagcgcggacgccggcgctgcccgccaacaccccaagaaccgtcaccgcgtacaggaacgcggcggcggcggcccggtgctcatccctccgcgtcaccctcattccctcgaagctcctcggcgctcacctcccacgaggcgccaagaaacaccaagaaagaaagactagttgcgtccaccgcccatgggagtgaaagatcgaaccttcaggcgcaggctgcgcagcgaagcgctaccgggatggcaggcagcaaattaatggcgagggggagaggggggagagagagagatgtgcactacgcgcccgcggctgcgccgctcaaggaggaagcgagagcgcccagtagagtgcgactttgcgaggctagaggagaaagggatggatcaagcaggaagagagcggagaaatactcctacagtcctacttgcaatgctcctcccccagcaaaaccctccgtgtctaccaaacgtccaaacccctcttcactcagctcggctgctcgcactgcagtttgcggccagtgttgtgttgtgtacttgtactgcggtctgcggccattgttttgggcgtctgcttctacagctctctttgtgtgtgttgggctgttggcg

SEQ ID NO: 1672 - DNA, 949 bp, Zea Mays
ctattagtgcacgctatataaattcccgagtctcgctggcgctaccaaacccttcgtacgccgcttgtgttctgaccgccaccatgaatcgtgcgagagagaaacccaccgccgttgacgatcacctatgaagacgctcggggtctaggattaagcctcagggcttcatggtgccgtgagggagtgggtgtttccccaatcgatgggatcatcgaccagacagtcgggaatcacacgtcaaagttctagaaagctgttgaggtgtggaccatcgtggactgggcgacaaccgtgtagaaatcaggtatggcctcccctaccatgttcgcgtcgtccccgcagtcatatccaccggttttggtttgggcttggggtgtgggtagccgtgtattgctcaccagagatgggtggttctgcatggctatttattattgtggccgggtgtcagggctcgataatcgaagtcatgtgtgggttggtccaaatcagggagatgagtgtgtcgggttgggtcaatcggtgcattgtatgggtgcctgagtgcttgatctgggtgtcaccggcgtggtcgccgcctcagcgagctcggcgccactacctgtgtagcacggacaagtaacgatgatgcagggccatccaatctggcatgtgcatttcagattaaaagaagagggtaggagtcaggcgttgaatgatgagcatccatgaatctacgactgggaaagcatatcgcttcgggtgggtccctagtttaatgtgatccatttgatcctggtccgagggccgagaatcgagcgcataggagtcagtcaaacaattttgcataagagtccctaagttctgataaaatcaacatgtcgtccatgagggttcaagaagtaatgcggttaggtcctgttttatgcgaaacaaaccctaaacttctagaaaatattagttgccatctaaa

SEQ ID NO: 1673 - DNA, 949 bp, Zea Mays
gtcgacggttcccagtttagacatccggtcgagctcctggcaattgttgcacggacttctctcacattttcattccactctaggatcactctccggaagacaaagtcgacgatgagccccatggagtgaacaacgtcgttgctgcacccaccacatagagacgaacgacggcaacgccacaacggcttcacggacatggcgaggacgcagggcatgacaactatgtcgatcgggattcatgagatcggtgacgaagcttagcttgagcatttcatcgaacaactaaggagcgtcacatgtagcttcatccacttctccatccacaacacccttcttcacccacagcaatacatcaaacaaaagggaaacacaaatatgtagctctgaacatcagccagccctcaaccaacacacagtgagcaacaaggggattgaggagttgggcgagctcggttttgggaggggtgagatgaaggggctcgactgggagatggagtagggcacatgacagctcggaatcggactcggagacggcgatcggcacggacgggaggagctcggagcgcttccatggcgagcaggggagggacgagaccgacgactcgacggcggccgtgggagaagcagaggcctggaagccagccacgggaaggacgccggggagcagaaaccagggcggcggcgtgtgcgcagggaggaagaagatctgggcgcgcgcagcgaggagcgaccggcacggtggagcaggcaacccggggcgcagggagctgggcatgggcgcggcgctggagagcgaacagggcgcgaccgatgaacggaacaggagggagctccgcgagctggaggccgacgcgtgtgggagaagcaaggcgcgccatgggagggagagaagcactgggagagagagaacggcgcagagaagaagcgcgtggataggataggatcccag

SEQ ID NO: 1674 - DNA, 955 bp, Zea Mays
gcgcggcagaaatgtttagtcagtagtgtggtcatcaggatgtgatttagtaagggccggtggaatagattctttgcacatcatgcatgacttgcatataaaaaaaagcacccttctccggccgcagagttcgtcgtcaaactcaaacgtaatagcatctgaaaaagtcagaagtcgtccctgcatcacggtgccggccggaacggctgctactgtacaccgcccaagcggaatcttcctctcctctgcacagcactacatagtatagatagtgcattatttacacatgattttctgaaggaaatcaactgcattgatcttcctacgaccaaacaaggagcgttggtatgaggcccatgcatgtcgactttgtttgaacgaatggaataaacgcattccttcaatataagcaaagtacgtacgtacatgtggggagaggaagaccaagtcgtttggagtatgcggctgcctcaccctctgctgcaacatggtccctgcatcttaccaaaggtagaagatagatcgattatgaagaaaccaaaggggcgagagtcagagaacctccctaatgtacaatataaggaccgaaggtatatcacaaaaggtccccaaggtacgtcgtctacgtcagaggagtagtaaccttcgagaactcttgaaagttatcggcagtcagcacgggaagcatggaaaaagtccaatatgccgagcaatactgtggacatcttgtaaatgtagagtctaacgtacggttgtaagtgtggaagttgatactatttttttcaaccttcttccactatcatatatgccttcgtaatacttgtgaaaggctactgttctcttgatccttaaagccagcatcgagggtcttggaggaagcttttgccacttcaacagtttggctctgtcatcgtaaacactctacgagatccacaagcctctatcacaaatgtac

SEQ ID NO: 1675 - DNA, 957 bp, Zea Mays
tccagatttcactagaatagccaagcctatcaccgaactgctcaaaaatcatgtcaagtttgtttggtcacctgagtgtgacaaagcttttgagaagctgaagaagctattgactacaacaccagtgctagctcaactagatatcgcaaagccatttgatgtgtattgtgatgcttttggcattggcattagatgtctactgatgcaagaaggacacgtggttgcctatgcttctcgacaactcaagcgtcatgaagagaattatccaacccatgatcttgagttggctatcgttgttcatgcactcaagatttggcgccattatttgctaggtaatacatgtcacatttacactgaccataagaatcttaagtacatttttacccagtatgaattgatcatgagacagagaaggtggctagagttgatcaaagattatgatcttgaagttcattatcatcctggcaaggctaatgttgtggcagatgctcttagccgtaagtctcagtgtaattgtctttcggcaaaaccttcaactgtaaccttgtgccaagaaatggaaaggttgaatttggaagtagttcaacaaggagcgatagctagtctgactcttgaattaactatccagagtcaaattgttgatgctcaaaaggtgaacaagggtatagctcatatcaaagagcgagttgtagcgggaaaggttacgtgttttataattgatggaaatggtgttctttggttccaaaaccagttggtagtcccaaatgttcctgaattgcatcaacaaattcttgatgaagctcacttgtcttgatactccattcatctgagaagtaacaagatgtatcaggatctgaaacaacgattttggtggaccaaaataaagattgaaattgctcgctatgtcgccatgtgcgatatatcaaagggtgaaagctatgcacttaaaaatctact

SEQ ID NO: 1676 - DNA, 958 bp, Zea Mays
gggcgaacatgggcgggcagcgcggagatctgagaggtaggagagtgggggagacgatcgcacggacgtggggtgggggagacgatcgtacggtcaggggagcgcggggcatagccatggtatcgtcaggcgcccacgttaggttcttaataaagtagtatagattgcaggtgggtgtaaatatcatgactcgtttgctcccacaactgcaaaaagcaggggtctacatgctgtgggatttctactgcgaaaaagtagatgtggtgagaaaagcgggttactgtaggagccctttggtttagcttgtgctgtgggaaaagaaaaaggttgcaatagcagaaccaaacatacttagttcttttccctgtagttttcactgcaaggcgagttttttttgccttgcacaaatacttagttctggtccaaaatcaaacactactgagacgttgcatcacactatgactctcctagagtgctattaacttctggttttgggctcaggcgaacatgtcattttgtgttgggctggatgttgttacagaacctaagcagttcaactccaaacagtgtctatgttgcatatagaattggagtgattttttttccagataagtattgaattttagctgtcttttcttctcctatagaggcagatatgattgtgttcctaagtttgaggcttgtttgctggttcatgttcttcatggaagattgaactctgcttggcatgatttttactaattgtgctgcgtggcagttgaggcctgcttgctggctcctgtttttctctttgccaagatttgatccctggcagttaggtaatttaaacaatgggaaaatccttgatgcttgctgtgtacgtggaaaccattaataattgaagttttctcagtacagatctgcatagcattgaactggacagcttgctgtgttactctgtgtaacgaacgatctactg

SEQ ID NO: 1677 - DNA, 960 bp, Zea Mays
ctctatatttagtgtagaagaccctttagggttcctggagtcagccttagaggagttgcattaatccgcgagacgtggatgaatattgtgagccacacaaacaaaccctgctgctggtccagtccaggttgcaaatccgggttcagaggaagaaaccacgctgatctgtccctcgacatgctcgaaccatcctgcgcaaatgcaactactggagccctcctcccgcaggttattcgggtgaagtttcgtcgagtttgagacaggtttcaaatggagacaagcactgtgcgccggcggcggccagctccgtttttgaaccgtcgggataggacacagtaatacagtgtgcaatgaactgggcggtagcgcaggaacgcgggcgggcgagcgagcgagcgcagcgcagcggggtgggttggatgtgatgaatgcgatgacactggtaaaagcagcggcgctggcgcgcgtgtgctgagaagagggcgacggcgacgggcgttggcgcgacgcgggagggcggggcggggcaaccaatggccagaggcactccgcagccccccgctgaaatcccctcatcccgccgcgtaggcggcctgcgctctctcccaatcgcgtgcggccaatgcccggcgtccaccgcattccgtcgtctcatccccatgaccccacatcccatcccgggcgaccacgcctctccggcctccgtcgagtccagccccactccctttctgctgccgctgcccccactcccccactcaacgccaccgcaaggcgtcggggccacggcgcggtacgtgcctaatcccgccgaggccctgtggcggccacacgtttctcaccgaggggtttctacagcaagaccatcgctttgatctcttgaactacacggccgtacgtgacacagcccccaatctctaccagcggctgcaactggtcctatgctccatttcttggatgctg

SEQ ID NO: 1678 - DNA, 961 bp, Zea Mays
ctaaatacaacacaagtgtggaacacccctttgaaaaggtaaaacgcaaaggtacatcacttatgacacttctccattacctttgtgccatctaaggaccctcttcatgatagtgtgtaacactccaggttccacaaacaacccggaatgctactgtactacacttccgacgtccatatataaaatttcggcagcatcccctttgcaagatagcataaaagagggggcaacagagtataaacatatatcatgactaaaacatactaagtattattaatcggctagcaaggaaagataaacatacgacctgaactgaattaaccagtgcgcatgaccatataaaaaaaatgaacaaacttcctttgacaataagtttctaattaaatcatggctgcgcctgggcagcgttattgtgagagtgaaagtggacgtgctgctactcccctcattcccaacatgtatcaagtacctgcattgagtaatgcaagagtgagatgacacatctcagcaagtaaaataatatcaaacagtttaaccacataagaacattgttttaccaccacttgattccacaaccttcctattacgaaggtgcaacacgtacacaacgtacaacgcacctagttaccacacctcgcaggtagaaaccacaatagtaacatagtaatgtcacacttcatatattcctcatgagtgcaaatgtctgcaaatgcaaggatgacttctgccttcatacctctaaggatatgaagccgcatcgtacccctcctcgggcaacgtacgatgctaaaaatgtaccggtacggtcggaccataagatcacgacataacttcaaaatgcaagatggatgatgcgatgtgcatgtcatgcctacaacacttcatataacatgattcaaaagacacttcaacttcatccagatgggaatcaaccacatatatcattaccaaattatgatca

SEQ ID NO: 1679 - DNA, 962 bp, Zea Mays
cgattttcgatcacgataaggtatttgagattcaatcgtaagcgctcatcaccggatcgacggtcagggccgtttctcacatgcacgatcctgttcacgctggaacaggattgcggcatcctgtccgcggtgacaaacccaacggcgagcggtggctggtgcaacactgaattctcgttcaacacgatggggtgtcttctttcattcccaacacgtaggttatcctaacggctaccggcaagcgctgcagggccgccatgaggcgaagggtctagaagaaaaacaggggcgctcacacacacactactcatcatatagcacgatcgtcattactaccttctccgtcgaacttcagtcccgtcacgcctacacgaaacatatttaatactttttgcacatcttgaatccgccacgcccgaccatggacatggcatgtagaacaaaataggactgtaagataaaaacacgacggtagtgatatggtgatgggttgggttcagtctcgaaggaggtctagaaaatgcaatcatgcatcccctgttgaatgcacccgccgaccaagccgctaggcgaccagctgctgacggcgacgaccctgagtgcagcgcacacgtacgctggccgaccgcttcatcaacctaatactcactctggtctggtccaccccaccaccaggcgatcctggaatggatccgatgatgattcaacctcccgccgtcgtccggtgcgggacagggcaactcagcgacaccgccgagtcaactcgacgccgccgaatccatccatgctgatacgtgccgtgctgtcgttgcgtccgagccgcggggggctcgtcggttcccccgtcgctgccgcggccgatacgtggccgaccgcgcgccgatcggctctgagtcttgaggcgcaccgcgcaccacgtgtcggttcgatcggggcgcgtggggtttcccgtttccgtttcc

SEQ ID NO: 1680 - DNA, 963 bp, Zea Mays
gggaaccgttgcgggagatgaaagaatagagggaaaactaggggaaaaagtgatatagggagaaaaatttaggggtaacgattgcggatagcctaaaccaaactttgctttcactccaacacgtagcatcctctgctgctccctcccgtatcaaaaaaaaaaaggttgtagtatgatggtacgcaaaaacgcaacagagtatctctgtcgcaaaccggagaaccacatgtatggcgtgattgcgacggagacgcgacgggtggagagcagaggatcacggccgggagtcgccgtcgccgtcgccgtcgcctccacttgtcttctccatcccgtcagatttacgagaccccatgcaccgatcccccttttttccacaattccagtgttccactgcactcaatccaagaagacgcgattcagatctgccatttacgcgcacatatgcaaagggctgtcggttaatcactatacaataaaaatcagcgagcgaactggatgtaatgccgtctcgtcttcacggccagagggcagtgcggttgatgagacagcgacggcggcgacggcgatacgcggcaatatctgtaaccggttggtggatagggcgacatgggtcacctgcgctccatgagcaccgctcgtttgcgagtaaaaaaaaaaatcctcgttgctgcatgccttgttcacaataatctgcaggttttaggtggcgtttggttcctcatgcattttgagaagttgaatactgcacagagtgcattatgaaccaagactcacggacggtgcatcttatgcaaataatctgagctccaccggttgccgtagtcgtggtgccccgaatccattcaagatattactggtgaactccgatgtgagcgatagagccgcccgtcagtcgtcctcgccgacgatcgtcttcagatcttctttgagaaaatttcttcaatatcatctaaaattatatca

SEQ ID NO: 1681 - DNA, 966 bp, Zea Mays
caagttttagtatgatcctttttaaactagatgtgtacctagctagtcatacatggtatcaaacattttatcaatcaacatcttttgccagtcatctcatttccacttattactcaatgcagtacaatggatcaagcagtctcattagctgcgagaagcagacgattcgaatcgagtttttatccttgcaaggtaaacctaaacacacgacatgtaggggcactccgtccccacacacatcaaccgtccccatcgattccctggcaacagaaaggggctcaccgccttggcgtacaatgcctcactgaccccgactgccgtcgtgcagtgaccgcacttgtacccaccataaccggaatgggagaccacgtctcaggtcgcgtgaggagggcaatctgcgggcaggttcactcaggtactaggcttaccgatttaccatatttctcggtatgtgtttagtacgttcaaacgcttgacacaggtatccgcacgttaatccttattccaatttcatctcgtagaccacacgtccccatggacccgtgtccacagacatcaccattctgttatcaaagtggatacaaccaattcctgacctcgcgcgagtgctagaaaaatcactcgacttctaccgagatccctaattattaaagcagctactcgacctagcatactagtattcatctcaataggattcctgagatcatgcaactagggtttaaatcaactcctacacttaagtgcacaatacaagcctacaaacattaagtgtagtaaaatagcatatataaacggttatgcataaaaccggggcttgcctttattttaacacttagatagtgtttgctggggtggcactcgcttggcgagcatccactggttatgtccatccttcaggtcgtccaccgcggcatcttgtggttggcaccacaccacttgcatgagcgtcatctctcggtcctaaat

SEQ ID NO: 1682 - DNA, 969 bp, Zea Mays
cggacgtggatcgcctctccgtcacaagggccgtgtccccacccagcatgcagatcagccactcacacacaataaaagatctcctttcctttcgctctatccatttcgctggtaggtacctcaagtgtcactgtatattcgatcgggggcctgcgtgcgttgcatcattcgcgcacgcaataaaatgaccccgtttgcgttacacgctacggcatgcatcgtgccgcgtcacgtcacgtgtgtcatgcatgcagcgctagcgtgccgcgcgcagcaacgggccggttaaccccagcgcgtgcacgtacgtacacgtacacgtgcgacagtgaatcccaacacatgcatgcatattggtcttcccttcctgtcaccgtgatcgaattgcactggtactgcatgcggctgcgtgcatactagctcctacatgtttcggatccacgtgcatgcacgtaagaccatggtcggccggcatgcatgcatgcagcagtatggacggggagcacgcacgcggccacgagcttatacaaacactgaacgataaccaccggccgccgccgccgcgcgcgcggccggtggcgagtccaggcccggcacgcaatatccccgcgggagccgatgcgccgacgacgacgcggcgagccccgattggacgcggcgagctgacctcccgggggacgccacgcacgacgtgtccctcccggccgccgcgcgcgcggcacttgacagccacacgtacaagcactgcacacagcagcacctcgggccgggacgcaacgaagccggccggtccaggacggcgacggcgacgacgcatatgcagctgcaggcgccgcgtggccgcgcgcgccccccactccccggccgccacgtgggggtcggaccgcccgtacgggagcgacacgtccacccgccttgcattgtctctcgctgtgccctgctatatttatacccggccgtggcttcgtc

SEQ ID NO: 1683 - DNA, 970 bp, Zea Mays
gccgtgccgtacgtcatgccttgtggctgcgccgtggaaagtggaaaccaccgtccatctctccctttcttatcttctctccctgcttccccatgacccgcatatcctgatgcttgtaaccaccactgcccctatcacctagttgttgccgatcccagcgcccagatgcaaaggcccccggcgcggctcttacaggcggcccggcacggtgctagcctgcgcagctagcgcggcgtgcggcggccagccaaccgacggccgtggcagcctgcggctcgactcggccagccgcccctattttcccttgcgtgcggccaactagcacagcgcgcgcggcagcccagcgtggttcggccatggcggcatgcgcggccctcggcgcccagtgcgagtccggcagccggcgggtgagcagccccgtgacgatcgtccctggaagttcccggcgcccgttcctagcctgtacgcgatcgccgagatcgcgattcgttttcgagctttgagggatcgaagatcaagagttggcgaccaagtgatctggttcttcgagttctatgaggctgaagatcctgagcatctgtttggtgaagacaagtgttctttgacccattatgtcccatttactttacaattcactgtcccgcatactatgaacaacctaaggattgactagctttctatttacctggtccttgattaccttttgggctactatggttagattcatgctattgctttactttaatcaatgaacatgatgtgaacacttatgatacgatgttgtcattatgattatgatgttggactggtgatacttaagggcactcgcgctgtttctcgagtgcctctccgtaaggacctattcgttggatgaccgcccgggaaaacagtgcaaccatgagggtggagtgggacacctttagctgagtaattagaggaactgggtgtagttcgcttcgccgtcgtgccg

SEQ ID NO: 1684 - DNA, 973 bp, Zea Mays
ctcgactaatcgtccggtcgtccgattagtcgtcgactaaacacgattagtcgtccagtttaggtcgggacgattaattttccagggctcctgtttcggcctgtttgggatatgggctggacgactgggcccattagtgtaacagtaaaacacacattagggtttaggtcaccttctcctctcctgttccggcggctttttgctcttctctcctgttcaggtggctgtgcctgtgcggcggctcacctctccctgtccaacaccgccctgcaccttcctcctcggtgtcagcatctcaccgtcctcgacggcggcggcccagcagcagtctgcagcggcggcggcccagcagccattagcaccaagatgagtacatcaaccgacgccttgaacagatgttggactgctgaccgtctggctcggcagggattggaacatccagaacactgccttttttgtgatcaggaggaagaaagaattgagcacattcttctcagttgtgttttttctagagaagtttggtatatgccgctatcaatggtaggactgcagcaaggcttcacggaaaggtattccaaaattggtagaaactggcagaggtacaagtgccacccatacaaaggaaaggatttaacaccctggtttcacttgtggcttggatgatgtggaaacatcggaatgcatgtgtctttgataaggctccaccaagcattgccaagatcatccaggaagtcagagatgaggcttctctttggtgtttggctggagcagcagggctgcgtggtctttggccataactgttatgtaatgtggtaaaggtcctctattgttttgtatcctagatgagtccttttaggttcctttgttttcggcctcccgcctccgtaaggagtcctttgtatttggtctgttccagacccttattcttcttcttaatataatgagacgcagctctcctgcgttttcgagagaa

SEQ ID NO: 1685 - DNA, 974 bp, Zea Mays
gtaacactccaggttccacaaacaacccggtatgctactgtactacacttccgacgtccatatataaaatttcggcagcatcccctttgcaagattgcataaaagagggagcaacagagtataaacatatatcatgactaaaacatactaagtattattactcggctaacaaggaaagataaacatacgacctgaactgaattaaccagtgcgcatgaccataaaaaaaataaacaaacatcctttgacaataagtttctaattaaatcatggctgcgcctgggcagcgttattgtgagagtgaaagtggacgtgctgctactcccctcattcccaacatgtatcaagtacctgcattgagtaatgcaagagtgagataacacatctctgcaagtaaaataatatcaaacagtttaaccacataagaaccttgttttaccaccacttaattccacaaccttcttattacgaaggtgcagcacgtatacaacgtacaacgcacctagttaccacacctcgcaggtagaaaccacaatagtaacatagtaatgtcacacttcatatattcctcatgagtgcaaatgtctgcaaatgcaaggatgacttctgccttcatacctctaaggatatgaagccgcatcgtacccctcctcgggcaacgtacgatgctaaaaaatgtaccggtacggtcggaccataagatcacgacataacttcaaaatgcaagatggatgatgcgatgtgcatgtcatgcctacaacacttcatataacatgattcaaaaagacacttcaacttcatccagatgggaatcaaccacatatatcattaccaaattatgatcatccacaatattagacaattgagaattaatacttccaaacaaataaacttcatcatagaatttaatgattaacataattaaaacttatgcatactcaatgatagggaataggatgcaaaccaaactgtag

SEQ ID NO: 1686 - DNA, 980 bp, Zea Mays
tcggaagttgcgtgtgccataccgctatcatggccctaccacacctttagaaaaatagcacacatgcagcagcagagcatggctacaatgtcgtccgaagccgctgttatatatcccatcgaggatatggcctggcaaatccactcccagatgcatactacgctttccagcagatagctagctagatactcggggcgtgcatgcagagagcggaatatatatagctcaaatgctggttctaagaatggcctatcgatcagcattcagcacgcgcgtttcccacaagagcaatcaggaagcgagcgcgcgaacgacagctcggcaagagagagacgagagtcctcgctgtggctgtacacatggctgtccaatcaagtaaagaagagcggagccctctaatgaaagggccgggtgtgtagctaggtctgcaggttgtttcggctcgtgctggctggatgcatgctgcgggtaactctgcctctttcttctcctatcgctcggaagttgcgtgtgccataccgctatcatggccctaccacacctttagaaaaatagcacacatgcagcagcagagcatggctacaatgtcgtccgaagccgctgttatatatcccatcgaggatggcctggcaaatccactcccagatgcatactacgcctttccagcagatagctagctagatactcggggcgtgcatgcagagagcggaatatataactcaaaatcaaatactggtatgttatctctcccacctctttctgtatatacatacatacatatacacatgttaccacatatcatatgtgtgcacgcttcttgtagtatactactctcaccgtcctcccacaaaaaaatacagctcttacatctcaaagaatcaagcacacagtttaatattcgactaaaattatatagtgaaatgtcaacatttaggacataaaatataaatattactaaactaattatagacctaagttag

SEQ ID NO: 1687 - DNA, 980 bp, Zea Mays
aacaaacccatgggtatgaaaattgatccaaacccgtaccctaatggggtaaaaacccatcgggtttcgggtttcgggtacccattgccatctctaccctggatgcaattccacatcagcaagcagatcgtagaggtgcaggtactcaataacagctcctacagcaagaactcctcttatgtctgaaatccaaaccccattggttaaagcttctgccatagttctcttagatgctattttcctagggacggcttcatatgatcttggagccaagtccacaatcctttagccattaagccatcgatcattccagaacatggtatggtctccacttcctattttcgagatcacaacaatggaaaaatgcatggaccttgtctgggacttgaattggacgagccgaccaagatcagtccggatcagctttggctagccaaagccatctcatgcgcagtgcccaccccatctcttgagaaagaggtgtctcatatggcaggattttacggaaacaccaaataccaactgagatccaacacttgtgcagggtatctgacttggaaaaaaattaggacaatggtgtttgagtaacacatgtaagactttccacaattgcattcataccagggtgcacacgacaaaacacaatatttggatgaacttgacaatatcaggaatcaagatatcaccaaaaatattggagagattctaagcttccatactttcacaaggaaagaagagaacaatggaaggaatgttatttctttctcctttgatgaggggattcttttcgaactgcacaacagacagtatagcttcgggtttttttattgaacgtgcttagcacgtatttcataaagaaggtagaaaagttacatggcttcccctattgccgggtgagctgcccatccacacgtttcaccggcgcaaggagcgagagagatagagagcactagagcagagacttgcttaagacgctacta

SEQ ID NO: 1688 - DNA, 983 bp, Zea Mays
cttgatttttcccttggccgcgttggtttcctgggcgtgtctttcttctctgcaggcagccacgctcatcttcctggccgcgctcatcttcctgctgctccagcgcgcccagctcccagctcggatccctgcctcaactcgcctccctcacggcgccctccctccgttccttctcctccatggccgtcggtcctccccgcgctgctctctgtctctctcctagccgcggtcggctctggcccaggtccgatcggtgctcctccctgctgtagcgccggtcccagctcggatccctcccagccgcggctctccggtgtttggccctggtccaagctcctgctcgtccagcccccttcccaggcgcccctggctgagctcccccatggcgtctcccccatccatggctgtgtcgttcccctgctctggtggctgagctatctctcttgtgctcgacgaaacgaccatgaggagttttgtgttgtgtgcagccccatatgcgacaccgtcgaaccccggatgtgagcagagaaatctttggaggtttggttgaatgaaagcgaaatcccgaggtgtcgttcattaggtgctcgacgtatgggctaaagtgtagcttgacgttgtgcttatactttccgagttgaatttaattttgggtgaattccttcgctatctataattgtcagcttgaatgatgggttaaatagttaggtggtcgatcactcttttgtgattagcataggtacttgtggttagcaggtgtggtgtgatctccgattccctgttgttggtgtcttgcttcatcgtaaccatagggaatgatgtctttcctctaattacttgtaataattgtgtttgatttatatgttgtcttagctaattaatgaaaggcctttgtttggtgtaataatatggttgccgttttagtgggaggtagtcgtgttgtatgtcataagttagaattaaggcgagtatgtattgtatta

SEQ ID NO: 1689 - DNA, 986 bp, Zea Mays
cagcattgttcctcatttctcgaagcgtcgccatcgactggataactctcagccaccgtcgtggttctccgcctggaaccgatgatcgagttggagaagcacacgacgagggagccggagtgagcatggagggcgcaccacaggcgactctgcgccgccaccgtgagcactgctctgtcgcctaccatcgatgtcggccatggcagtcgttgctccgcagcctaccatcgacgtcgaccatggtagtcgttgctccgccgcctaccattgacgccggccatggcagtcgttgctccgccacatcttgctgcatactcccgttgatgggaacgctcgacctcccggtgctcccgctcccgtccttggtgagcgtggagggcgcatcacccgtggctacgacaacagtaggtcaaggcaagtggaggtggaggcattggcgcggtagtcaataggttattcattttgttgagattgcctgattgcaacaaagttgcatccagttaaattggcaatgtggtacaacaacgagctttaattaagctgtgcatcctatggccatcatcaacattacatatgatttacctttttcctcctcctcttcttttttttaaaaaaaacttcaccaactcaagatccacactgtttcatgagtacagaaagtcattggcttccaggggtagcgtggtcagccccaaaagatttgtgattacaactcaaatatgagcttcaacatgctctcctgaagctcgaagcagcaaaaggcttcaacaacacagtaaaagcaaatttggatattatgggttgtgcaatctgttgaccctgcttggctacttttgttcagcgggtggaatgcatttttttctttggagagagacgaactacggggattgagttcttcatgtgcgaatagattgcaattcataacagttcattgctaactggtttagcatcgtctattcagacctggcttcaagttacttagaaac

SEQ ID NO: 1690 - DNA, 986 bp, Zea Mays
ctgaatgttgtctattagacgctgaatattgctcatcataggcaacaacaacaaaaaataacaataaagatgcatacttcatggaaacaactagatttcttcatgcgtgatgcgtttacctgcataagaaaacctacaggatacacacaccattagatatctggtactcgcatatgtttgctcagcaacatttccacacaagcatagcaagatctgcaagggactcttctggtttctagccaatagacacacaacatctaagctttgttcgattatccctacatcacatggattggattgaattggaaaatgttcgtatagattttgacttggtataaatttaaactcaccaaatctaatttaatccacatatattaaggtgaaaccgaacatgccgaaggaaggcgatcagtcccgttccccaccacctgcggtaactgaaagaatccaatcaatcggttgatttccaccaccaatctttgaagcgaatcaaatcaagagaggcaaacataaaaatttagatcttcctttcgcttgattgctccagacgatccgcttcagttcatggcagaggtgggtagaacaaccaactccctgtaatctctacgtatgctccacagaatctctgcgcgccgcttcatgctctgccggttcctcttcgttggagctaagcactgcagggccagctcgtacaacttctcgaccgctagattgatctcattgagctggtatgttctgagatagatattctggatcgagatagcctgctgttcccttgacttgattgagagatatgactagcgtcagctgagctagtttggcaaatccgaagccagcaaccttatagctcgacaggtgttcattagaagaggatttgatgtccctgtgggttacgggatggtctacatggatgaaacagaagagacagcattagtcgctaatgatccaggtgctagatgtttgacagatgatttcttgacagtcac

SEQ ID NO: 1691 - DNA, 988 bp, Zea Mays
ttatacacaagaaagagctacaaaaaataaatggatacacaccaagacaatacgttaaacaaaaaggaaatgcactccacaaacaaaataatatatgctctgacatgatgcaacaatcaaagcacccctagggttttattttactaggcttacatatataaaacaaaataactctccactatttggaaaaagagtagaaagaaggaaagaaagagggtaacacctgaatttggtggattttagaaaaagaaattttacaccccaaattcagggtgttacacctggcccggcctggcctgaaagcgttacaactcacatacccaaggaactaacaatagtgtcgacaattacaaaaaatatcaatctacaacacaaaatcgtaacattaattcttaagaaaaaattgctttgtcaggtggcacactagacctccaacagtactggtctagtgcaccattggacctttgtcagactgctatagcaggtagccattctaacgggtgattgacacagtaactgtaacacccgggtgttaagagggtgttcaccttaacactactgtcgggtatagtaattaggggtacctagattacgcccctaaaaacgcttaacccctaaaccaccatcaaggcacattccccgataacgaaggataataagtcgtgctttgcccgaggcccctcttagaggataccataactccgcgtcgcttgagcctgcccacagacagggtgtgttctcagaagaatcctcgtcccggctgaggtcccctttccccaaaacgccagtctccgcctcgtccgagcccatctcgggtaagaaagacaaccccaagacaaaactcacccaaagtctgcaggggacaggagcattcaatgcgcatacctgccccacacagagttccatgtgaataggagcaataagactgcggtcctgtcaagcttcaacaactacgatgacgcatgcaaccactgttcccgcacgccgt

SEQ ID NO: 1692 - DNA, 992 bp, Zea Mays
cacatctcggtccctggagcatggtaaaagcaatttttagcctcatgtgacctatagcacacgtttccatggccaaacagacaatttcatgtctccgttctgccacctatgttttaatcctcggtggccggtaagacattttcggtcactcgtgagctataccacatgtttttattgctaaatagtcattttcatgtctctggtctgccacccacgttttcatcccataatgctggtgaggctattttggtctcccgtgaccaatagcaggcgtcttcatgaccaaacaacattcttcatgtctctggtcctcctcctacgttttggtcccttaggctagtaaggttgttttggcctcctatgacttataacacatatttttgttgtcgaataacaatttcatgtctctcgttcgccgcccatgttttgatccatgagagtggtaatgttgttttggcctctggtgaactataacacatattttcatgaccaaacaacggtttttatttcaaatttcttgcaccgatattttggtcaccagagaatggtaaaagcagtttttggcctcccgtgagctatagcacacgtttgcatggccaaacagataatttcatgtctctagtctgccacctacattttagtacctgtaggtcggtaaggcatttttggccacccgtgagcacacgtatttgtggccgaatagtcattttcatgtctccgttctgccacccgtggtttcatccccaatggccgatgatgctatttttggcctcctgtgacctatggcacacgcttttacgaccgaacaactttcttcattcctctggtctgcctcctacattttggacccttaggcttgtaaggttgtttttgcctccagtaacatataacacatgttttttgtcgtcgaacaatgatttcatgtctccgatcccccacccatgttttggtcccaaacaaggtaaggctactttttgtaacaccctagaata

SEQ ID NO: 1693 - DNA, 993 bp, Zea Mays
tccacataaagtaggaaataacagctgtccaaaactggactgtcagagtgattgtgactgaattttattcagttagctgaaatagcagttcagtgtgggggtaactttggggtacaatagaatttgctctgaatgttttcaatcatgggttgttataccaagttggtaaagctaaagttggagtataactttggctaagaagttttggtctgtaccatatgaaattataagataccagggactttaacagggaggtgtgtagatggggcagcaggcctaaggtaagtgggttcagtctttcgtttgaaaactaacgaagatcacccctgctgctctcacttgtgtatgtgaatgaaaatgaggggaaatggagactgaatattggttgtggtgtcgactgtgtaaactttcagtatctaaaactgaattcggttcagttctttttcagatacctgaatttgagtttttgtgttttcacctcaaattggtgttcaacttgagatgtgtttggggtcagctagtagccattgaaacaaagataaagagtgattatagaggaacaactcctagtaggggagtatgtcgagccctcatgtggaattgagaaaaagtatagtcttgtgatgttttatagtattttatttgcaaacagcataagcataagcattcatgttcatgtagagctcccaaaacaaagagtgaagattcaagatgaagtggttgctaaagaggagtctactccagtgtcttctcattaagaggatggagctatctaatcgatggttgggtagagggatctagaacctcttcactgcaacaaaggtgatgagaagtattctaggagttcctgtggctggagggcgtttccagttctggagaaggactagctaggtttatgtataagctttggagggtttctaccttcctgcttttgtaataagttatgcactctgagtatatcaggacttgtaataaatattactctttcgaaac

SEQ ID NO: 1694 - DNA, 998 bp, Zea Mays
gcctgatgaagtatagatagctaatactagcatgtggttgatttcggtgtcgtataatttagtgcttagttcgctaccgtgtatttgtatatcttgtgatatttttcattatattcatacatatgcaccttgcatctcatttaggaccgagagatgacgatcgtgcaagtgatgtggtgccacccacaagatgcagtcggcggacgaaccaaggaaggatggacttaaccagtggatgctcgccaagcgagtatctcccccagcaaacactatctaagtgttaaaaattaaaggcaagcccctgttttatgcataaccgttatatatgctattttactgcacttaatgtttgtaggcttgtactgtgcacttaagtgtaggagttgcctgaaaccctagttgcatgaactcaggatgcctttgagatggatactagtatgctaggtcgagtagctgctttgctaattagggatctcggtagaagtcgagtgatttttctagcactcgcgcgaggtcaggaattgattgtatccactttctatcataatgatgatggtctgttgactacggtccatggggatgcgtcgtctctgagacggaaattggaataaggattatggtgtggtaccgtgagtcaaacgtttgaacgtactaaacatatgccgagaaatatggtaaatcggtaagcctagtacctgattgaacctggcagtggactttacccctcacgcgacctgagacgaggtctcccattccggttatggtgggtacaagtgcggtcactgcacgacggccagtcggggtcagtgaggcattgtacgccaaggcggtgagccctgatctgctgacggggaatcgatggggacggttgatatgtgtggggacggagtgcctcgccatgtcgtgtgtttaggtttaccttgcaaggataaaactcgattcgaatcgtctgcttctcgcagctaatgagactgcttgatccatgctgctacattgag

SEQ ID NO: 1695 - DNA, 1001 bp, Zea Mays
aagagatgtgacgtcggtctctccatggttgacaactttctggtggcgatccaccgtgtattgtgacaagaatttctctttcgcttgatgcatgtagtcctcgtattgctgtcgctcatcggtcgtcagacttttaacaaccggcttcaggatattgtccagggagatatcggtgtgatctttagaaccaaccatttgagagcctgatttttagtagatctagacacctgtctctagcggagtcgccaaaaagtgtgttggcgccgatctggacgccaaacatggaaacgggtcgcctggcggtgttctctgcagaggcgcggatggtccgcgacacagagccggacggtccgcgacctggcgtaggagctctcctcctatgtgtacgtccggacggtccgcgcttggggctcggacggtccacaatggcgcagagggtcttcttcttcacagcagacctagatctcaccttccgggagggaccccgtcggggaggagagatcctagggtgtgtcttggcatcgacagaccacccaagatgcctctagtcgacgtagagccaaagagaagtgaagatttgaggtagagggaggctaaactagaactactcctaatgcataaggtaaaacgagaagtagatttgatttgatcgattgtggggggtttaatcggtcgtagcccttcatctatataaaggggggagatctggacccattacaagtcatttcccaagttaatcccgtagttttagctaacaaaccccgcaagaaactcggaccctgcgcacgcgcggaccatccgcgccaccactgcggaccatccggaccacggtctgtctgcctcagggccggaccgtctgcacggtcactttctgtgctcaacaaatgtagtagtgaccaacaacagtctagtagtagtctccctttgcagccttgttagagtagtgaattcttgttcatctgactggtgccgtacatgataatccatggcatcgccgttaa

SEQ ID NO: 1696 - DNA, 1006 bp, Zea Mays
tctcatgcttggtgtgatgttaatttatgtctatatattgtttgtatgtattgctgcgagtatacaagtaggtgaacgaggaacccaaagcttagtaggtcaaaaactcgaagcagaagctcgcagttgagtgcaagtgtgacacaagacaaatgatgggaagacaccatttgagttctggtagtgtaggaagcctgcgattcatcaaataaagacatttgaatgtattgtctatgtcaaggaaacaacaccacaactcaagaaactagatgaccaaggcaggaagatgatctttgtggttatgagaagggaatcaaagcatatagaacatatgatcctatcaccaagcgtgtcacaatgacacgtgatgtggtgttcaatgagtcagggaaatgggattggagtggtgaagatcaagcgaagagcaacatggtgaatcacagcgatgctcctttaaccgtggagtatagagaagtgtttgtgcctaagatgggggacgaagaaagggtattagatagtgatgtcttggatggtagtccagtggtgtcggatgcaggagggcataatcacaatcctctgtttgactctagggaagatgaagtgtcccgatcctttgggactcaaatgtgatacaattactagtcccaggaggctagtaaccacattcctaacttcaaatagtacagagttcaaataaaagttattacaataccagagtacaagctcgagagagccaaaaatacaaagcgcagtaggagataaactagcccaagccacaggcagaactgggtgctgacacaaccccctcaatcaagcatagcagaaaagaagtcttcagctgctgaaaaacataaataaatctgggtgaatacactaggaattccgcatgcccatcccgctcctgtaaagagaaagggacctatatcatacatgctttatatggtggagttgaagtcactcttctttttctcagagaaaggcagtacttttagggtttttcccaaag

SEQ ID NO: 1697 - DNA, 1008 bp, Zea Mays
gaagacctgaagcatccacaattttgctctagaaccacatacataatatttttaaatcaatcacatagataggcactttgaatagagagtttacatcaaggttaaacgaaagagtatagaatacatcagaagaataaaataatatacttgttgaagcaattaagttcttacatcaagatcacgtagtggccaggtacaaaaatacataagcatctctataactaattcataatttataggacttgaatggctaataagtgcacatttgtgtctagtctacatacagaaaaggaacaccagcccaccattgtgctcatcaataattcccgagtgacacataggttagccaaaggagtggttaagtctaaacactaaggatgacatttggattatgtagtttcacttgacaactttagagtgtgctatacttgatgggttttctagtcgatagtattagagctatgctacaagcctacaaatgaactcaagctttctcattcttaattaacaacaatacaacttacttggtggctcgaggaatctacttggttgtactcgggcatgtcatatgcgggcttagacttactcaattttcaattgtatacattggagttctctaaaggatcttatcatctcagttgtttgcacacaatgcaatttactgattatacatgtttatcagacatctatatctatactatacttaaagcaccagttttaacggtcgtcccgcgtcatctttttacaaataacctctcacagctatttcaaattaatctgttgcacgcctatagatggccaaacggtggcccggcatgggccagacgccagcgggccataactctggcccaggcatgtcatgccggcctgctgactgtgtcaggccagcccgttagaccgtcggcccatttgattaaatcgacgtaaaatattaaaaaaatagtgcagaaggtggggtttgaacccatgccctaatggaagaagggcggaagacactgagtgaagctg

SEQ ID NO: 1698 - DNA, 1013 bp, Zea Mays
ctcttaccaatgcaattagttcaaagtggtgtgttgggcatttaatcaccaaaacaactacaaatggccctctctcaatcagtcacgaagactggttgagttttcttttcttctcagggacaccgtctcacaaggatctccacacaaagaaatggagtctcttgcttaacttttcaacttttgagaatggggtgagagagagaatgaaaacccaaatgaagagcacaagagtttgcaatactcaaggacacaagcactaagtctctcttcactcaaatcgatcggatgcgctcttacgtggctttgcatgtgtaggagttgttgcacttgatgtatggttgcttggtgtagctcttgtgtctttaatgtgctagttggggtgtatatagccccaaccaccccaaatagtcgttagaaagctgggttaaacactgtacctgcaggtggtgcactagacccactataatgttggcccggtgcactaccgaaccgtctgtatcgacatagggcaggtgaccgttcggactatcagaggcaccagaccatgaatagtgaaggtctagtgacctccggaccctaccacgtcagcatagtcgttggagcaaagatgagctttgggatttgtcagacggcctagtgcgccaccggaccggtccaacgcgccagctccaaaaaccctaaatacatcctatctgtgtaaccagttcgaatagccatcggaccggtttggcgcgctagctgagaaaggccaagtctcggcctctctgcacggacggtccggtgcaccaccggggcgatcatgtgcgccaaacagtagacctgtctttgcaatcaaatccaaatcttcttcaaatgattttgactggtcttgaggatgttcctatgacttagacaaatatatctagtgccaatccaactagtctaagttatggatcttggacatttcagtctcttaaactcatatcttgtttttgctcaaactagctccaaaaaggtgtttcattgaaattgag

SEQ ID NO: 1699 - DNA, 1023 bp, Zea Mays
tgagagttacattaatcagaacagagagagtacaaaatatttttaacacgaggtgcacgcgatggagaaccggtaccggttggtgagcacggagcaggtactgatactgtggaccattggctagttgagacagtactgccggtccaccacagaccacacccccatgtgatcgagcgaccagtgccttcgttagctcacaatgcaaggtccgtactttttttttaaaaaaacgtaaaaggacaattgtgggtaccctgcagtctgcactaagcacacaaataaaaaaacttgagaacaacaaaatagaggtgcgatgtgcccaatgtggagagctactggacagggcagctacaatcccaaaaaaataactggatgcagcgccgagaaggccctccaccaaaataacaaatgtgagactagaaagaacccaagtgacaaaagaaatgagcaagacatctctgcaaaaataagctatcaatcaaatgcacacaaactaagaactctgcacgccaacacttgaatgaggttgctgtaatctatcagaataagcgagcccatactataggatgaatcaatggcatgtagagtaaggggctacagatgtttggcgagccgtagtagttacaggcatcaatcaataagctatgctctagcaactgtggatagggtaggagtaggactatttgttaattcagtaattataataaattggtcatgcactccactctatgccctagcaactttgtggatggggtaggactatttgttaaatcagtaattataatgaattgggcaaccatactgtagcacagttgctagacaacaataaatgcaaggactagacaacaataaatgcagtcttaattctgaacacagaacccccacccccgccccacatacgtacactagtattacagaacaaaaagtctaagggggtgcttgggaacaaagtttttctgcagttttggaagaatactacagtattctcaaatactgcagtattatatacataatggtgtttgg

SEQ ID NO: 1700 - DNA, 1024 bp, Zea Mays
cgcgggaacgagaaccactaaattcggagttacggttaaggagttatgatcttatggagtcatttaatgcctcgtatagattaattcaagtggacaattttaaatctaagtttcatgtcaaaacagtgttactagatgataaacaatattaaaacaaaattaatggaattggaatggatcaatttggacctaatatgaattttctatgaattatacaaattctaggaattgttttcatattaaaaactcatttactaattcatttttcctgatttcccaagtctctggactgcgccttaaataacagaaaaggaaagggtctcggcgcaagaaacccgagacacagtgaatagctaaagtggatggcgcgtttatttcctataaacaaaggggttcttctgtaagttcgacatcgtgaaggggtgtggatcgagattagccgtcagatctaaattccgcggccaggattagatctagcagcgaatgaaccggtaagcgacgagaaccattggatctgaaatcaatggtgaggattttattactctaggtctatttctaaccgttcgttctcgatcaaatcttgttcgcacgatcaccgatcgacgtccacacagctcccctacgaattccaccccgttttcccccagctaccgccgcgacggcgccaccagcatacacggtggtggccatggccggaaatggccagatcgatattccggccacgaaattcacatcccgatagctccacacgatgttgcagtcacgacgaagatgggggttagttcctcgcctgagatgatgtcgagacgagccgcagccatggagcagtgcggcccgcggcgacgtcctgcgctccggtgaggaattctccggacccaagtgacctgcgcatccaaggaatggcacggacgagcaccatgaatgtcggcggacctccgagacccatcccgagcatcggtcgggcgcaaattcggaagtcgagtgcggcaatggcgagagaggtaatgaaggagctgccggtggc

SEQ ID NO: 1701 - DNA, 1026 bp, Zea Mays
ttgccttctgtcgggtggcgcacccggacagtccggtgcaccaccggacaggcactgttcagtgtccagtgcagattgctttcctaaattggcgcagccgaccgttgaagatttggagccgttggcgcaccggacactgtccggtgcccccatcagaccgttagctcggccacgcgtcacgcgcggattgcgcggccgaccgttggcgcggccgaccgttggctcaccggacagtccgatgcaccaccggacagtccggtgatttttagtcgttcgccgtcgtcgagacccgagagtagccagttgaccagactccagcctggcgcaccggacactgtccggtgcaccactggacagtctggtgcacctagactgcgcagagtcttggctgctccagcaagtcttttccgttttgtcttttctctgattctagcacttagacaaatatgttagtacacaaaaactaatgtactaagtctagaatcataccttgtatcttgattttcactgcttgagtctttggcacaattgaacacttaaaccatttgtgttgggcacttaatcaccaaaatacttagaaatggtccaagggcatatttccctttcagtaaggtagtcctccactagatttcctaattagtaagccaaggtgtcccattccacccttgtggtagcacggttatctcaagttaagctccatgttccaattaacatgatgatcttgtcatgaacaataactaaaacaacaacataattggaatatggtcataattcaaatgtaacattaatctcaagaccaggtagagcaatagcatgtctacccaatagttcagttgtctgcaaggggtggggtaaacaaactagggaaacctattaggtcccatcaaattaacctaagcatgtcacattgatgaacaagaatattattaggtaaagaagagtgatcaagggcataacttgccttagacttgggatcccagatacttcaccaaattggtctccgggtgacccgtaacctcgctggta

SEQ ID NO: 1702 - DNA, 1027 bp, Zea Mays
cctccctacactgaccactcccctactgcccttgcccctttcgggtaaggtagtcctccaccagctttcctaattaatcagccaagggcgtccataaacccttgtggtggcacgtgtttctcaagttaagctctatgttccagttaacattaatgatcttgacatgaacataaatagaataacaaaataactggaacatagctatgataaataattatcccaaatccatgtaaagcaatagcaaactacccaagtgattcagaggtaaacaagataatgagataaacaatctagggtaacctattgggtcccatcaaaattaacctatgcatgaataaatgatattaaagaacattattgggtaaaaagtggtcaagggcacaacttgcctggcacttgagattccaggtaacaggatgatcttcaggtgactcgtaacctcgcgctagtcgtagcaatacaaacaagcatggtatacgcaaaattaacatcacactaaacataagaataaactgtgtaataataatctacgcgttgctacgagactaacggaacttgaacggattaaatcggagttaaaacggaggagttatgaattttcgaagttattaagtgcttagtatagactaaatcaagtgaataacattaattcaatttttatggctaaacaaaggtactagatgatgaacaatattaaaacaaaattattgcaactggaatagattaatttgaacttcatatgaattttctaagaattaaacaatttctgcaataaattttatactagaaatctatttccataatcatttatcctctttctctatcctctggatcatgcgcactattacagaatagcacaggggcaactctataaaactcgcccagactcagccaaccatcaagtggactgcgggttaattattcaatctctagggggttcttatgaaaatgtgttcgcgacggggtatcgcagaacatcggtcgtccgatctaaacaaaggtcacgattaaatctggccgcgctcaa

SEQ ID NO: 1703 - DNA, 1035 bp, Zea Mays
cccgcacagagcctctcgtgtaccacttgatcgccatccaccgggaccctaggcacgtccacccggtggtgactcaccgtgcaagccagcattctccgccctgttgaccggttgatcctgacggctgacgctcctccggatgcctcctcggtcccctccattcgcgccaccctcgccgacccccactggcgtcgcgctatggaggagtacgcagccctgctggccaaccacacctgggacctggtgccgcgtccacccaacgtggtcacctacaagtggttttttcgccacaagctgacctcagatggctctctcgaccgctacaaggcccgttgggtccttcgggcttcacctagcgtcccagagtcgactacgacgagaccttcaaccccatcatcaagttcgccaccgttcgggttgttctcacccttgccctctcccgggactgggcgattcattggttcgatgtcaaaaatgccttcctccacgacactctgacggagactgtctactgtagcctgcccactagcttcgtcgacttcactcgtctggatctggtcttccggctgaaccgctcctgtacggcctcaagcaggcgctgcgaccctggtacagtcgcttcgcctcctacttggcctccatcgacttcattgaggccaagtcagacacatccctgttcatctaccggcgcgacagcgacatcgtctacctcctgctctacgtcgacaatattgtgctcacgacatccactgcggaccttctacaacgcacgattggcgcctttcaacgggagttcgcgatggacctggggcttcttcgccacttcctcggcatcaccggcgagtgccggcctcaggatctcttcttccaccagcgctagtacgccattgacatcttggagcgggctggcatgtccgactgcaagcactgctccacgcctgtcgacactcagacgaagctctctgaggacgacgtcctaccggagcctgatcaacgccctccagtatttgtccttctccaggcccgacatcgcct

SEQ ID NO: 1704 - DNA, 1038 bp, Zea Mays
gcgaaaacgaacaaatacgaatgaatattcaccgaaaacggacggtagccagacagtagtcggaacaactacatgcacacatcagtgacaacacacaagcgccagaacaaaaaaaacagcgcactacacagtacgcccacgaccaacgcgaggttagcagtagtccagcgtctaggccagcagcttcacttattagggtccctagctccatgaggcacatgcacactacagagtcacacaggaaacagagctacaatgtctcaaggcctcaagcacagatgcagtcgtccagccgagcagaggcagagctgctgcacacacacaggttgtatattcgtgcacttgaaactccctatgggaaacgacagtgaccaatgggccaagaattcatgggctttgatacatgcacacgatccgcaaaatgtaaaacggaataaaacaagaaattcctgatacaatacgggataccgtaaatacgggcgggaaacaccttcaaccgtttccggtcccgttcccggatatacctatctcggttcccgtaccgttttcacattttccagataaaacgaaaacggacggttttaaacgggaatacgggacgggacggtataattcctgtttgttttcatccctagtcccacgtccagaagattctggaaattttgcgccctgcctccgtgactctccacctccccactgacgctctcgctgtgctccgcctctcttccatgcatgcagcatgcttccctcgccttgtggccttgctgctcgtcgtggccccgcctccattgccttttcccctcgcctcctcctcgctcgacgaccgcgaccttgttgctcgacgtaagcccgcacctcggcccggcctccatcaactccctccccttcgcttcttgtctcctcctcgacacctgggaaggcgaacaaccgccatggtcccacaccttggccttgccttcatcccggaccccccccccttcgcccctcgcctcctcgatgcctagaaagacgaacggtctctagagaagtatgtatttg

SEQ ID NO: 1705 - DNA, 1047 bp, Zea Mays
ttcttccccagccgtgctcatcttctaagcgcacaaccactcctcctccctccctggcgtcttccaccctgcttcttgctcaaccgcacccctctctggcaagctccggtgccacggcttctctcccacggcgccctgctctgctcgcacatccttccctccctgctcggatttcttccatggtcggcttccagccctcttcttccagctcgaccgcctcttcctggccgcgttcctgctcggctcccggctccctgtgctgcgcccctgcgcgtgtgtcctcgccacgccgagcgccgtgaagtccctgcgcgcaagctgtttgttggcagcgtgcgaagccctctgctcgccgcgccctagatctcctagccaccgtgcctgcctcctctctcccttctcggcctctgttccgagctcggccctgcccatcttcctgtgatgtctccagtcttctctccctggacgcgcgcgctccgtcttccctgtcgcgcttgcttcaatcgcgccgcgcctggtcggagctccttcctctccctcctatggcgcgctccctgctcctcctggctggttgtgcgccctctccagcatcgcgcccctctctgctcactcgtgcccagctcatctccatggccaccgctcgtcgctgctccctggtgctcggatctcgcccagccgagctcctcctctgtcacctacggcgcccagttgcccctactccccctgctacgctcctccccatctcccatggcacctagctcggactacgccctactcctagatctcatcgtcctagccatggccacgcttcctccctgctcggctctttggagctcgccgacacaacaacactgtatatcattttcggcggctgttgttattttcggcggccaggaggcggccgccaaaaataagtaaagaatttcggcggcaggagcagaccgccgaaaataaggttattttcggcggcttctgacacggccgccgaaaatagtcttattttcggcggccaacgtccttgccaccgaaaattaggtatttaaaaat

SEQ ID NO: 1706 - DNA, 1049 bp, Zea Mays
cttttattcatctacccccctagccgccactcccttttccccctgccttcttctccctcacgcagcagctctgcgcgctgccctccatggcgagcagcaagccggcgcccttcttcctccctgctccacagcaacagccaccaacgcgcaggagtcccatggccgccggccttcccttgcggcgagctccttcctccaagctggacgccagccgagctccccttccggtcgccgtttctccctgcgagctctttgctcctcccatggcaaacgtcctctaggcaagcccctgctccatggccggcgcccagcagctcggctccatggctcaagcccgagctccctgcgtctccctcccttgagttctatcgcgcgcacggcagcaaccacaagcagattttcctccctacctcccatggccgacctccactttccctgtccgtagctgctgttccctgcgccctattttttctctcccatgcaaagcagcagcagcaatgtcgcccagctctaggcccctgctcctcctctcttccccacaaaacagcagccgcagcgagctcgccgtcgtccatggcgccccctgcaatcttcccccttggctgttcgatggaatgcccgtgggaaatttgtgttgtgcgcagcagccccgacatctccgcgctctgtcggctcgctgttttgtgaagcccagtggacagcacgcagccgacgctcaccgtggtttgctgtttttgcgcagcccctttgtcgtcgtcgttcacccccggtgagaccacaacgatttttatgttcgattccgcatcgggttattttcctatgattaattgtgtatgtgctgtttggtttttgttttgtggaggagaggaaccctgcgttttgcgagaagaaggccaatcattcaacgctcgtcgatgttcgtagcgatgcacaaaccggaatcaccgtcgttcttgcaaacgccgattgggtttgtttatggtgagccgatggatgtcgctctcgattgatttgattaataaattatatagatgtggttgaaatatttt

SEQ ID NO: 1707 - DNA, 1059 bp, Zea Mays
ctttgctgcataacaacagtagcgccgccattactgccgtgagagagcgatagtgggccttcgccgagactatgagccacacggaacaagttggtcaggggtctgcaccaagctagtgcgaaaccaaccgcggtagttgctggcggaatcgatggctggccaacccttaattgctcgtcggagccacaaaaccaccacggatccgcctggcaccgcggccaacctcaacagagcgccaatccttgactgcgcacagatttctgggaagtgcagggggcaaaaccgaaggtttcccaagacacagaccactggcgcttggagtgcgggtttattcctaagaaacccagggactccttagtaagattgccgggccgaatgggtacggttgattttcggccatccagatcagatccagaggccaggaatggatcacagccccggcaaatagacaagcgagcgtgaccgcttgatcaacgatcgacgggctcgatctaatctaccccgattgaatccaatgcacccgctcccaatcgggcggctcccaatatggcgcaacagcccttgccggattccacggcggagacgaggaacaaggccatccgataggtggacccacattgttcagtgggcactcgcatggtgaacggtgacaggtgggaccacggaactggtgagatagctgcgactgacgcgtggttgggcgactagttggtggcccccagtttacaaagggtggacgatgtacgagttggcgtggtgtgactgccccgtgggcccgaggtgtcaacgctgatctcctggtgatgggctcgcgcagtgtaattctttgttgggctgagaaaccagggttgggcccatgcggggttttctttttttctttccctttttcttttctcttctattttcttttatcttttctttctttccaaatttcgaacttcaatttcaatttaaactttgtggcacatttgtactcagactaaatgtttcatttgatcatactaaattgtgatgaagttattcatttttacatttattttctattgtatgatatttccc

SEQ ID NO: 1708 - DNA, 1072 bp, Zea Mays
cacttctctctacccttccgtcaagttgatgtggcggcgtattggatatggcagtgcatcgactactcttcgactccatgtctttctctctacctagtcttgtgcctaacaacttcttaggaatcaacattgtatgtccaaaaaaaacatttggagcaaagcaagggatcaaagttgccaaatcgatcactgctgtcatgcatgcacgctagatatataaacggttaacatgtctgtgggattcgaatcagagagaaacttgtggaactggaatcagataagcgataagtattcgaaactgaatcactttacacgtatgtactgtgtggaaacttgctctgttagtaactacacgctatatatatatgagatcacatttttggctctgtgtgtacgtggagtactgtttcgttctattagcttaactttccagcatttcgttttgtatcatgtacaggtgtatatggtctgttagtaactgcatatgcgtttctgttgtgtacgtagaaattaaaaaaagaggcttcagctatatacaataatttcagaatctcatccatgcttttagaatataccatgtaataataataagtacaaattttatcactgtgtacaggtgtattgtatggttttggcaactgatcgattgcgtttccatcgagcaaataaaaaaggaaccttaatatattacttgtggaattggagaatagaattggaaaccgaaacttgcggcgtggaggatgacaggatgtggcgtggtttggcggccggctacgaaccaggcacgcccttaaacctgaaaacatagaaaagaagaaggagcacctggagtataacgttatcgtatgtcgttatattaacctattgccaggtttgcaagggtttttgtccttattcagtctgatcaccgcatttgtggatcacacgttggatctagagtcagtatctcaatccggctctttgctgagtgccagtgccaggtgatttgccgagtgtgttttcggacaccctaccgagtgtaaaaaaacattcggcaacacttctttgtcgagtgtttttttttcaacccttg

SEQ ID NO: 1709 - DNA, 1072 bp, Zea Mays
cttcgtgggcaaaaaggtcataattcggtctagcacaaccaataaggaaaagggccaagatgtcatcatcgacaacgcacgggaggccaatgaagagtatgttgttgagcaaagctttgaaaatgcagcaagatttggaagacaagaaacacgaagttataattgaaaatttagaaagcaaaataaaggaacaatcagctgctattgaaaagaagaacttcgagcttcaagcaactgaaggcttattggcggaagccgaagctaaaataacagaactgaacacgaagcttctctgccaatctgggcagtttgaacaagaaaagcaagaacttaatgcaaaacttgaagccgaagttcaacaaaattcagatttgaaaaaactattggcgggccttcaagaaaaatgtttggaatttagcaacaaatgtattcaacgactgagaaaaattttccactcagttggagtgggcagtgagaaattcaccccgtcagctgaagatttaccaaagaccttcgaacatattgagggtgaaattgatgagcttgacgaagttatagccgggcacggtgacttctgcgcctgggtagcttctcggggcactgctgcagctttcctaaaagctggctgtgatcatggaaagattgtcaataggcccaatttcactttatcaccatcaattctagatgacattcctgatctcgcccgaagcatttccaatagattcgtaaagatgaaatggacaaaaggcgggcgagaaaaggctggagacgaagctcggagtcatcttgaaccagtaagaaatcataccttgtgcttacctcttccttcaagctcgattttgactaacaacaactaaattcatgtaggatgacgaagccgaagccgatggttaaaaagaataacgccgaagctgaagtcccttgaagattaaataggagtagactgtagacagactcaaggaacttttgagataacttttgtaaatgtaactgaacttgtctttaatgaattttgttcataccttgtaatatgctcttatccttccattaatgtatgagaggtgctttgatg

SEQ ID NO: 1710 - DNA, 1073 bp, Zea Mays
tacctgttaatgatgcctcaaagtaagctagtaactttttaaactttagcgaattgagctatgtcatcagatataacttttgcggtctacacaagcagcaacatttaattattttttattacaattgactgtgaggattgcaaatatcttgaataattagcaaaattaaatatttaaaacattggtgtaatttttagaagaatggaagaagggtttcaagtccctagttattcttgttgtctaggaactatggaagcataggaatgctgctatttttgaaggaatacatctgaatgaccaggttgttcttcaaacggtataagaggatttgtggtggttggcctgtgcttctgtccgtcaggagcttatcttgaggtcgattgccccaaacccttagtgtcctagtatcgcaatatggcaagcaggtcatgttcaggctgttactttttctgcaaatttctttctaattgtggctcagtgtgagtggggtgtgttgggaatgtttgttctttcccctctcatctgtatgactttttttcttaatggaatgacacaactctcgtgtgttgtccaaaaaagaaattaaagaatcacatacatatattagaaaaaatcgtaattgatacaattgaaaaaattagtgtctgtggtgtttatttattgtaatttatgcttacctcttggaggaattcagctacattttttctgcttggagatctgaagccaatggtattgaagaaaccagtagcgttttgccgaggaccatgataaacaatttgaccctcagatagaaggattatgtcatcaaataattctaatgtctcctgagctggttgcagcaatgaaacaaccattgtaagatccatcagatgggccatctgttgaagaaatgtcataatttcaagtgtggtagaactgtcaaggcctgttgatacatcatccataaagaaacatcttgcacggccaactagcatctctcctgatttttacagccatggtggtaaaaagtaactgataagtgataagattacagtatgttaaaaataaaataatgaggctacatgaatgattaa

SEQ ID NO: 1711 - DNA, 1076 bp, Zea Mays
ctcgctcctgctgctcccaactctctcgccgcgtcactctctctctcccgctggacttcgctccttggccgtctcgacgaagccaggtctggccatcaccttcctggccgcgcgcgttcttcttctactcggagcaccgtcgactgtctcggttctgcatcaccgggacaccttcctctgcttcctccctcgccggccgaactccttcgcccgctgccatagtgccctgcccctgcgatggccgtgcgtatccttctgttccacatcgctgcgccatccttcacctcgcccggttgtgctttgttgcgccgtcgggtgctcctggtcctgcgccgtcaacctgccatgcgagctagctccacctcgcctgctcgtgtttctctctgtcgtgcgctattgctgcgtcgggcatccatggccgcaggcgataacctgctcggcctaattgtcgcctcttctgccctcgccgccctaaaccaccatccatctcgcgcatggcacaaagctgctctgctaccgcgccttccgtaattaacggtcgtcgttctcctcatctagtgctcgcgtggccttgcccggaccgcgctgctgactgtcgaccccgccgttgcttcaaagcgctcggacaccgacgtcgtcactcggcaacgtgtttgctcgtcaccacgttatcttcagcaacatggctctgctggactctgtgcactcgtcgacacccggttgtcgatctccgccacgtcgtgcccccgctctttggcctcgtcgtcacccttttcttttgtgtcgcaggcgtccacggattggcgagttgatttatgattttttctagttggttaatgaatggattagctagatggattagtcgcgatgatgttgtgattatattaagtgttgtttcgattctatttggttgtggaaatacttgaattagaacttgctattgatgctatagtttcgagtgaatttactattagtgcgcgatttcaccattcctactagtcgaggtatcaaatgaatgggataaatgtgatggtcacgatgattattccgttttaagtttaagtgacgtagttata

SEQ ID NO: 1712 - DNA, 1077 bp, Zea Mays
gcccatcaaaggtgctagctccggcggccctcctcgcgtcgccccttcgccactccccatcgcaccctcctcactcagcggtccttgtcctccgctcctcctgtcgcggaaatcggaatcccctgctcggccgtcgtcgccgtcgccgcccccgccgcctcctgtcactccaccagatccatagcggctagcgctggacgccggcgcttgcaaatcgagggtcagcgcagcgaatcagtgctagcggcgggcaggcaaatcagcgcggacaggtcgcgtattggggtcgaattggaccgacgcgtccgcgcgggcaaatcctagaggccgtgctcgtgccgtactgatacggctgcggcctgccggccgacgttgctcatttgcgcacaggacaggcgacggtctccagctcgagttcggcgccccgggcggctggcagcagcagaagagcagggcctggatgctgaaccaatggtgtcaggctttggctgctcttacgctgtcactggaaggaagcgcgtaaagttgttggcagccgagtcatcggatggtgctccgagtggcatcacatgccttccgattgtggtgatcaaacacaacacactggtgtgtttgctgcaatgcaagaatacacctgttccactggtaacaatggtgtgatttatccacaatctgggattagccattcatctggtcaaaatggggcacagggcacatacttgcaacaccaacattttgaaggctgcatgtatatgagcgggaatggacagatgtgcggaccttacctgcctgaacaactgtatgaggggctatctagtggtttcttgcctcaaagccttgctatctatgctgtttttggtgggaaaacagtcgatcctgtgcaattgatctttctgaaacaattcctttcacaatggaatgtcggtgccgtggcttccaccccaaatgtatcgacagagacagagagagtgacttcccatgctaaaatggtttttccagattctctttcaagtgaagaatcatgctggatgtttgaggatgcagaaggttgccgacaagggccacattctcttgctg

SEQ ID NO: 1713 - DNA, 1077 bp, Zea Mays
tctcaaccaactcgatccggttgttgagattcccccatgaaatctggtcgccagctcatgaaccctgcctcacgggtatatagtcctcagccacacctcctcacccattcatttagaccaccgaatagagagggccaccattgacagaaagcaagagagagaaaggagagggagccgccacgctcggtgatcgcatccaccgacgtatggtgcttggggagaggtcgcgaaggttcgccagcgtgcgaaggtcacgtgtgatcattcgcttgggcacataagtcatcggagtccagggaatcgttcaccggagcgaaggagtccgccacggaccacgattctccgtggttagagcactgaacagcacaatcgtagcctcgtaggtgagaaccccctgccttcgccatgtccttccttacatatatcacacctcagattagaatttggggatctgttgcgtggagtagccggatttcggccatccctccaccgcggaggcaggcgacgccgtcgcgctcatgctcaggcctcagggtgacgatgacgaacccgtcgccgtttgacgtgacttgtgtggccgaggttagaagccacgtacccctttgcttcgatcgactcctggccatggatcctcgatcgagcgggtgtggtggaatctggccataattaaatcgagaccatagcttttggatcttgcggccactggtgcataccggttcggtgtgaaggtgaatctaatcctagccgtgcacgagagattggatggcttagaattcctcaaaccccttcggccgcgtgcatattgcataatagaccctcaagtatttcgaaataaacccaccatcccctcaggtgtaaagataattgcatgtaggtcctaacttttatgaaacagacccaaactttcaagaaaatagtacccgcagtatatatactagtgtttgacgcgcacccaccgcgcgttatttttattttttatatatttttttgtggtcatacaaatttttatgtgtatataaagaaaatatgttatacatgaaggtacatgtataatgtaacattaatattcccttttta

SEQ ID NO: 1714 - DNA, 1079 bp, Zea Mays
taaagctttgcattgcttttagagttggtcaaagttttgttagcagttactaagtataagtagatatcaacccaaataagtaagagatcaaattaataacaacacccacaatgcaatgcatatgaaaaattaagtttagttccataaattaatcatgcgagagtcatgatctgctcatgaccgcgagcacagttgatataccagttttacaatctacagaggttgcgccctttacccacaagtcgtgtatctcgcctagccaaggttagctagacccttagacacttccgaggtgaatggctagggatccactacgaggcctttacgaagttccactagcttcagaaaacccgctacagtttctagagagcgcaatataggaatcctccgtccgaaaagccatcgcagcatgatcaaaccgagaacctccctataccgacaactcccctactacccttgcccctttcgggtaaggtagtcctccactagctttcctaattagtcagccaagggcgtccaattccacccttgtggtagcacagatatctcaagttaagctccatgttccaattaacacaatgatcttgtcatgaacaataattaaaacaatagtataactggaacatgatcataatgtaatattaatcccaaaaccaggtagagcaatagcaaaactacccaaaggttcagtggtaaacaaggtgtgggataaacaagtctagaaaaacctattaggtcctatcagattaacctaagcatgtcacagtgattagcaggaacattattgggtaaagaaaagtgatcaagggcacaacttgcttgaggctcgagattccaggtactaggatgatcttcagattctcatgacctcgatgctaatcgtagcaatacaaacaaatatggtgtaggcaaaattaacatcacaccaaacataaaaacaaactgtgtaataatgttctacgtgtcgtaactagatcgcaggttcgagaaccactaaatttggagttacggttataaagttatgattttccaaaaatttaatagttgggtacaaaagaaattacgtacataattttaat

SEQ ID NO: 1715 - DNA, 1079 bp, Zea Mays
gcggcgtcttccgccggcagctcgtctccgctagtccactccatcgccattgttggtccccaccgctgcagcccatacgacgccgtcgtgccggccctacgactgctggtgccctacgacgccaccatcccctactccgccgccgccccctacgcccgtccatagccatgttcttcgatgaggctgagtaccacacaacccctacgaggtcaccctccaatcgcatgaacaggggtctcttctcagatgaagtggcgttaagtgttcatagggagcagtttatcccttctccgtgatctggtagagtggatgggttggacctcaactccagtggcgtggagttccagaaaattgcatttcatgaacttcgtcagtcccagtcagctgccaactactccgctactccggttcgtgatggtcataggggttgcagtcattctcgatcaattggtattggtcgtggtgttacgggcagaggatcccgagttccacggacgactagtgagggtcctagaggtggtcgtggagcatgaagcatcttctctcgtggacgtggtatgcctcgacctattggtgcttccttctctggtggccgtggtgccaccagtggtcgtggtgccaatatttcagcgccaaatgccgctcacagtcaagaggacaatgacgacgatcgctttgcacaggtaactcatttttctgacttggtcactccaatatggaagagcaaactgcgtcatagatgcaggcactactgtaatttttagcccaaagttttgaactgttttgtttgaaatatgtacataatctgtaatgtttgtgaactgtttgaatggagaggagagctggagagggcacggagaaatggaccgagacatggaccgtttttcttcagcacggcagcccccagccagtttttcatttgtgaatcctgtcgttggttgtttcttcttttgtacgctacacttaaattatcctagagagtgctttaacatgtttagaatgagtaagcatatatttgaaaagtcttcatgatgtgcttgcatcaatatatggattgcagtcaacatgtcagatgcgtt

SEQ ID NO: 1716 - DNA, 1079 bp, Zea Mays
ttcgtggcgtctaatatagtaccttttagaaagaaagaataaaacttatatgtgacttgtgtcttccggtagaaataaattaattagtaattaaaccaaatccatagaggttgatttaagctacatctatgttatgaacttatatagtatttgtttccacagttaacttgccatataatcgtttctagggaaatagtgaagtaaaatcaataatattttatgccatatgcgaatagagtaactaccacaatattttggtttatattattataagttacgaaccaagctatatgattggatgttctctttctttttttataatgttgaattgtataatgtatgttttattgtttgattggtgtatgtttatttattggtgtataatttcttttgtacgtacgatatgtgaatctataatagaagctgattttgtggtagaagatcagaatacgttcgaggacgatccacaggacacgtttgagtaagatggtgcgcactctccaaacgacccgcgtgaacaccaacggtatccctccacccaggcaggctcctttctaccagttgtggtggaagaagtcccggtggagcaccaccttcatgtggggaatggagtgatcttggaggacagctctgaggagattttggcaacacacactccattgtcagagtctcatgcctttgctgctggagcttcatcttcagtaccgccagtgccagcacctcaagccccgactcctataggcgatgatccggatgattctggtgatggtggagacgatgatgatgagacaaatgagagcacctagaggggggtgaataggtgatcttgtaaaaaacaacttaacaaaacaaacttggactagtattagattagtgaaagctaaggccaagtttgagagaggagtatgagcagagaaaacttcttcacttaattgctcttcacaagatgagtattaaacttagagcaattatgaagtgaatagaagtagagagaatcgcacaacaataaagacaagtgacacaacgattttatgacgtggttcgatcaagtagaatacttgtgtcacacccggttttag

SEQ ID NO: 1717 - DNA, 1080 bp, Zea Mays
ctttaatccaaagcgaacatgcttatatagccacgcgcctcatagcatttacatttcttggtttccatccatacatgcatgagatgagagcaaagctctctacatatacatcttcagtctctctctctatagatagatagacgatgagactgcaccttgaaccttttgacgacgacggagcacctgttcaacgtggctatagatctagctagagggtgcgcgccaaagtcaagcccgccaactgactggcaagttttttttgctgccggatcggtacaacaggacgcgtagcgtaaaggcgccggccggagcagctaagctactacgcgggcacggcagcgccacacacatgcatgttgtacgagcaccggatgagagatggaagatactccgtccggagcagccgttctcgctggtctgacgcaaggcaacagctccatcaggcagcaggcagggctatctctcctcctatagccgtccatgctcttgttctttccgagaaatagaaagagcgagcggctacggcaaacggcatgcgtgctgttcacccacccaaatgtacccctgcctgcctcgtgtgtatagcctctctctctagctagctgtccgccgtctctcggccacgttacgtacgccatgcatggcgatgacaggtgagagagagcgagagagggtggccagggtgagtgcgccacaccgttggccagtgcggggcgccggggcccgggtctatcttcgttgctaggtcatggccatttggcgcacttgtcgtcggccgtacgacggggcagttatccatcaaggggcgcctggctttttgcgatgcatccgagttgctgctgcttctgcacccccaccacgcacccccgccctcggtccagatgcagcgtacagtagtacgcaacacgcgctggatgtcggggcagtcaggcgcgagagcaccggcaccagcgactggccctctggcccgcgcgcccctcggctccggccgcacgacagcatgtcctgttcacgccgtggcgcccaccggacaccgccggtcgagctcatctctccccggcccttccccgtccccggcgg

SEQ ID NO: 1718 - DNA, 1084 bp, Zea Mays
cggacttaaaaacacattgcacaatatgattagctacagtcttgccatatgtagggctacatggagagcagccacagagaatctgaggtccattgtgaggggtggcttctacttttcaggctttgacgcatgcggccaggagaccgtgaaggcatgcaccataccataatggggcccacgacaatttcctagccataatctaatcacttacatgggtgtgcatgtgaggtggggtccacccatagtttctcctatctaaacgacacagatggttttctctccaatgcagatggtaggcaagcggccggatacacaggccgggcggctcgccggttgggtgtggagccgggcttgccacacagactgttgcatgcgctcgagaggggctcgaccaccgcggcgcgtttgcaggggtggagctaggcgtcgggcgccaccatggctgtgtaggcgagcagctgatcgtacgcacgggatgggtgcaagagcttcgtacctggatgacagctgtaatcacgtcctctctctttccgacgaacacggcgatacgaacggaagctggaacttggtgtttgcatggaaaggctatggcagctactggacaggaggggcctcggttcctatttgtagcctagagacggtgggctagcgtccggctgctgtgctatggaggccgatggtgaatgcacggatcggcaggactcctcgtggccgcactcttcggcgctggtgagagcaggagcacaggttcgtcttccacctcgggtgttgagcgacgttgctgccggtcgcatcctcggcgccgccagtggaggccgaggtggccaacgagaacagtttggaaggagaggtgcctgcgatttggttttatagcccctagcgaagcctggcatcgggttgtttgttggcgtgcccaacggcaacagactccgcgtttctcgcccaggtagctgtgatgtggtttggggatgaagatgactgggtgtattgatcgataagaggggtccgcatgccatagacacaacgtaaaagagagaaaagaaaaaaaaagttgggctagaaagcatatgggctgtacgtgccg

SEQ ID NO: 1719 - DNA, 1086 bp, Zea Mays
ctgtttgcgatgccaattgtacagatcaagacgcgtattggactaagtttgccgatgtcatttgtatagattcatgaggcgtgttgacgccgctggctgggctggaccacatccatgcacacaaccatgcgagtagtctggtgacggccctcattgcaccctcccattcatttctctgcagcagcgacgttcatgcatggtgatcaaggaagaggtttcttctttcctgattttcctcttacacaaaactatttgttcaatgtattttcctataggatctgtgtaccttctttaggctttcaggtagtaagaattattgggtcggcatttttaggcttcgttaccaggtgacccctcttccttctgctttcctttttgtgttcgatggttttgatttttttttcccctgtgaccccggccccttccatttcattgtccctgtaagatcctatagctctgattaccatcaactaactgaaccaacctttatagagatgacatcatgaatatcttactcttagtatgctatcctggaccgaatccattgttattgatggtgccatttgtcttgggcaacccaaacttcctaccaacgatacagatatgaagtgttgtgactgacctgggcagaaaccttcgtgaatttgctttttagtggttaccattttatattcactaatttattccataataagaaaatatgtagttctaatcttttcctttttgtgtttgcagcaagccagcaattacagctcgagcacttaggttctttacaatttaaaaatgttattccgccacaggtttacatgtaccctttgcgaattctgtgtttcggattgatatacctttccaacagtttgcagatttctcttactatccccaaagaacacatatcatggtgttcccatggattacccttttttggcagctaaagcaaatgtgtgttataatataagattgctatatctttctacaacatggtgtttcacatcgtccaaatgcatatgatcgcccctatggaggcttcacccagacaaatttttactcctgttgcaatgcatggacatgaagctatcatcaatcaaa

SEQ ID NO: 1720 - DNA, 1090 bp, Zea Mays
ctagctagctagtgctgatccctcgcgctctctcgcaattactctactaaaaaaatagccttgcaagggactcaagcaatcatcacgcgcgcgcgccacccaccccggccgtccgtccgatatactatcaaacaaaggaagcaaagctactgtacgtagtccagaagcaacgtaaccaatgcaaatgcgaacgcgcgcgagcaaccatggcggccgcaccactatagcactggtgttcttcttcctccagtcctcggccccccatgcggcatctctctctccctaccggctgccgccgtacgtgtcctgtccactcatgacgtgctccacctccactccacgatgcgcggcggcttcacacattcgccccgcaggacgacagggacgcgacgcagcaagtgggcgcgggccgcccacttggttggacaacggagcagcggataagcacgcgtggcggccccgcccgtcgctcggccccactggctcccagtcccaggtccggtccgtcgaggcccggccacacgcccacacgacggggagcacagggccgcggggggcgcaccgggcggcgcggtgccgccacgcgtcgcgacgggactggtcggcgcgcgtccggtggagtcgctgtcccggatcgtctgcggcggcctctcctcggcggaccgaggcgtgggtcgggttggtgactgatgagatgagcagctaatcatggagcaggaccatcgggaaaaggagaggctttccgcaaaggtggcagtggccagagcagaattatgcatgacagggatcgtctcatccatccgtccgtctccgtactggaggaggaggaggaggaggaggggaggcttcgtcgttccccgtgcaattaagaaaccacgtgatcgtttgtaaattaggcccgctagtactattcctattccggcgactttggttaaggttccgcgtttgtatacagtctacaggaagcaacaagaggggaaaaaagagagcacatggatctggatatggactgggtgactgatggaccgccgctcacctttccatctaagaaaaaggcataaaaaacatgtccatcttatcagatgcttca

SEQ ID NO: 1721 - DNA, 1091 bp, Zea Mays
cgccggccggcagctagcaattctaatcagaaatggttactgctccggtccaacaccaatagaagcacgtcgcgggcgctggatgtctgtcaagaatcaagcttcccataatcgcgatgcaggaccggacttgcggttgagccagaaaataaaaaggactgcatgccagtgccagggaagaagtgctcgttcgtccactccagaatctggagcagatgaagctgaccctacaggtgattatattattgcatgcgtgtacggacggaggtgggcattattctgacgaggggaagggaaggggaggcgggcggcggcagcggagcatggcaattaacaacaaggctggcactagaagatcacggggaaggcgagtttgacaacgggggcatcttttctggggtccccagaggcccactccccacacgatgatgcatgcacgcgttattgagagacagacagacagagagaggtgcgttaaatttgtgatggcctaggctggtgatgatgaacgacgactgatgggtacagccgggaatcaagagggatgaaagatcggaacagtacacaggacggcagcagcatcgtccatagtacgcgggggtaggcccgtggaagtttacggcacgcagctttgtgcctttgtgctatctctctctctctcttagagagacggagatagagagagtgtggggtgcagtgtacgactatggggccggccgtcgtccctgaccttggaatggaaatggtagggcaccatccaatcccacagtccaatcttcccgtcccgtgtagcatagcacagacagacgctagtagggaccacgcccatgcaccctcgcccggccggggccgggtccggcccccgttccgtccgtgtgccaaccaactagacgcgcactagcgcgctaggtcattatagcttgcaatacaaatttcctacctatctgtctatccatccacacgacatacatgtgcacatgtatccatgtttttgtgcgtgacggtgatatgctctgcttgtaacagttaataacgtcatatatactatgcacttgacctgtatgtataatatgcattaatgtgcgcgcgcg

SEQ ID NO: 1722 - DNA, 1096 bp, Zea Mays
ctgtcattgagtatgcataagttttaattatgttaatcattgaattctatgatgaagtttatttgtttggaagtattaattctcaattttctaatattgtggatgatcataatttggtaatgatatatgtggttgattcccatctggatgaagttgaagtgtctttttgaatcatgttatatgaagtgttgtaggcatgacatgcacatcgcatcatccatcttgcattttgaagttatgtcgtgatcttatagtccgaccgtaccggtacatttttagcatcgtacgttgcccgaggaggggtacgatgcggcttcatattcttagaggtatgaagacagaagtcatccttgcatttgcagacatttgcactcatgaggaatatatgaagtgtgacattactatgttactattgtggtttctacctgcgaggtgtggtaactaggtgcgttgtacgttgtatacgtgctgcaccttcgtaataagaaggttgtggaattaagtggtggtaaaacaatgttcttatgtggttaaactgtttgatattattttacttgctgagatgtgtcatctcacttttgcattactcaatgcaggtacttgatacatgttgggaatgaggggagtagcagcacgtccactttcactctcacaataacgctgcccaggcgcagccatgatttaattagaaacttattgtcaaaggaagtttgtttattttttttaaatggtcgtgcgcactggttaattcagttcaggtcgtatgtttatctttccttgctagccgagtaataatacttagtatgttttagtcatgatatatgtttatactctgttgctccctgttttatgcaatcttgcaaaggggatgctgccgaaattttatatatggacgtcggaagtgtagtacagtagcataccgggttgtttgtggaacctggagtgttacagtgccgcaggctatgagctcttttctactagtgtctaatgcacatatgaatacacataaccctggcgcgtggacttgtctagtgaaatcttattattcttttgtcaatataatctgtaactcttctgtccgattcattttaaaaaa

SEQ ID NO: 1723 - DNA, 1096 bp, Zea Mays
tccacccttcccatctgcacaaccttctcatcttcctcgtacctccgccagctgcttctcccatagtcgccacaccttgttcctctcccatctagccttatctctctcggctcctcctacgctggctatctccctcacatggcctctcttcccatggcgccttgccacgagctcccctacgagcagcttccccgggaagcacaacatctctcccagccatggcgttcgactttctgctggccgagctctagccgagccccctccatggcacccagttcgctcccttaggcgctctgcatctccggccacaacggttcctcctcgaccaccatcttcaccatcaacgaccgcgcttccctagttccaaggatgcctacaactcgtccctggccgatacccgagcatctcccctgtgtaccctcgcctagttcgcggagctgcagcggccacaccgtctcttcctccgcaacgagccctcgacatgttcgacaaaatgtcgcagcaagccccgtcgacatgtgcagtgtcgcagcgagcagcagcctcgagaccccctcctcgtcgcgtgcgccgacccgatctgcgcagccttggtcgcgatgtcgtaaaacccggtgagctctttgctgtcctcatagtcccacgctcctcgattgattaaaatgaccaaatcagtgaactgtgtaataaaatgtgtgttgtaatcacaacccctcgtcctcgcgccttgctcaccactcgttcgacgaaatgcttcattcgtgggcgacatgcacaacccaaatccgatcggatgtgacgttggagcgaagccacaagaagatgagacttatcccgaagaagatgaatgatcaagtggacgttcgtctagcggatgtcgtctaacctaacactaacctagtgttggattccaggtgaagatctaggcctgctgatgatggtggctaagtgctagtgggctcggccttctatatagttctcatccctactgtttcttgaagattatcgctaagctagcgtgtatttcaaaactatggttacatctatcttgtccaaagttatattctttgaaatcaagttttgtacttattcccat

SEQ ID NO: 1724 - DNA, 1096 bp, Zea Mays
attattttttaaaacaaaaacttgacttctcaaaaacaaggtgttcagttattttgagacaaataggggtacgttttgtagtatgcacggtactgtactgcgtcaaatctgagacaaagctgagtatcggctgcatacatgacactaactgtattcagatttgtcaaatgagaatagttcaaatatactgtaaggacctgtttgtaatgaagttttgaaatactatatatatttaaaatcgtgttttacatgtacgaattaaacacctttaactgctaataccacaatattatcaaatatcatagtattatctcaaaactgtaaaaatatcaagtttggcatggaaacacgtaggactgacctgttctttttttcactcactataaaaatatagtggtaagttggtttctctgttcctgtaatggttgttcttaggatctgtttaatttctttagtttagggactaaattttagtagtcttcactgtatttggttacatggactaaaagtattcggaacacattaaatgattcatacgaaaactaaaatgaccattaacattttcccatcattactgcaattgaaataaatgagagataaaagatggaattaatatgatttagtcccttgtagtcaccccttgagggactagggactaaaatagtctggtccctgttttagttctatagtttggctatttagggtgagactaaaatggagggattaatctttagtcactcaaaccaaacagggacttaagagcaacttcagtagttttataaaagactccctaaatcaataatttaggtagctaaactaaaaacccctctccaacagctctctaaatgaacttcctaaatttagcttcttctcatctaacctcattttcttccgacatttagcaaccatttaccaactccctacccaaaaaaccgacgatattttctgtattttggtgtctttttcactttatagtaaagatatattaacagagcctatacgtcagacgtcacctagaccgaattttttgtattttagcccctaaaccgaagtaaatttacgtttagacctaaaaaaattttaaatgcagttttgg

SEQ ID NO: 1725 - DNA, 1103 bp, Zea Mays
cgccgcccgagcgtctacggtggacggaggagctgcaccggcagttcgtcgaggccatggtgagttgctgcttttctgtccctcgtcctcgccttctccccggccaccagatctctttctagcacagccgcctacctgcgtctttctgcggttaccatctacctgcgtctttctgggtcagtctgggcagcacagcacaagaatggccgcttacctgcgtgcgttaccagcggtgcagtggtgtggactgtggagtggaggagtaactgatttgtccagcaaacgccacctgccagaattcacatccaagcacaagaaacctacacaacattctgaaaattcacaatagagtacatgctgtgtggatttagtacacgtgcgtgcttggaaatggatgagtacacgataaaaaaatagtacagacattgattatcttccagagaagacctagctactctcggcagagaggatttatctgttgattattttcttgttaaaaggcaccagctagtgcatgattgcgtcctattcatggacacacacatatatatagctagacaagacagtgcaaaccactcgctcgctcgatcgctaactaatatcatcattatatttgttcatcacgcggccgttaaatctaacacacgattattgtaactttatcgtgtactaaatccgcacagcattctgaaaattcagattattgtaactttgcttgtagtttttcagattattgagtttctccacgtttctttttttcaaacaattgtgcattacaagtggctttggttgggattggaacaagaacaagatatccgtctgttagctgatatatcagacttgtgtctcctgccatataggcgcaggataccctaccatacatgtgcaggcatccttgcctttctagctacagccacatataggaagctacagccgcatataggaagatatggattcaatcctcccatttaggggcagagatagtttccttccattccaggagatctcagggtactgtttctataaacctgagatctcctacctctctgtccctctataaatatgtgcgcatgtactcctctcttcatcaatcaatatagaca

SEQ ID NO: 1726 - DNA, 1104 bp, Zea Mays
tttctcaccgtcgtgggaaatcatcgtcgtgctgcacttcttcaacgctggcccctgctctgtccgaaatcccggtaagaccttcccatggagttcgccttcatccgctcatcgcataactgccgtagattcgtgtgtccgtgcacctgggcgacgagcgccttcactccggcaaagggctaccgcggggaaaggccggcgctgccatcttgtgggctggaggtggaagatggcgtgccagccgttggatccgcgatggatgtctgcgattagatcagcccatattggttcaaggttgaatccggaccgtagatcggacgatgtacggataggagtagatctcgggtatttaaaatctggaccgtagatccgtgatctgagggtggcgcgttgatctcggttatgttgaacgcggtccgttgatcgcagatcgtaaggccggcatagcataccgcttcgctgtaatggaggatctaatcgcgaccgtagaactccgatccaacagccagcgtctgtccataccccttcgcgagcacatttgcataagagccctcggggttcttcaaaatcaacccgacgtccagtgcggggaaaaatgagtcttaagaaattttatgagttagaccccaggttctctgttattgtgtgcgcagcccagaactcagaaaaataggaggaattaatttagaaaatgatttttaatgagaaaataaatgctagaaacttgtataatttatagaaaattcatattaagtccaaattgatccattccagttcctataattttgtaaaattattgtttaacattttgtgtctctgttttgacatgaaaaccatattaattttaatctcctaactaatcttgtacctagcacatagaactttttgaaaattcataacttaaaatctataactccaaaattaatgattcttgttcctacgatctaattacgcagcgtataatattattacacagttcattcttatgtttggtgtgatgttaattttgcctataccatgcttgtttgtattgctacgactagctcgaggttacgagtcatctgaagatcatcctggtacctggaatctcaagtcacaggcaag

SEQ ID NO: 1727 - DNA, 1108 bp, Zea Mays
ggtagagtgtaatatcccaaaaaaatgttgacccaaaagttgatcttcggtgagtggatgtgggaaaaagggttgtgggccgttggatactgtatcagaagtcatctgaggcgtcacttcttttctcccacaaaataaaccctaggtggccaccccgttccccttcttggccgccacccctcccatttcttggccgcctcacttttcccccttggctggccgccccctctccccccattgcagcagccctccaatacttcttcctccctaaatctcccccccacgcaacaaggatcgagaagaggaggaacaagatggattgaagaggaagagaggatcaaggagatgtgctacccccatctcttgcagatttttcttagggaaaaccctaggtggctacactccagatcatgtctagtatatttcttcttcttcttcgatgaaggcaagtgaatgtagcggtggttgcttccgttctgacctgttatttctattgcctacactctaatattcagaagtattggattctttcataattggactctatggtgatgctttacttgcttgcattatactgatgctcaatcatatattgatgatgattatgattcgagtatgattcatgagattaattcacacccctgaaggtaaatgaagtattatttgaggttggtattgtatctgaaggtaaataaagtattatttgaggtttatattgtatctgaaggaagtgaagtttattgataaatgcagcatgccatatacattgcatgactcatttgcatctgaagttttgtcgtgacctatggtccgaccgtaccggtacaatttagcatcatacgttgcccgaggaggggtacgatgtggcttcatacccttagaggtatgaaggcagaggacatatgcattgcattcatatgcattcattgaagtgatatttgcagatgatgtggttttataccctcagacgtatgaagatagagtacctacacattgcattcctatgcatacattgaagtgatatttgcaggtattgttgacgcagggaagtgttatagaacctattgtggttgttcgaggaaatgagatggtattggttatagtggga

SEQ ID NO: 1728 - DNA, 1111 bp, Zea Mays
ggacaaaactgatatttcagttgagttgtgctgagccaacaaggtattggtgcatggttgccatgtgtgtttgagctcacatcgtgctggcaccctgagaattcttcatcgcaatgagataaacaagtcaagtgaacctgccctagccctatccttttatttcagtgctgttctagtgatccagctctagttgttcctctggtgtctctgtggtctgtgttgcaagccaaagctcttctccccagccaccaagttagctctctccaattcatcaagtgccactccattatctggtgaccaaagcagccatccttccacctcaccgtggccaaggatcttcgagaggtgtttcggccatgttgtgcctgttctctactcctcacaggttgtctccattgcaacaagtgcttaggagaagatgaagacaacattgaggactttcaggagtttcaggacttcgacgagttttagaatagattagtgacaaattcccagtcagctgcctgtaaaggccttatcgtactgtgtttcgtttagcactttgattatgacttaataactttgtggatgtttcagacatcatgatgtaataaagtacttatttcctctattattttgagcaatgtgtgtgttgggggccttcatcttccgaatgtcctaaaaaacacggctaaccatttgttatcatcatgttgtcaagcattacaggagcttcggaactagaatagcttcgatacggaacaatggaagagcaacgaaggtagcttcgtcataataacgcaagaagatgatgcaaggagaatgtgtcatcttaaacactgagagcaaaagatagtattgtccttgtattatttgtaaacccagtgtgtaatctctaagggcataaatataataccgtacgaagttgtacgactccctataaatagacgaacagtgccctgcataaagtacctttttggaggcccgaaaaattgttgtgtgtaatcttctctttgcctcaccttcgctctaaaccatttttctagagacgaatgtatgtttataaacttaatatatgaaggaggagaaatatcctattgatatgtaagatgaatcatcatgcttaaacgca

SEQ ID NO: 1729 - DNA, 1111 bp, Zea Mays
atccacccttcccatctgcacaaccttctcatcttcctcgtacctccgccagctgcttctcccatagtcgccacaccttgttcctctcccatctagccttatctctctcggctcctcctacgctggctatctccctcacatggcctctcttcccatggcgccttgccacgagctcccctacgagcagcttccccgggaagcacaacatctctcccagccatggcgttcgactttctgctggccgagctctagccgagccccctccatggcacccagttcgctcccttaggcgctctgcatctccggccacaacggttcctcctcgaccaccatcttcaccatcaacgaccgcgcttccctagttccaaggatgcctacaactcgtccctggccgatacccgagcatctcccctgtgtaccctcgcctagttcgcggagctgcagcggccacaccgtctcttcctccgcaacgagccctcgacatgttcgacaaaatgtcgcagcaagccccgtcgacatgtgcagtgtcgcagcgagcagcagcctcgagaccccctcctcgtcgcgtgcgccgacccgatctgcgcagccttggtcgcgatgtcgtaaaacccggtgagctctttgctgtcctcatagtcccacgctcctcgattgattaaaatgaccaaatcagtgaactgtgtaataaaatgtgtgttgtaatcacaacccctcgtcctcgcgccttgctcaccactcgttcgacgaaatgcttcattcgtgggcgacatgcacaacccaaatccgatcgacatacgcatgaaggatgtgacgttggagcgaagccacaagaagatgagacttatcccgaagaagatgaatgatcaagtggacgttcgtctagcggatgtcgtctaacctaacactaacctagtgttggattccaggtgaagatctaggcctgctgatgatggtggctaagtgctagtgggctcggccttctatatagttctcatccctactgtttcttgaagattatcgctaagctagcgtgtatttcaaaactatggttacatctatcttgtccaaagttatattctttgaaatcaagttttgtacttattcccat

SEQ ID NO: 1730 - DNA, 1113 bp, Zea Mays
tgttgatgctctatcatatattgatgattattatggttcaagtatgacccatgagattaattcatacccctgaaggcagatgaagtcttatttgaggtttgcattgtatctaaaggcatacgaagtattatttgaggattgcattgtatctgaaggcagataaagtattatttgaggtttgtattgtatctaaaggaagtgaaatttattgataaatgcagcatgccatatacattgcatgactcatttgcatctgaagttttgtcgtgacctatggtccgaccgtaccggtacaacttagcatcgtacgttgcccgagaaggggtacgatgcagcttcatacccttagaggtatgaaggcagaggacatatgcattgcattcatatgcatacattgaagtgatatttgcagatgatgtggttttataccctcagaggtatgaagataggtgacctacacattgcattcctatgcatacattgaagtgatatttgcaggtattgttgatgcagggaagtgttatacaacatattgtggttgttcgaggaaatgagatggtattggttatattgtgactactgagttctatatctacaagtatttctgatcttgattgtgattcttttaaaatgttgattaattcaatgtggtttaaatatctcgtcaaaacaattagcttgctgagatgtttcatcttactcttgcattactcaatgcaggtgcttgttgctcatcaaggggagtgggaagtagcagcacatacaccttcactctcataataacgctgcccaggcgcagttatgatttaattagaaacttcttgtcaaaggatgtttgtttttaactagtcgtgcgcactcgttaattccgttcatgtcgttatggtcgtcttcccattgctagcagattattaatgtctattatgttttcttatcatgatatctatttacactttgttgcttccccgtttatgcaattttcaaaggagacactgtcgaaattttatatatgaatgttagatgtgtagtttagtagcattctggggtgtttgtggatcccggggtgttacaaggaggagctcaacaacttcaagcgcaatgaagtttggacac

SEQ ID NO: 1731 - DNA, 1117 bp, Zea Mays
gtcgcgtgggttagttgggccgcaattggagtttcggcccattaaccctcccaaaccctagccgcctccctcctaaccccctccccccatgtgcagccgcccccccacttctcttcccccttggccgccgcccccctgcccatctcctcctctctcaattcttgcagccaccaaaccctagccccccctctcaatcccctcctccgaaggtgccaatccttgccgctcggatcatcgtcgtcgtggtgcgagtcttcaatcgttttggtggagggaagaagggaggaaggaaagggggagaatccaaggtgatttttgtgttcatcccttgttcatttgcgctgcaatttaattgattagaggttgcgtttgcgattggggtagaggggggctgtccagaattttaggtggtgggtgaacaacagtagtctagcagtttctgtgtttttttcgtgaggaattaagggaaatcagtatgaggatcatgtagaactttaccttacctttccaacgagtatttatgcgctcaatttggagttataaattgaaagttatcaccgtttgaatccgggtatgtggctgtccaaaaaaacagatttttcaggaggatgaacagcagcagtattagcagtttctggggatttttcgggagtaattagtgttaatcagtatgagaatcatgtagggctttatgttatctttccaacaagtacttatgcgctcgattcggagttataattcaggagatatcgttgtttgaatccggttatgttgctgtccaaaaaaacagatttttcaggtgggtgaacagcagtggtattagcagtttctgggaatttttcgtgggtaattagtgttaaccagtatggtaatcatgtagggatttgtcttatctttccaatgagtacttatgcgcttgatttgcaattatattttaaaagatatcgctgtttgaatctgggtatgtcgctgtccaaaagacaaagaaaaacagattacagggttcatcttgtggactgttttgggctaattagatattggaatttaattataaattgtatacaaaacttgtggggaattttatgtagatgcctctggagtttttgtttgttaccac

SEQ ID NO: 1732 - DNA, 1133 bp, Zea Mays
atttaagaagcaatccaagctttacaacctaggtattggaaatgaggtttaacacgtttcttttctcttgttgtcgcctaggttcatggaccattggagatacaaggaggaggagcaggattcatcttcctttctctgcaaatatatataatcagttcttcaatgtacaccattaatcagagcttcagttcttcaacgaactgaagcgtacgcacgggaaggacaaaggcagagcatcgccgttcaacggaatgcacggtgctgcacgccgcccgttgcatggaataatggaatatttcgatccgtgccagaattaataggcaggcaggaataatatcacgagcagctagcgctgcctgcctgtacatgaggagagcgaggagtacatgcaatgctagcaaggtgcagcacaatcgccgccgcgggcgcgcatcattaccgccgtggtacgcgcgcaccgccgcacggcgcatatggaatcacagagcactctccctagaggctagagccggccgtccagcagcgccggtatagatcggccatcatgctaccactacgtacgtgaacaaccgcctagtagggggagagaaaaaggtcccggacccggagacgacgacgcgactgcacaagcgcctagctagctagctattacacgtgatcgctcgttttggcccggtgcttccggccatggccatcaatcatccatgtatgtccgcaccgggctggcagaaggtcgtagtggtagctgctatcgatacgcagcgatggcaggcatgattgcgctgcgcccgaccgtcgacgatccgcggccctcatgatttggaggcccggaataatttgacggcaccccggccggccccctgccgtgactggacctgggaaattgtgcggtgctactgtgctagcaggcagcggcaggatccattggccgtcgcttccctttcccttcctgtctccggccggggctcaggcccccctttccctctcctagcctcctccgatctaccgtcgtcgcgctcgcttgccccgttgctgctgctgctgcatgccgcctgccacgacgaaaggggacgagaacctcgggccgtcgggcgtcatcgctcgcctgattcgctcggtgaccaaacccggcg

SEQ ID NO: 1733 - DNA, 1133 bp, Zea Mays
ccaacaccccggaatgctactaaacaacacttctgacatctatatataaaattttggcagcatcccccttgcaaaattgcataaatgagggagcaacagtgtataaacatatatcatgacaaaaacatactaaatattattaatcggctagcaaagagaagttaaacatacgacatgaagtgaattaactagtgcgcacgactagttaaaaaaataaacttcctttgacaataagtttctaattaaatcatggctgtgtctgggcagcgttattgtgagagtgaaagtggacgtgctgctactcccctcattcccaacatgaatcaagtacctgcattgagtaatgcaagagtgagatgacacatctcagcaagtaaaataatatcaaactgtttaaccacataagaacattgttttaccaccacttgattccacaaccttcttattacgaaggtgcagcacgtatacaacgtacaacacacctagtcaccacacctcgcaggtagaaaccacaatagtaacatagtaatgtcacacttcatatatacctcatgagtgcaaatgtctgcaaatgcaaggatgacttctgccttcatacctctaaggatatgaagccgcatcgtacccctcctcgggcaacgtacgatgctaaaaatgtaccggtacggtcggaccataagatcacgacataacttcaaaatgcaagatggatgatgcgatgagcatgtcatgcctacaacacttcatataacgtgattcaaaaaaatacttcaacttcatccaagatgggaatcaaccacatatatcattaccaaattatgatcatccacaatattagacaattgagaattaatacttccaaacaaataaacttcatcatagaattcaatgattaacataattaaaacttatgcatactcaatgtcagggaataggatgcaacccaaacggtagcaaccaccactgtatttacttgcctttaccggaagttcgggcaaatccctaagtacgatccggaagtccaccacctgtttttgacacacaacttagtgcaccaatttcacataatcaggctcataaacgacgccacacctacgcacaaactcaaaccccgccgcgggttacatctctcc

SEQ ID NO: 1734 - DNA, 1137 bp, Zea Mays
cggccaccgccacagctgctgcccagccgctcgagcaggcagccgcacggccagtgcacagcagacagcaccggcaagcagccaagtagctgcttctcatccggcgccaggtccagtgcgcgcgccttatctgctgcagctgcttgtcgtcctcgttcgtcgtccctcggcaccggcaggtccagaccgacgctgcgctcagtttgaagctcctccatggcgtcggactgggactgggacagcgacagcgactgtgaagtacgcatgattaaccatccttgcgagcgtcgtgctggtgctgctactcaagcagagaaaggaaaggctatgggcgtatgttcttccacaagttacatgctatgatgtgagagaaattggtggtgagctagttcggtggaacgcaactaggtttggtactgtttttatttttctgcagagttttttggatagaaaagataaatttaagttgtggatggcatcagctgattgggagaactgtaagtgggctggtgaagaagatcatgaattcgcatatgattgtttgacaaaaaataaatggtggagtgacatggaaaaggttttgaaagcggtgtccccaatctaccctgtacttcgtttagcttatcaacagaagagtgtgtctatatcgtcttttcttccaaaaatgatgagtgctatggctaaaatacgatccaatttgggtgatgatcctatcaacaaaaatctgtgtgatagattaatgtaagtaatcaatagaagacttgactatatgctcaatgatactcttatgcttgcagttgctgcccttaaccctgaagcgctatatacttccaaaatggcaagaaaaccgaagttccaacatgctgtgacaatggccataaagaaactttcaagctcatcttcaaaggcttcagctgcaattgatcaatattctttcttcagaaagcaagctcggttatttggaggagaagaggctaaagattcagcacttaatggccgcgcaagtgcaggtaagtcattgttgtctagatttattcttgttttgtccttgagagttgcctctttatttgtggtgattgttctattttttcatattttcctagctgattggtgggatcaatatggtggagactatcc

SEQ ID NO: 1735 - DNA, 1139 bp, Zea Mays
gggctcggccttcttatataagtataccccgtctttaccttcttattgaggatggtcacttgagttagcatatatttcaaacttataaataatttataacagtttaaagttatttctttgaatcacctttgtaatcactccgatcatacaaagtaaaattttgtaacttgtaaaatttggtaataagatttccgctgcaaagatattgatgtgtgtgatttgtgtttacttaatcccgcggttctggttgtaagtggtttatccgatgtccttgggtcaatcggacggatcctgttaagttatttagtgcacatgcatagctgtctgaggtctttgagacaaggacaggtgcatgtgggcccaataacttgggaggttctgccacaagctctccccgggtagaaagggaatcatgactcatgggtaaagtgtgcaacctctgcagagggtagtgaaactgatatatcagccgtgctcatggttaagagcagccttgggatcctctttgattagagatacagatggttcgagatacaaggattatgttgtggttttggttcgactatgatggtgttgttcctcaatgaggaaatggttcacgggttggttaatgctaaaatctggcttctactaatgataaatacttgaccaactaaaagcaactgcttgagcctaaccccacataaagctagtccacttcagccaaacgggacatttgctgagtacgttgatgtgtactcatccttgctttaccacaaaacaccaggttgtccgcattgtaaccacttctcaggagaaggcgaagccgtggaaggagacttccaggagttccaagattacgatgaattctaggtgtgggttggcggcaacccccagtcagctgcctgtgaaggccttatctttactgtgtttcgctagcactttgatttacttgttaagacaatgactatgtggatgtctatgactctatgatgtaataagtactcttttatgttattactcgagcattgtgtgatgatgttcatttatgtaatcgctgtgtacgtgagttctgatcctggcacgtacatagttcgcattcggtttgccttccaagaccgggtgtgacatccacctttttccctttcaatccatcttcg

SEQ ID NO: 1736 - DNA, 1140 bp, Zea Mays
ggcgaattcccgagagcggcctcttcacgccgagtcagcctggcgcaccggacactgtccggtgcaccaccggacagtccggtgtgccagactaagctgagtcttggctgtacacagccaagtctttttcacctcttttcttttcttcttctttctgtttctaacacttagacaagtatattagtacacaaaaccaatgtactaaggcttagaaacatacctttactcttgatttgcactttgttcatccatgggcataaattcacatttaagcacttgtgttggcactcaatcaccaaaatacttagaaatggcccaagggcacatttccctttcaatctccccctttttggtggtttatgccaacacaacataaagcaactagaacaagtgcaaaatcactacaaataaaactcaaatttattttgattcaattttggcatatatggatcattctttgccaccacttggtttgtttttgcaaatcaaactcaaatctctctctctaagtcaaacacacatgttgaagcataaagagagtcattacaaaagagatttatcaaagatttcaaaaactccccctatttcccataatcaacatttctccccacaagaagccaacttttgacaagagagacaaaaagagttttgacaaaacaaaaactctactctactattttcaaatctctcaagtggtagctgatccatttattgctttggcctttattttctccccctttggcatcaagcaccaaaacgggatcaatcttggccctttaaccccattgcctcaccaaaatcttcaattaagagcaaatggcaataagagttcatgagatgaacttggaataagttaccctctcatcggagtgcagtggaagtctttcatggtccaagtccaccttttccctttcaattctcctttgagactaaatcaagcaaactcaagcatatggttagtctcaaagggtcaagttgtaacacaactcccccaaagtatgtgcatcacttacacaaggacttgtgaggtccagggaatgtttgtacaacttgagcaccacaataagcaacaaaatgcagaatgaacatgatcaaaggcgtaaacacatgtatgctacaattcaatccaagttccgcgaa

SEQ ID NO: 1737 - DNA, 1145 bp, Zea Mays
gggcatcttcagttggcatcgacaccatcagtgtcaatataccagctcatgcttttattggttcaaataaaaatgtctttgttgcattcgaggacatgtggttaatgatgaaccttcagagactcgactgcaacttataaccatatgtgtgttgtaagtgtcactcatactccacatatatgtgttattattagtgagttgtataaattttcaatatctgacatgcacgtgtgcgttgcagaatgcaacatgatcagcaggagatcctttatggtaccaatctcaatgctagtgccagtaaaagggttgggtatctcaacctaataaagatatgcgaggatagccacacttttagaatcggaaaagacaacgaagcattatagagactaacggacgaagaaattgaggtgcgtatccaggatctgaagaaggattttaaagcaagatacgccacctacataggacacgcaatgcttcaatttcaagacagggaattcatagtggccccgtacaactttaagtaagtgtgattttgcataaataaaattaataatttcaatacacatgtatcacaagtttgattcgtacagggaccactggatatgcttcatcatttatcctaaggttggaaaggtgctggtgctcgactccttgcacatcaagccttcggcctattcaaaattcctcatcatcttagagctgtaagccttttctatgcatgcatacttatatcgatgagaattgtagcataacatgatgactctatttgagatcacagggcatttaggttttataagctataagatggaaagtacgacacgtccaaaaaaagcgtgccactaaacatccattataactggtcggtaagtatgtgaatttatgaatacatatcatacatatacgtacataagacaatgttgcaattaaataaccaatctcctgttgtgtagtgccacaagcaaccgcccagatcggtcctatgtgggttctacgtgtgcgagttcatgagaatgaacagacgatacatcacgaaccctggcaaggtattattagtaatagtcacgtatgtatttatgtcattaaagatgcaaatgtgttattattgagtataaatatatgatgtttataaactttctttacagaac

SEQ ID NO: 1738 - DNA, 1152 bp, Zea Mays
ctgcagccccggtcgcggcccagtaaatacaggtacagtgaatgaaggaaaaggcctagacgctcagcccagtcgctctcgctcgccctactcgcccagccgctgcctgcccgccggccgccgctcgcccagccgaaagctgctgcctccccaccggtcgccgctcgctcagccggaagccgctgtctatccggtgcccgccgtcgctcgcccaggcccagtcgcagagccgttgcgtgcccgccgtcgctcgcccagctgctgccgccaccgctcgcccagtctaggtccagccgctgccccgcccagccgctcgcggctcgtccaagtgtccgccaccgctcactcagtctaccttcagttcttgttcttgatacacgggtgctcagttccttcagttcttgttcttgatatacgggtgctcagttcatgatacatgggtgctaactgcctgctagacgtgttatcattgcttatgtggtttctacgtgcaggggtacaaattttgcaagctgctttaatttatctgcaatcagcaagggcatttgagtaagaactgccctgagaacaaacatggcatctatccaaagacctacagattaatgcatgggccgttcactgtgcgagcgagctgaaaaagcgaggtgctatggaccaatgcaattgacgcacacaccgcgcaccgcacactctctagtctctagaaacacacgtacgtggagcgtggacggcaggtttggtatcgatttggcctcgcaagtttgaataacgccacgccaccacctcgtgacgcctgtacaacaaggtttggtatacaaactgtccggagttgaacggcgacggagaagtccatgcatgcaccatgcacgcgcaactggccggtaggctgcaggacagtactactagggcgccatgcatcctgtgctactattcgctggagagctcatctcgttgtgctagctgtcgttgtccaaatgcaaaacgtgcttaggcatgtaattttaatttcacaccgaattggaacgaacatcctttttttcgtaacaggagtacatcagtacttcctaacactctaacaggtgcactcaagtgtatggttgttcttttctctacagtttaagtatttgtgtggccgcctaacttataacaagt

SEQ ID NO: 1739 - DNA, 1160 bp, Zea Mays
cctaaatttgtgaatgggaggccgttcttaacaacggtgcaactttctaagttgtcgactccggagattagaatgcatgagtggtacatggtggctagctgtaacactccaggttccacaaacaacccggtatgctactgtactacacttccgacgtccatatataaaatttcggcagcatcccctttgcaagattgcataaaagagggagcaacggagtataaacatatatcatgactaaaacatactaagtattattactcggctagcaaggaaagataaacatacgacctgaactgaattaaccagtgcgcacgaccatataaaaaaaataaacaaacttccattgacaataagtttctaattaaatcatggttgcgcctgggcagcgttattgtgagagtgaaagtggacgtgctgctactcccctcattcccaacatgtatcaagtacctgcattgagtaatgcaagagtgagatgacacatctcagcaagtaaaataatatcaaacagtttaaccacataagaacattgttttaccaccacttaattccacaaccttcttattacgaaggtgcagcacgtatacaacgtacaacgcacctagttaccacacctcgcaggtagaaaccacaatagtaacatagtaatgtcacacttcatatattcctcatgagtgcaaatgtctgcaaatgcaaggatgacttctgccttcatacctctaaggatatgaagccgcatcgtacccctcctcgggcaacgtacgatgctaaaaatgtaccggtacggtcggaccataagatcacgacataacttcaaaatgcaagatggatgatgcgatgtgcatgtcatgcctacaacacttcatataacatgattcaaaaagacacttcaacttcatccagatgggaatcaaccacatatatcattaccaaattatgatcatccacaatattagacaattgagaatcaatacttccaaacaaataaacttcatcatagaattcaatgattaacataattaaaacttatgcatactcaatgacagggaataggatgcaaaccaaacggtagcaaccaccactgtatttacttgcctttaccggaagttcgggcaaatccctaagtacgatccggaagtccaccacctgtttttgac

SEQ ID NO: 1740 - DNA, 1163 bp, Zea Mays
cacaaacaacccggaatgctactgtactacacttccgacgtccatatataaaatttcggcagcatcccctttgcaagattgcataaaagagggagcaacagagtataaacatatatcatgactaaaacatactaagtattattactcggccagcaaggaaagataaacatacgacctgaactgaattaaccagtgtgcacgaccatataaaaaaataaacaaacttcctttgacaataagtttctaattaaatcatggctgcgcctgggcagcgttattatgagagtgaaagtggacgtgctgctactcccctcattcccaacatgtaacaagtacctgcattgagtaatgcaagagtgagatgacacatctcagcaagtaaaataatatcaaacagtttaaccacataagaacattgttttaccaccacttgattccacaaccttcttattacgaaggtgcagcacgtatacaacgtacaacgcacctagttaccacacctcgcaggtagaaaccacaatagtaacatagtaatgtcacacttcatatatttcctcatgagtgcaaatgtctgcaaatgcaaggatgacttctgccttcatacctctaaggatatgaagccgcatcgtacccctcctcgggcaacgtacgatgctaaaaatgtaccggtacggtcggaccataagatcacgacataacttcaaaatgcaagatggatgatgcgatgtgcatgtcatgcctacaacacttcatataacatgattcaaaaagacacttcaacttcatccagatgggaatcaaccacatatatcattaccaaattatgatcatccacaatattagacaattgagaattaatacttccaaacaaataaacttcatcatagaattcaatgattaacataattaaaacttatgcatactcaatgacagggaataggatgcaaaccaaacggtagcaaccaccactgtatttacttgcctttaccggaagttcgggcaaatccctaagtacgatccggaagtccaccacctgtttttgacacccaacttagtacaccaatttcacataatcaggcccataagcgacgccgcacctacgcacaactcaaaccccgccgcgggttacatctctccctacacccaccaaactgcagcggcgc

SEQ ID NO: 1741 - DNA, 1172 bp, Zea Mays
aagttttacacctttatggttgaattctgtcttagaaactgaacttttgaagttatgaacatgtgaatcaaatactaggaaaactagttagtctgaatggttgtgatagtcatcaagcaccaaaatcatttagagaaaatggtttaaggccatttccatttcacggtgcgccaagccttccgagcctagaaacaagtcctctgcttaactgacccggtgctgcaccggactgctccggtgcacaccagacttaatctggtgctaagtagaacaacaaacttaaatcgttttcggcttttctttattgtctttgtttggctgccttcttaagcacttctatgacttagatgagtccatccaactggtctaaactatagttccttgtctttttatcaacttaattcattttctcaacttaattcattttctcattcctgctcaaacttagcttcagaacaccaatttcaatatctgatcttttctaccttgtttctgtgctcaaatatattattatggccttttagaacttatccaagtacttgaactactcatttttatgaacctacaactattaatgttgtgatggtcatcaaacactaaaagcaatatagaaatggcttaaaaccattttccctttcacttgtcttacaaagcagattaaacacaaaaggtatgctatgttgcaggaatatgcacctggactcttatgcttgtgagaattgtattctacaatgtgaggagaccatatgacatatttttctcatatgcaactttgctaatatatattgggctatgattggaattcagcctccaaaaacatgttgtccacaaagagcagttcaaaggattaaactacatttacttcagtgtttgctatggaaatcataatcctgatgaattggagcatctgtaagacaataaatggttggataattattaatattttggcaaccgtgatcgactgcaaggccattttttaagaaagaaatattgatggttattcatcgagcaaatactagattccaagatgtaatatgagagtggatagataggtggaacatttaatttgtcttctccttctttctttgtacatatttttttgtaataaaatacagtgggatggtctcccctatggttattctaagaaaaatgtgctgatcttcatagagcaa

SEQ ID NO: 1742 - DNA, 1177 bp, Zea Mays
ctccttttcccccttcctccctctatggcacgcggacccaccccacggccctctcctccccctcgcgcgtcgcgcggcagtctgggcacaacacgccgccgccgtggcacggctcgcccagcgccgagccggctgcccgcctgaccgcctccccacctcttccccttcctcgcaagtggagcaccaggaaccgtcgtgcccctccctcttcctctcccccactctcgctccccattgaggtcacgccattgatgacgttaatggccgccgccgaccattacttcctctccggcgcgctctctctcttctctctctataaaaactcaatgccacacccatggacacttccctcggccgccgagctcgcccacgcctctcctccctctttgtcgttgtacttcgccgccggccgaccttggctcgccgtcctcgacgttcgtcgccactagaacacctctgtccacgtcctcgccaccgactcgagctcggagcgccactatccacctcccttgatcgcctcatccaccgccgtccggaactccactcgctgtcagcccctgagcgcaagaaacagaggggggaagatggtgcgcactctccaaacgacccgcgtgaacaccaacggtatccctccacccaggcaggctcctttctaccagttgtggtggaagaagtcccggtggagcaccaccttcatgtggggaatggagtgatcttggaggacagctctgaggagattttggcaacacacactccattgtcagagtctcatgcctttgctgctggagcttcatcttcagtaccgccagtgccagcacctcaagccccgactcctataggcgatgatccggatgattctggtgatggtggagacgatgatgatgagacaaatgagagcacctagaggggggtgaataggtgatcttgtaaaaaacaacttaacaaaacaaacttggactagtattagattagtgaaagctaaggccaagtttgagagaggagtatgagcagagaaaacttcttcacttaattgctcttcacaagatgagtattaaacttagagcaattatgaagtgaatagaagtagagagaatcgcacaacaataaagacaagtgacacaacgattttatgacgtggttcgatcaagtagaatacttgtgtcacacccggttttag

SEQ ID NO: 1743 - DNA, 1177 bp, Zea Mays
atcaaagaatgcatagctcggcatggtgcatcaaacaacataaagtatttttttgagtttttctttacacgggaattccaaaccgaatcccgctagctttggaaaaagtcaaggtctagcgagggcaaaaagaaaaagaaaaggtaacgcccgaatttggcgagtaaagaaaagaaaaaaattcaactgcaaaattcggggcgttacaaatgcattagctcaaagatagatatttggctgtttttaagtgaaaacaaataaacggcttcacgagtaccgggttgactaactcccgcacccgaaggctttgttttattcaccacaatccatatgtattgaggtagattatggtgtaaattaatttaatttacactctaattcatctcaatacatatggattgaaatacatatggattggagtgaatactagacgaccgaagtgggaatcaactgtcacactcgcaccagatgcccatcttgtcatcttcgatccaagatattaatagaacatttatttaagcatcaactgtttgcatactgatatgattaggatctaatctagtctgacaccaatattttgtgtgacaaggggtgtgcgacaaggttaacgagcagcatgggaggcacctgccaataatgaatggaatcaaagaggatataaaaacactgctgacgttggaattggggagccccctattccatgaagttctggtcaacctcttggttcgcctcaaagcgttgcaggtacagttcctgtgttatccaataactgcattggttgttctttatctgccaaatgtgcattgcttgtgaaacgtttctacttcagaatatacactagtgtaaggctttttggtggtagaagcatgtatttagttatgaacgtcacgcttgaaggaataggcaaagcgccatcttaggtgtcttcagaagtgagccatatggaaaccttcgactgcttaggaggttttgcttgcaaacttcacctgttgtaactttcaaggcttctataggaccttcaggcaaaagcaataatttatttgtgtggatgttgccctgtcctaatctgcatcgctttagcaaataacctaccatgagaatgatgagggggaccattcaccatgttaccaaagaaggaaatcgattccttccgttttcaagtggaaaagtttgtctc

SEQ ID NO: 1744 - DNA, 1179 bp, Zea Mays
ctaatttttttggtgataataaaaatactaggtcaatggtgatagcttaggcgcccttcccctgtgccacagctggaggcaccccctacaccaccacagggcatcccgactgctggaggagatccagatgaagacgccgatggtgatagcttaggccacagtaccgagctttccgaggaacaggagccagaaggatgagtcgctcgacccatgacccgtgatgccgctcgcggttggcactttcactatgcgctcgacaccctattgcattaggctcttgactggcacacctagtcaatcgagtaccattgtgtagtctaccagcacagtcgcgggaagtacccaaaccgctgggaggctacctgtctagtgcaccgttcggaggacgatctctggggtgcagaggcatgtttagagcactattctatctctgagagggacactgccgaggcggccatgcaggatgctgcatggtgtgcgctcttgcagtattgctcttcgtttggtgggatggttgatggtctcgccacccatgccgaccttgaagctatcacttgggaagaattttagagacaatttctatcgttatcatgttccagaaggcctaatgatagtgaaggagttcctggcactgaagtagggaccccatgttcgttagtgagtacagggacaaatttctgtagttgtctcggtatgcacccgaagaggaagtacatgttcctgagaggtttggttgggtcccctgcattaccagatgatgaatcacaccttccccccctctaacatctgattgatagggcaatcatgactgaaagaaagcgcaaggagatggaagaccagaagcgtaagatgagtggaccccagtctgggtgcaacagtcgccctcgtttctcaaacagttcatcttagcagtacaagtatggccacccacagggatattagcagcagaaccagcaatagactcagaggcagtatcagcagcagcaatactgtcagaacagacaaccgggaggaaataagtaccagaggcagagcaaccagacacctcgcgttcctgccccatcagctaatcagaacaatcaggtagccccagtgcaaggaggaggcagaggatgtttccaccgtggagagcaaggccactgggcgatgcagtgcccgaagaagatgactcaatagcag

SEQ ID NO: 1745 - DNA, 1182 bp, Zea Mays
caacaatctccttttcttcttctttctgtttctaacacttacataaatatattagtacacaaaaccaatgtactaaggcttacaaacatacctttacttgtgatgtgcactttgttcatccatgggcatagattcacatttaagcactttgtgttgacacttaatcaccaaaatacttagaaatggccaaaaggcacatttccctttcactacccgcgaaaacagtggtactaaaagggtggaatgggatgcccttggctgaataattaggaaagctagtgtgagttaatcctttcccaaaaggggcaagcggggtggaggagtgcaggtgtagggaggtcctcaggttggactgcctttttagcttttcgaacgagggattactacatcgccttcgacacgaactccgtagcgggttctctcatctagccattgaccttgggagtgtctaagggtcttgcaaacccttgctaaatggcaaacatgtcttgtgggtaaagatgtgcaacctctatagagtgtaaaactggtacatcagccgtgctcacggtcatgagcggctcgggccctcacatgagtaacttatggaactaaacttaatctgtcatttgcattgcattgtgggatttattataattatgatctcttatttaattgggatggtatctacttatatttagtaactactaataaaattttgaccaacttgttaaaagcaatgccagccttaaccattttctttgggaatccctacacttcacacgagcccccaccgtaagtgagctcatgcacattattccccacaacttgttgaatgataaaaatatatgaactcactcttgttgtactcacccctaggtcaagaacaggtaccggaaagatgaggagcatgaaggatgtcgcgatgagttcatgagaggtctaggtcgtcgtctcccagtcaactatggttgaggaggatcgttgtcttcatatgatgtaatgatttagctattttgtacataactcctatatatatagtaaagattcgacattcgtttctgtaccatgtgtcatcatgtgtgtgagacttgatcctagcacacatttgattcgcgcccgggtttgcccttaaaatccggcgtgacaaagttggtatcggatcaatgttgactgtaggacgtaacctatatagacctagaa

SEQ ID NO: 1746 - DNA, 1182 bp, Zea Mays
ccggtggagaagaaggagtcaggtaagcttagagtatgcattgattttcgtaatttaaataaagcaactcctaaagatgaatatctcatgcccatagccgacacattaatcaataatgcatcaggaaatagaattattagcttccttgatggtaatgccggatataatcagattttcatggccgaagaagatgcgtctaaaacggcctttatatgtccagacttcattggtttatttgaatgggttgtcatgacattcggtcttaaaaatgctggtgctacttatcagagggctatgaatctgatcttccatgagttgttaggaaacactgtggaagtctacattgatgatattttagtcaaatcggctgagtttagttctcatatagctgatttgcgcaaagcctttgataaaatgcgtcggtatggtttgaaaatgaacccacgtaagtgtgcttttggagtgtcggctggtaagtttttaggatttgtcatccatgaacatggtatagaaatagatcctgaccgaatcaagtctattcggaatgtggggcctccaacttgtaaggtcgaagtgcagaggtttctcggcaaggtgaattatttacgaaggtttatttctaacctagctgggaagattgatgccttcacccctatccttcggcttaagaatgatactgaattcacttggggggcagagcagcaggaagcatttgatctcattaaaaaatacttgtcttcggctcccgtgttaaaagcaccacaagtaggagcgccattcagattatacattgcagctgaagacaaggttattggggctgttctgacacaagaaactgaggggaaggagcatgtggtgacatatctaagccgaaggttggtggatgctgaaacaaggtacacttttattgaaaagttatgcttatgcttgttttatgcatgcaccaaatgtagatgttatttactgtctagtcattgcactgtttctggtcaagccgatgtaatcaaatacatgttgcataacccaattatgagtggtagaattggtaagtgggcttatgcactcatagaatatgacttggcctatgaaccattgaaatctatgaaaggccaagtcgtagcggattttattgtagaacatcgggttaatgatattcatgaactagacatgtcatacctcact

SEQ ID NO: 1747 - DNA, 1188 bp, Zea Mays
ctggtgtcactagtgaagcgacgaaccgagaggaggggatgagtcagtccaggagcgacaaggacgtcgttaaggcggaatggtcctggaagaaccgatgcacctactgaggtgaccggaagggtggaaccgttgccaacgacgatggaggaaggatgtgaggggtgtggtggatgggagtggagtaacgaactagttgtgggggtagtgtggaaggaggccccggagtcaaccacccaatcggtggtgagagggggaggtggtggtggcgaaggtacggtgtgagcggagagggctaaagaaggtgccccgatagaggcgctagggagggagggagatgacacgggctcaaccgctagggaggcaatcgcagcacatgggaaaacaagcggtccaggcacgtgacggcccgcctgagggtggatctcgacgcagtcccggagaatagggttccagactggatcgaaggacacgaacatgccccgaatgagctggccgttgtggaggagggcatgcacagtcacaggaacgacgggcgagggtaagctcatgtacagcgggggtgacgccatggaattggtgggggtgtccagaagggcgcacgctgccagtaggatcgggtcgggcggcttggctgggagttggggctgacagcgcctgacggcaagtgaagaggaggcggcagggagaagccgaccgggacggatccggcggcgctggcgcggaaggagacagatccgacggtgcaggcgcgatgggagggggttcggcggcgcgggcgcgacaggacagggtgcgcgcggcaccggcggctggaggagacggcgcaggtgcccggtccgcagacaggagttggccgacggcgaccctgaagagagggagaaggcgcggagtcgcgtcggggcgtggggcggcgcgcggccctggcgcagcggcttcctggcgcagcggctggaggggcggcttcctggctgggcggctggcgcggcggcttcctggcgctggcgcgcgaccctggcggctagaggcacggggctggcagggaacggcggcgcctaggggagcgcggcgccctggggaacgcggtgcgcggcggcgcggcagggagaagagaggggcggcgcggtcgcggctgggggagatgggccggcgacgctgaacatgggccggcggcggtggagccctagc

SEQ ID NO: 1748 - DNA, 1189 bp, Zea Mays
ggcaggtgaggccagctgacttagggtcataacaaaaatgaaaatcagacaaagtccacacaactggcacacacttttttattgaaaaaaaaaacaatacagttttcagtatttattcagtgcaaatccattattggacagccatgacggtgcatcaatgattatctgtcccatacatccaactaatttatctcaggcaagctctgatgtgcgcctgccatcgcaagctgatacctatcgtccaaccaatgatttcagtgcgtgtgactacacttaaccaataacaaccacattactcatgaccattggcgaatcgaaattcgttaactagcgtcagtaattcagctggaaccttcgtctcgcaagaaatcaaccaagagaaggaagcagcctacgcacgtccgtcagagagaacaacaaacagacatggaaagtaattgggctaattcatttcttggtgaacagggagggggaccaggaaccaggaaaagcccgatagtaaggtaccaagagcaggaacgaaaatccagccttgaaccgtcctctgcatacactaaggagtaaggagtaaggacttaaggagagagggcaatcagctaggctcactcacctgaacaaaccgccgccgtgatccgggaggatgaagcgagcccagtaacccacccccacccccgccgccgccgccgagacagatcccgcgagagtctacaacgcgagggaagagagcacgccgcgccttgtcggttatgatcggaacaacccacccgcaggcagtacagaaggacggcaccaggaaaaagcgccggcccccaaaggctcggcgaaggcctccgtcggtttccccacgaggtgccgcgccgtgccgccacggggcgcggacgcagcagcggcgagctttcgcgaggggttgggggaagccgggaaggagaggagaagccggggcgacgacggcccgtggggggcgcgcggactgtggactcgtggcgtggtgccggatggctccaagtggtacgcacgcgcggtatttgacttgtcgtccgcggtgcgggaagggaggccggaggggaggggtgctgtggactggggtggaggtggagccgtggaggtggaagaggcggccggggcgcctcggctttgaaaggtggacggagcagaggggaggagggtcaactcaaaccgttgaccacgt

SEQ ID NO: 1749 - DNA, 1189 bp, Zea Mays
ctacaaagatatcgcaagcacaaaagtaagttagatctaatagattgagaagagtatagaccatactagaataaaatactttttggaaaggggacatataggagcacaacataaaattagtcgaggtgactaatattttgaagcagaatcaaggatgaggtgaagtaatagtcaataagtccttaaaacggccaatgctactctaggtcagcggtcctacagtcagcacagctttgataccacttatgtcacacccggtttcagaaggcaaaccaaatgcgaactatgtacgtgccaggatcagaattcacgtacacagcgattacataaatgaacatcatcgcacagtgctcgaataataacataaaagagtattaacttattacatcacagagtcatagacatccacatagtcatcaacttaacagttaaatcaaagtgctagcgaaacgcagtaaagataaggccttcacaagcagctgactgggggttgccgccaacccacacctaaaactcgtcgtagtcttggaactcctggaagtctccttccacgacttcgtcttctcctgagcagtggttgcaatgtggacaacctggtgttttgtggtaaagcaaggatgagtacacatcaacgtactcagcaaatgccccgtttggctgaagtggactagctttatgtggggttaggcttaagcagttgcttttagttggtcaggtatttattattagtgaagccaggttttagcaataactaacccgtgaatcatttcctcatcgaggaacatcattatcatcatcgaaccaaaatcatatatggaaccattgtatctcgaaccatttgtatctctaatcaaagaggatcccaaggctgctcttaaccgtgagcacggctgatatatcagtttcactaccctctgcagaggtcgcacactttacccatgagccgtgattccctctctagcccgggcttgcaagacccttattcactcccaaggtgaatggccagggattcactacgaagcctttacaaagattccctagaggtcatagctgcccgttaggtttctccagtttgataaacacagtacctctccccgcaggagggtgactaaaaacaaaacgaaagaacctcggcactcagcctcggcagagcaagcactgtgcctggaccccattgacggcacgacgg

SEQ ID NO: 1750 - DNA, 1196 bp, Zea Mays
ctcgtgtcgtcaaggcctccttccctgtccgcgacctggcttctcaactgaccgtgcggatcgcgcgtccgccaacaaactccagctggagattgtggaccgacgtccctgggccataaaaactatgcacaagaccttctatcctctcccttcgtcgttcctcaaccgttaatttctagagagagatagggcatcgttgtgccagggactcggcggcggctccgcctggggctctcggctacctgctcttggctacctgccctgccctggtggtgcgatcgagcgaagtcgcagcggcgctgggtaccagtacggtgcatccgcggacgttgaggaccgacaggatctcgtgaattcctcatcggagttcttccctcgtcgcgagtcgaccctcatcgtggacagctcgctcgcgcgcccgatcctcgcagtgaggtcatgaggatttgaagaatcatcctggtacctagaatctcaagtgccaggcaagttgtgctcttgaccactttttacccaataatgttctttattatcactattcaatgcataggtttaattttgatgggacccaataggtcaccctagtctgattatcttttaccttgattacccgtgaatcatttggctagttttgctactgctttacatgattttgggttaatatttcattatatccatgttccaattattctattatgttattatgttcatgtcaagatcattatctttaattggaatatggagcttaacttgagaaacacgtgccaccacaagggtggaatgggacgcccttgacttactaattaggaaagctagtggaagagtaccttacccaaaaggggtaagggcagtaggggagttgcatgcagggaggttctcgggttgattttgctgcgatggcggtcagacgagagattcttgaaagtgctcttcccataaactgtagcgggttttcggaagctagtggaactttgtaaaggcctcgtagtgttaccctgcctcgcttccttggtagatgtgtatgggattcatgaccccttggcagatgggtaacatgacttgtgagtacagggtacaacctctgcagagtgtaaaactggtatactagccgagctcacggtcatgagcagctcaggactctcgcatgattaaattatggaacttaaattcaatttgtcatttgcatttgcatggga

SEQ ID NO: 1751 - DNA, 1200 bp, Zea Mays
caacaacctccctatcacctcggcctctattagtgcacgctatataaattcccgagtctcgctggcgctaccaaacccttcgtacgccgcttgtgttctgaccgccaccatgaatcgtgcgagagagaaacccaccgccgttgacgatcacctatgaagacgctcggggtctaggattaagcctcagggcttcatggtgccgtgagggagtgggtgtttccccaatcgatgggatcatcgaccagacagtcgggaatcacacgtcaaagttctagaaagctgttgaggtgtggaccatcgtggactgggcgacaaccgtgtagaaatcaggtgtgacacaagacaaatgatgggaagacaccatttgagttctggtagtgtaggaagcctgcgattcatcaaataaagacatttgaatgtattgtctatgtcaaggaaacaacaccacaactcaagaaactagatgaccaaggcaggaagatgatctttgtggttatgagaagggaatcaaagcatatagaacatatgatcctatcaccaagcgtgtcacaatgacacgtgatgtggtgttcaatgagtcagggaaatgggattggagtggtgaagatcaagcgaagagcaacatggtgaatcacagcgatgctcctttaaccgtggagtatagagaagtgtttgtgcctaagatgggggacgaagaaagggtattagatagtgatgtcttggatggtagtccagtggtgtcggatgcaggagggcataatcacaatcctctgtttgactctagggaagatgaagtgtcccgatcctttgggactcaaatgtgatacaattactagtcccaggaggctagtaaccacattcctaacttcaaatagtacagagttcaaataaaagttattacaataccagagtacaagctcgagagagccaaaaatacaaagcgcagtaggagataaactagcccaagccacaggcagaactgggtgctgacacaaccccctcaatcaagcatagcagaaaagaagtcttcagctgctgaaaaacataaataaatctgggtgaatacactaggaattccgcatgcccatcccgctcctgtaaagagaaagggacctatatcatacatgctttatatggtggagttgaagtcactcttctttttctcagagaaaggcagtacttttagggtttttcccaaag

SEQ ID NO: 1752 - DNA, 1203 bp, Zea Mays
cctccttcggtcaaggattgcactcaatccctctcaagtgatccaatgatcaaccttgagtaccacggttttcttccttatagtagaggtttcccattgtgagtaatctccacaagttggagcctctcacccttataatattgatcacaataaaaaccacaggagtaagggagggaatagaaacacacgcaagagctagagtcgcagcaacgacacgcacacaagtcaataaacgagcacacaaacacagcgcaatgaattcacaactcaacaagtgctcaaatctaaaacacaatgatctggatgcgtgcttgcggagtctaggtatcttaggatgttcaatggatgcttggtgtactgctccatgcgtctaggggtcccttttatagccccaaggcagctaggagccattagagctccatttggtaggcaattcttgccttctgtccgttggcacaccagacatgtaacaccccaggttccacaaacaacccagaatgctactgaactacacttctgacgtccatatataaaatttcggcagcatcccctttgcaagattgcataaataagggggcaacaggttataaacatatatcatgaccaaaaacatactaagtattattaatcggctagcaagggaagataaacgtacgacctgaactgaattaatcagtgtgcacgtctatataaaaaacaaacttcccttgacaataagtttctaattaaatcatggctgcgcctgggcagcgttattgtgagagtgtaagtggacgtgctgctactcccctcattcccaacatgtatcaagtacctgcattgagtaatgcaagagtgagatgacatatctcagcaagtaaaatattatcaaactattcaaccacataagaacattgttttaccaccacctgattccaccaccttcttattaccaagatgcagcacgtatacaacgtacaacacacctagttaccacacctcgcaggtagaaaccacaatagtaacatagtaatgtcacacttcatatattcctcatgaatgcaaatgtctgcaaatgcaaggatgacttctgccttcatacctctaaggatatgaagccgcatcgtacccctcctcgggcaacatacgatgctaaaaaaatgtaccggtacggtcggaccataagatcacgacataacttcaaaatgcaagatggatgatgcg

SEQ ID NO: 1753 - DNA, 1205 bp, Zea Mays
acctgacctcccagaaatagaaccttcgtatcatgagaacttcgacgaaggcaagttcattctacccttgatgcatatattacctattattttccgtcacaacccaaactggaaaaagtgaatggattaatgcatatgtgagatgtgtataaacttgcattaaatagccagcatattttcaaagaaaatgtgggatacaggttctgcattaaaaaaagatattttaccaaaccaaggtatgatgaagggttatcacccttatcaccttcagcaggatgattgggactccctggtgtgggaggaccatcaaaggagttggctcagcccggttaggtgtgagcatgaaggattgtcctgactcgtataaagatcgtttgtcattcttcactgcctattggtacttgatttcaatcctctgaaggtatcaaaaatcaaggtaacacatgttaaatataaagaccttttgtcctgtgttataacacttcttcgaagtgttaaaacaaaggacgaagggtcttaaagagaagcataatgaaataatatgaaaaatgacaaagtgagtctctttatgaaacttatctcatatgtcttagcattttatttcatctccactaatgttaaacaagtttacaagcacaccttgggctccttaatacgggatggcatgaaggtccttcgaaggctaagcagcatgaagttatggctcttgaaaaaggtgctttatgcagagcactgttcacctatttatagggaagatgaactgcctttgtacaaaattacaatcatgctcctcaaggttttatacacattgtttacaaatgacatcagggtagtattatattttctcctttctcttctacgcaggtcttggccttcatcgtatgagagcttctctgctgcctagcattccaaaggtaccgactttggttcacaccttcgctacttgcgcgtataggcgaagcttctttatattttgcttcggccaaaggccagcttcgtccatcaatagaagagcacctgaaacacacttgcttatgccgaaatgaaggttaaatgtggaccttcggcataataggcctccaacagtagccccttgcaaaatgagtttgttcttcataatgatcttagatcgcaaaatagaagaaattaggaggccttgtgtcgaaggtccaaaaaacaccttcccgaagctcgttatgaatacc

SEQ ID NO: 1754 - DNA, 1212 bp, Zea Mays
catatttcgcaatccccttctcgtccccttcgcgaagaagcatcatcctccatacatcccctcgtccgcggtctcacatggcagtggcatgagctgcttctccccgaaaaaaacgtttaaataaaaaacaaaacataattataaaccaacacgcctgccaccgaccgatcagacgaccccttccaagaggaaatccaccaccgcggccggggcctcccaggagatctcgccggaggccgcggcagcggcggcggtggggggcgatggcgctcaacatgaagaccctgacgcaggcgctggcgaaggcgtcggctgtgatagagaagacggtgtccacgacggtgcaagaggtgacgggcccgcgcccgttgcaggactacgagctgctggatcaggccgggtccggcgggccggggctcgcgtggcggatctacacggcgcgaccgcgggatggcgccccctcggcgccctaccccgtcgtctccgtctgggtgctggacaagcgcgccctcgctgaggcgcgggcgcgggcggggatgtcgaaggcggccgaggacgcgttcctcgacctcgtccgcgccgacgcggcgcggctcgtgcgcctgcgccacccgggcgtgctgcacgtcgtgcaggcgctcgacgagaccaaggccgccatggccatggccactgagcccgtcttcgcctccgtagctaacgcgctcgggtgccttgacaatgttggcaaggtgcccaaggaggtcaagggcatggaaatggggctacttgagattaaacatgggctgctacaagttgcagagacgttggattttcttcataacaatgctcatcttgcccatcgagctatatcgcctgagacggtatttataacttctaacgggtcttggaagcttggtgggtttggttttgctctttcggttgatcaagcagcagttggtttgagtttgacttcatcacaactatttcattattcggactatgatgtcgaggatacagctttacctcttcaaccatcgttgaactatactgcaccagaattggtccaaagtagagattctaaagttggctctgcttgtgatatgtttagctttggatgtttggcttacaatctggttgctcgtagaccacttctggactgccataacaatgttaaaatggatgctatcgatggatgcactatcacgtcctagtgctatggcctttacaggt

SEQ ID NO: 1755 - DNA, 1214 bp, Zea Mays
ctacaatcagtgcaaatatatttaaaacttcatcctgcaataatcagtgtcgcctatattacaaagcagtgttttgcacgcctatttccacgacatgctagaattggccttaataatatacaatgtcacggcacgaccaagcatgtagctcgaactactgtagaccattccatgcatgcagctaacctttccaacaaaatcccatactgtttcattcccaggaccaaaaaatgcatagatctgccttctctcctggtctatctcgtaacccgcatatacaaaagatctcatattgtcccccttcgctatctccttcctcggcagcggcgcggccggtacggtggcggtggagccaccactcggagctgtgtgtcggccattgcaggtacagctacacagctacgctatatcatctgtcgcacacacagctagctagcatatataccaccaacacgatacgatcacacacgacacgactactgtcgccgcctgtttacgccgccgctgagcgcggtggaagcagatcgaggtgtcggtggatccaagcgatctctgacagcagtcttggtcgtcagtggagacagctagcttagcaaataggaggaaggactatgcatgctgcctatacgtcgcccaccggtttccagagaagcaccacgcatgcatgcttcgtctcggccactaggctggtgccaggggctcgtgtcgcttagcctggggcaagagagacgaaagtctctggccggatgacgccgcgcgctcgtgttcatcgagagctagcgggtgatatcgtctcgctctcgtacgtccgtgctagatcgaccacgtgactggacgagatggagcggtagacgaccgacgacgtgttggtgcgggcgagaacgaggtgcgacaaccggggggcggctttcgatccattccaactcgtattttctagtcatctccatgtcatgtcttcctcaaacaccaactcaagtgaaggagccgacgatgcaatgcgaaatatattgcaagtagtcataaactatgcttaagctccatgaagagttgtcgagccagcccaaacgccgtcgaaaaactacattaatcatgatcttgagtccacccataaccggctttataggactacttcgctgatgattgtgtgtatattccgagttacctatggcacagatagacgacaacttattttttttttaagtattatgtatagt

SEQ ID NO: 1756 - DNA, 1224 bp, Zea Mays
ccgcgatcaacggtccacggtacatccttcccatatcccatcctaaccgtcaacttccaatccaatggctgccagttttcttcctccctacgccctcctatttccttctctctctctctctctctccatggctgaccggcgtcggtagttcttccccaccgcggtgctagtagcagcggtgagcacaaccacgcacaacccgccagcgatcaagggccctagtccgactgctgttgcgcgagacaagggtgagatagaaccgagcaggacagggcgagtagttaccgcaagcagagcgaaagcgagaccaccgacggcgcagtctagctccagatttcaacaatggcggctccagttctttctccgatgcgcactgcccaagctctaggcacgacgccaacgatgaagtcccagggcagtgggcgcacgggcagacatgggtggctgcaacttctcccgagatccgaagctcccggcggtggttggaacagccagtggaatccacccgatcctggcagcgaacgtcgcgacgtacagagtccgatcgagatcaaacaccagagtgccttcttccttcacttggtgcccaatttgaagcacaggttggcgaggcagccaaactcctacggctcctggcggctcgccacacgcatactactatcacggtggaggggacagccaccggcgggcaggagcatccccagtcgtctcccattcggcaaggcagcggcatggcgaaggaacctgtggctccgggttgagggctggcaggcggacttctgtggattgcacgagatggctggatgaggagtagaggcccccgaggccatatatatatacacggaaggcaggccaactccgagcgaagccgcgatgaacgacccggcatttacgcgttcggatcacagcggaacggcagcgagaagattctgggattgtggccccacgcgccattgaaatatagatgaagtcagccatgacgtcgtggtgatgtcatctgcggcaagaggaataaacaaaggaaaaaggaattgaaggggcgtgggctgcactagtattgagcagcaagtgggccgagcggcagctagctcacgttaggggtgagatttcattttttttctttcccattttctacttttaaattttcaatttcaaattcaagtttagttctgaatttcaaacacacgttacatgcatcaaacaaaaaccttcacatacgtagca

SEQ ID NO: 1757 - DNA, 1227 bp, Zea Mays
gcacgcctgtgacgacgtttctctccttccaagcgcctctgaatctctcacatggtaatcagagcttagggttccatggcaacgagttcaagcaccatcaccaatccattcttcggcttccaagtgaccgagaagctatccaagaacaatcatgcgtcatggagagcgcaggtcctcgccgcgatccgcggtgctggctacgaggggcatctcaatggcaagaccaaggctcccgatgctgaaatcgtcgagaagaagaccgacgacacgatcgtcaccaatcctaacccagcgtttcaggtgtggtattctcgggatcaacagatcctttggctcatcctagcaagtgcggggaaggaaattcagccacaaatcatcagtgcagagacggcggaacaagcatggtcgaccgtggagaaaatgttctccgcacagacccgtgccaaaacaatgaatgtaaggcttgccctcactactacgaagaaaggtaatatgtcaatcacagattatgttgccaagatgaaaggtttagcagacgagatggctgctgtcggtaaagcactagatgatgaagaactggctgcacatatctgtaatgggcttgatgtcgattacaattctgtggtgacatcagtcaccgctaggactgatcccatatcgattcctgagctttatgctcaactgctcagttttgagaccaggttggaactgcaagatggcggctcgtatgctcacgtggcaaatcgtgggcgcggcattggcgacaacaacaaccgtggcttgggcactgcccgtggccgtggtcagcgtgggcgtggctaggtgcgtggccgaggaagcaatgcgctgaagcaacacaatggagggcggcaaccgcgaccagatgcagcaagtatgtctgaagatgtgccactttgtcaaatctgtttcaaaacaggtcacatggcagcccggtgttggcatcgttttgatgagaactacgtcccagaagaacgccatgtcaacgctgccatcaccatgaacgcgtataatgtcgacaccaactggtacaccgacacgggagcaacagatcatatcacaagtgatctgaacaagttgacgatgagggagaagtatcatggaaatgaccagattcacactgcatctggttcaggtatggaaatcaaatatgttggtcatactactgttccaactcaactccgtaatttacatctaaacaatgttctt

SEQ ID NO: 1758 - DNA, 1234 bp, Zea Mays
ctcactgctaaacgtagcaatacagacaaacatggtatacgcaaaattgacatctcaccaaacataagaatacattgcataataataatctacgggatgctacgagatcatgggttcgagaaccactaaattcggagttacggttaccaagttttgaatttctgaagttattaagctcctagaataaattaattcaattgaacaaatttaattcaagtttcatggctaaacagagatactaggtgataaataatgctaaaacaaaattaatgtctcttgaatgaatcaatttggagcccaattgaattaaatatgaatttcacaagtttctataattatttgtgtattgaaaatcaatttctaaatttatttatctgatttttctatctcctgggctgagcacctaactccaggaaggtcaggggctaacctacaaaaattccccagacacaggcttcatcctccctggacggcgggttgattatgtaaaattctagggtctcttatgcataagtcgctcggcgaaggggtatgaagcgatacagaccgcccgatccaaccacaacggcccagattagattatcataatatccgaatcggtatcccccgctggcgatcggatcccgatccaacggtcttggtttacttcacctaaattgttataccctggataatctgcgccctccatcggccgatcgacgaccctgattcggtaggatgaaaggggaagcccaacctgatctcagccgtgcgcgaggaaatcaataacgcacgcgatgtcatcttcccagatctaatcttattcgttccctccccatccaacggctaccagcccatcctctatctcccaacatcagccgaaccccgacagcagagcaggagcgtcacagcggtgccatcgacgagcaacccagccaggagaatcctcccgcccagacccaaattgaaaggtgccacacgcagcaaagattatggtgaaacgagggagctagttcttacctgtaaccaagcaatacagagcccagatgacccgacggcgatctcacccttcaaatcgttccccgcacgattaccccacggttccgttgagcaagagcgaggtagacaagggttgaagggtccccggggtcccatttatacactgctagtaagtccgattgagccgaatttgtcggaccacgcgcatggtgtttgcggcaatactattgcggggatgacactggccacacggtcc

SEQ ID NO: 1759 - DNA, 1245 bp, Zea Mays
ttcattttccttacattattgatagagatattacatatttccaacttgtccctaggtaattagagccaaacaatttaaccccgcagatgttatggtctcacaactttgctttgcaccgatgcaagcttcatgatgatgccactgccacctacagttctcgctagaactccacccaagttttgaggtacaaagctagatgttgtcaactcatggttttgatgctcaaacaattaaatcaatcatgggtagggtactccatatgctctccccacaatcttgaaatgtgtcacctcaagtccttgaccgccaaatcactaagtcctctagcgcttcaattttacttgatcaaccgccatcttgattcgatcaacataatgtacttctccatgtcctcttgcactcatcgatgaccctaggtgtcagccactcatgattggtcctctagcttttctggactcttagttatagcctgatgttcgtccttcactactctgagtccaccgacacaaactcgcatgaccttcatctttgtcgttgaccatcacctatgtgctctacatatgcagaccataagccaagataaatgttgcataacaccacactaaggccatagttaatccacaaagtaaaccaaagtcgatcatcttcatgacaattactcagcatacttaacattgtgatcacatatcaaacatgtgtttgtaagaactcacaaaaaatacttgatttagacttatctaaaaggaaaagtccaaattacacccctcacctatggacaatgttcacataaccccctaaagtatttttagtttattttcccctccactcctttgagttggttcaatttatccttaacaaaatttatcatgttaatttctttatgtgcaaattgagtttttagttcaaaatttgttggttagtagctagtagcataattcagcttagaaaaatatattatgattttgtatgattattttgataggttagggattaaataagataaaaactttaatggtacaaaactaaatatgaaataacaaataacgatgaaaaattcttaaactattttttctaacatagattatgatgtctttagtcacttcaaaaaatatgaacttgaaatttaacttgtacatagagaaacgaaaaagacaaagcttctcctaataatatttgtgtttttcatttctccatgtacatgttgaatttcaagttcatattttttgagttgattgagaacatcat

SEQ ID NO: 1760 - DNA, 1254 bp, Zea Mays
taatcagatacttctagttggtttgagagggattgtatcagttctcttctttttttgtcctttctatttcccatatcatgttaatgcctgattgttttgatgtactcggttcattaaattaaaggaatttaggttcaaagaacattcgttaagcagtggccatattagttatgcattgagcttctttgttcaataaactacataatacaccaactgtaaagtacacagctaaattaggtaaccatagatgtacatacatagaagcataaacatacaattacatgtacacacatagagagtgtatgtctcagattttttcccctagagataacataagagattagtgccactatatttcctatatacaaacatatctggatatatacacatatatatattgtctatatcgattgtctagtacgaataacatacaagaagcaaagtaagtatcttcgtacaatcataaataaacatcgctttatttcaattcatttcaattccacatgttcccataattatatagctatgtactcttcttttagcaaaaaaagtagtgttcatttggcccagaccacatttttttaatcctaaacattttagatttgccatacgtgcaatcgatcttatatgacgtacataaacatttacacacaacacttttaaaaataagagagatcattctagattttttttggtttgtttgaaatatggccaatccatatcaatcttgtgtacaagactatcctatgtttcatatagaaggaagaatctttgagagggcagatagagggatttaggctatcttcaacaacttttttattttcaatttcaatttgtaaatagtgttatgtacagtgttatttacattgacgtgtgtccctgttttacactaaaaaacagccttattaaatagaaacaccgcattgggttgcaagctcacatgcgagtcgggaagaggcctactggtcagcgacacagcgccatcagacaggatttggcagtggagaacgtgtgaaaacaaagaccgacacgcgaggtcaaagtcgtcgtctcgctcgaggccgaccaccaccaccttgtttttacccagcccacattattaattaacggaacgtacagtaccagtctcacactctcactctcctctgttctgctctgctctgctggaggctggagctgcctctctcgtccccacttcttgcggcagcggggagcgggcagcagcgccggcgagtgacactactgtctactgcc

SEQ ID NO: 1761 - DNA, 1256 bp, Zea Mays
ctccacttcccgctcaggcggagacccgctgcttgtggcccatgacataagctatcgggtcgaacctgacgtgaagtcgtgcagcccctgcatttattgaggagaggacacgccgcctgccactgcgctgacgggcgacgtgccctctcagcatttaatgcgtcccgtcccatccgctggcaggcggcgtcaaggtcatccagcaggcagcgcgcctgctgggtctgctggcaaacagtgcgctcgtaccaagtggcgcgctatactcatcctctcttctacaagaagcttcccctgcacgccgaagatacgcagatctcgggcgttagggcacaagaagatggtctcggcaacagacattagtaggttccaagcactatattctttatgtccctggacccacatgtcggggtccagtccctttgtgcatgccccccttcagctataaaaggggaggcatgcgacgttacacacacacgcaatcttagatcacacctcagactctcaagctcatacaagctcacaagcaatacatcccacagtggagtagggtattacgctccggcggcccgaactactctaaatccttgtgtgttcttgcgttctttcccgttcattccaacgatcaagcaaaacgcctaagcccctcctcatctcaggatttagggcgggtgcactccgccacccggccggagatttactctccgacagtatacaacacaaacggtggccgacatcgaagataaaagtcatgcaagtttatgtcgatggactaggattggtgaaggatgaatgtcgagcttaaacgaggtgattggagaaactgaaagacaaaccattggtgactgatacctggggtcattgccaagtgtaatagtaaatgtaggagtacagcgtgctgacaaaatcaaagcgagaggttgatcaagtcaagcgaaggcattagaagacttggcgattcagaattaagaggcgacatatgttatggagagagcatagagagtatactactccagagtagtttggtggtttagaaacttgaggtgtcatatgtgaagatccaacgagcctcttctctctagcacatcgttttattttgtcattgtaggttttcccttcctcttgtttctattgagattcacagatgatttagacactgcactaattatttatctttgtaattcgactctgtaactgataaacgttatgggaatggaagaccttacctcttgtgagttgtttgttgacaaaaaaaa

SEQ ID NO: 1762 - DNA, 1256 bp, Zea Mays
cacatctagacccactctggccctcggacgcggctgttgacgtgccgtttgcgtttgcctcgcacgcctgtgtcttgagtctgaatgtgatcttcttctccctctggcaaggctgaggtagtatctgtagtggtaacatgccactccaatatattaaaaagggaagaacttacaggaaattacagggaaccgaatcgacttacaagactattgaaaaatactgaacaaacctactgagcagacctattagccagactagcactgaaacaaccaactaactctttgaccactaacgcgacctgctccgctgatctatgctggctatggaagattttattatttctttctaaccaaacgctccaccagaagtaaatcataaggccatcaaaagatcttctcaaatgcttgctgcacatactttttaatttcctccaccaatcatacaaggactcattgccatagacccccctaaaggacgaaaggttcgcccaagacaagattctgtcccacacctccctgctgaaggggcattccttgcataagtgaaccgtcgattcaaaggtcgaattacagaggcaacaagaaggattgcaatgccatccccttttctggaagttctctgctgtcaacactctgttgtgtaaaagagtccaagcgaagaagcgacactttggttcagttttagctttccaaatggaacaaattttcattgtgcagaaatttgttgagaactgaatgttatatgcgctgcttgcactgtactacccatcaatcgtccatctccaagagatggtatcctccaagttgttaagctcgtgcatgttactgatagcctgccaaagggttataaagtcttttatttcgtcttctcgtatgcatggccgacataactgaatccatctattggttctaagagcatgaaaaactgaaatgtttttcttccttactttcttgaacagacttggtgcaatattcttaggcgcctgaccatggatccaactcgatttccaaaaacttgttgttctcccattaccaacgttgaccaccgtggatgcactgaagaactcttcgtctattttgtcgcatggcgattgcaaatcgatccatgccttatctctgtccttccaacgcatccagagccatctgattcttaacgcccttgcaaagcgttccaggtccagaatgcccagacccccccttgttctttggctgacatgttgtagaccagttgatcaaacagtgacctccactacaag

SEQ ID NO: 1763 - DNA, 1264 bp, Zea Mays
ttaatactagagtatttaaacaaagtctaatagagaaattctccatagagaagcgagaatcagagcccattgccatctctacgcagtgcgtgcaggcatgctggcaccgtccgcttgttgggcgggcttgtggcgcgatcgcgatgctacgaactcgcaggcttcctggttgactgttgttggatgccgaacgaaattgcaacaggaaccggttctctatatatagaaaccaaacagcatccaacaacattccggtggacgcatgcttctactaatttctaatccattgcaatccgtagtgtgcggtagcctgtagccaccggtagtgtgacgttgatgtaccagtgccttgttgcagccttacccgtttgaccgccacacccttgtgccttggccatgacatggatggcgcccaagaccaatcgcttccatttgcctgctgcacccgtggccgtgacctaaatctgaatgactgtcgacaagctagagcagcctaaaataagggcatgtttggcttcatcggattctgataaaactgtgcagaattatctaataaagaaaacaaacagaactcattctggcaccaagtaatggttacctgtgctatacgctcggtggatccctgctaatgggagataatcgagaagaatctgagctctaagaatgcgccaagaaccaaacggcctctaaatatacctcctggagcctggaggagctgtaaaatcttggccatgcatctcatgaagtgatccctgagatgatagagatgaaaaggctgtctgacactaacacaagtggtcgttgtctcatccaccgagaggtaaagcaggaaaatcgcagaacgaagaaccagtacatcctcaggaagaccaaatctctgggcgatctgcgcgatgaggagctcaacggtgacacccgagcactcgcccacggtggcggacggaggcatctcactatctcaggcaggcgtgtcttcgccagaagaacgagacggggaaggagggcgagatcaccctgtctgtcagaccaccgatggcgggtccggcgtcgtgttgtcttgcggcggcaagggtcacacggcgcaggcacacaatggaagcagcggcgcggactgcgacggcacatggtggcgcgatggtcggagggaggatagacacttgaagcattttccttcaaggtctccaggaattagatgccgaggatggtgtggcggacggaggcatctccggcggccggcgggctttttttaggaaagcgcgaagcc

SEQ ID NO: 1764 - DNA, 1266 bp, Zea Mays
ggtggagagtgagtcctcctgtcaatctagtggtggtgtgatttctgtgggagggctaatgaactatgaagttatgacgagctgagatgtgatgtgagccaatatgagatcgtaggggcaccccctcagccttgtaaagacgaccagaagattgtccttttacaagtcgtgatgactataactctacctgaatcctccttgtagtgtggcatgcattcctgcttatccagagttcaattgcccttcatccgagtcatctccgggtatctagcacttctggtatgcacaacctccctactcgaggtatcagcacatgactcggtcatctggtctttgcctccctgggtcgagtgctcaacctccctacccgaggcattagcgcaagactcggtcgtctggtctttgcctcatcggtagagctcatccagcttggttgcggctcaagggcatgtcttgctaggcaagtcatcgggaggcccatcaagcggcctatggagcatttctgcgctcccacccgaggtcagtatcgggcgagtcgtgactgcttctcccgcccagagctagcttctggcgagtcgtgactactcctgcccgagaaagacagaagacatgaaaatggttgttcgtccatgaaaatgtgtgttatagctcaagggaggccaaaaacaaccttaccagcctctgaggactaagaagtgggcggtggaccaaatacccaaaattggcaatttgttcatagaaacgtgtgttgtagctaatgggaggcaaaaactgcttcaccgagctccagggtacaaaatgtgggtggcagaacggagacaaaaatgattgttcgactatgaaaacatgtgttatagctcaccggagtacaaaaatagtcttaccattctcagggaccaaaacatgggtggcagacgggagcacgaaatcatggttcgatgataaaaaacatgtgctatagctcatggatgaccaaaaatgccttaccgacctacagggactcaaacttatataggttgtagatcgaagacatgaaaatgacataaaaacatgtgctatagctcattggtggccaacaaaagccttaccatcctttagagaccaaaaacataggcgctggactagagacatgaaaatggttgttcgaccataaaatgtgtgctatacagctcacatcaagccaaaacagccttaccggccaatagagtcaaaaacataggtagtgaaccgaagacataaaaatggttgtttgaccatggaaacgtg

SEQ ID NO: 1765 - DNA, 1266 bp, Zea Mays
tttccataccatgtttgtttgtattgctacgactagcgcgaggtttcgaggatctgaagaatcaccctggtatctgaaatcttaagtgccaagcaagttgtgcccttggtccacttttgttacccaataatattctttattatcactattcaatgcataggtttaattttgatgggacccaatagatcaccctaatctgtttatccattttaccttattatccctaaaacacttgggtagtttttgctattgctttacatggttttgggataatatttcattatattcatgtttcaattattttgttattctgtttatgttcatgtcaagatcattaatgttaattggaacatggagcttaacttgagaaacacgtaccaccacaagggtggaatgggacgcccttggctgactaattaggaaagctagtggaagactaccttacccgaaaggggaaagggaagtaggggagttgcatgcaaggaggttctcgggttgattttgctgcgatggtggtcacacgagtgattcttgcaagtgctcttcccataactgtagcaggttttcggaagctagtagaactttgtaaaggcctcgtagtggatccctagccattcaccttggtagtgtctaagggtctagctaatcctggcgacatgggatacacgacttgtgggtacaaggtacaacctctgtagagtgtaaaactggtatactagccgagctcatggtcatgaacagctcaggactctcgcatgattaatttatgaaacttaaattcaatttgtcatatgcattgcatgagatttattattaattttgttctattattatttattatggtttggtatttacttacatttagtaactactaataaaatttgaccaacttattaaaagcaatgctctgctttaacccctattgttgatcagccttacacatcacatgaactcccacctttggtgagttcatgccacattattccccataacttgttgagcgatgaacatgtgtgagctcacccttgctgtctcacaccccccacaggagaagtacaggtggttcaagaggagccacacaacgaggagttcgatttgatctaggtggcgtctccccagttgactttctggcgccaagaacgatccttagttcgttttatatttataatttattttgtaagtcttccgatatgtaataaaaatctgattatatcgtgacatttatctctatacactctgttattatatatgttgtcttctttggcg

SEQ ID NO: 1766 - DNA, 1271 bp, Zea Mays
ctgctggagaatttcggtgtctgttgcgcggattgttgtctgcggaggtctgggtgcccgtgttcttccctccgtcgcaggctggtagcggttttggcctgcatgtttggggggaagaagcggttgcttcacctccgggctcttcgttgcctcattccgcgttttggagcggtttttctgtgcttttgtttaatttcctgtcgactagacggttcctttgttttgggtggagtgaatttaccgtgcaattcaactgttctttgcgctgaagaactgtaaacacccccccccccccccccccctctttgaaataataagcgttcaggggaggaaatttcccccaggagcaatcgggcggtttgtgccgtgctgtgctcatgccatggcattattctcgcaatgaagcaatggagaggcgtgtcctttttggccatttctgaccctgtgagctcatgcaaaagagcaagacaagatcggggcgagaaaatgtgtgcttgccactacctttattgttgatgtgcatatgttccttccctcctgagtcctgactcctgtcatggtcattgcgtaagtgcatcctgttgtttaataataccctttgctcctcactgttgtatgatgcctacctgattgtgacggtgatatttcggttaggtgtcacttggagtggggacttaggccctgtttgtttcctcctaggattatataatccagcttattaattacataagcaccttatgatctacttatggattatcataacctatgcatatagattatataatccatctaataatctatgttgtttgtttgccttttaacttatttaagctgtattatataatctagagggtaaacaaacagggccttaatcactagagacatcgacaagcagtctctttgaaaattattcagtttctgggtggaattctgatgttggacatttagaacacaaggagatatcagttttagtgcacccgcattccgagacagtgacaaaggggtttgtttgaaaattattcaggttttgggtgggattctggtgtgtgttgagggattaaagaggatatcatttctttctgcaacttaggccctgtttggaaacacctagtttttaagaaactgttttatagaaattgaggtcgttccaaacatactagtttatgactcagtttatagaaattagatgctcagtttttttaaaaaaccaataagctggcctcttctagcttaaagataaaaactggtttcttaaaaactgggttgcttcc

SEQ ID NO: 1767 - DNA, 1271 bp, Zea Mays
tgccgggggagacttcactcgtgacgcttcaggagagcgaatgggggatctgcctttaaaaaggggtcgatcccccgggcagtaggcatgcctcgctcctcttgcgaccaccgtgcccttctgccttccgggcctctagatggggtgcgtcagtggtggtgtcaccgatcttgtcttcttcctgccgccattggaggagtgcaaccccatgggggttggcatcctttcgccactattcagcttcaaggatttttatcatgcagctcggctgcagtcccccgcaggcggccacccaggaggatgaccaccaaccttgtggtggagagaagcaagccgggctgcggcttccctcctgccctcagcttcaaggatgttcatcatcttcgctggggcgggaggcgcgtcgagccagggttatgcctcccgcgtgggccagcggcccgcttcttcctccagcattcgggggaggagaggggttcaccagccatgtgaaggaggcgaactttggctatgcggggccggccaggtgcaggcgctgacagctgccgcgtgtctggctcttggcctgggtggccctgccgccgcctccgacgctgcctcctgccgtttggtcggggcatggctgtccgtccaccataagggcggcggtcgcgccatgcgcgggtccgccacatccacggcttctcccgcgccaccggccgtacagggggaccgtccaagacgtcgtacgctgcgggagtggtagcggcgttcttggatggtcttgtcctcactccgtgggaggacgagagcgaggacctcttgtgcggaggtggccgcggtcgtcggtgttgaggtggtggctgccgctagtgaggctgccccttgcagaggtggttgcctccgctgtcgggaccatcagggccacctgccgctgagtccctcggctctttggctttaatggcctcgctgctccccctccgtaggaagacgggggtgaggccctattcgtagcagcgcttgccctgaggcgatcgctgctgctgtctagtcgcccgaggcggaggtcgttgtcgatgctggtgcagaggtggttgctgtcgccggcgatccgttgatgcagaggtggtcgccgccgctggtgaggcagcccggagccagcttccagcgcgactcttgttggtgcagcgtagtccattcctgcagagatggagctgggtcccgtttgtaagggagtgtaataacacttgcttgagagcaaaatataataacatatgtatgcaggattttag

SEQ ID NO: 1768 - DNA, 1278 bp, Zea Mays
ctcccctggcccatcccggcgccgacgccccccaaaccctagccgccgcatggtacccctgcccagccgccgggcccaccggtcgggttccttcttcctcgcaaccaccctctccactcgcatgccgccaatcgtgttgagcccccacgacgcgcacaaggagccgcccagtccagtgcacgtcgagttcctctacggatcgagctctcctctaatggcgtcgttgctccgtcattggaactgctccctgggcgcggccgactttcttccccctgttagccgacccgctcccaaccccactttctgcgcgcgcccgagcccagttcggccgggacctcgctgtccgaatcgcggcaaggaggcctgcgcgcggctgagccctcctgtgcgcgcgagccctatagcttggctgaccggggcccccttgctgcgcgcgcgccctaccgagccgtggccatggcgtccagccaggaaccgcccctgcccatgcgttcctccggtgaagtgcccccttgccgacagccatgcttctcccccactcgccatggccacctgctactctgcgtcctaccgttctgtgcagcagggcagcaggagagtagaccctccccctgcagctgttggtcgtgctctctccgtgtaatcaaatcaaccatggatgacccctttctcctggtcgtgcttttggctgaagaaagaagagaaatgcccatagccacactgatcccatccttccgggatctgttgtggtcttgcttcttgtgaccctttgtgcggccacttcgtcaccagtgagatgcactacatcatcggtaatctgcgattaagtaattattccatgccttttgctttaattactcgtttcaatctgttttaagtgcattggatttgcaacgacgttgtcctcgtgttactaatactatttcatcatttcacatgttttaggtattttattaaatatttatttaactaaggttttaatattgttttccccattgaagctgatttaccgtttttaacccgcgcacgactcgcctgtgctgttctcgcctcgccgttcgagcgagacgcgattcgcgcgctttaataaaattggctcaccactcacgtagaaaaagtgttgtgcaggattggttgcagccacgattttgtggtactccttgtggtttcggcttagccaactaaaatacgctacctcatcttaaatacgtgaactagtaaatattgaatatattttacgtcgtagatccatttcgtcgcgttccagttgttttagat

SEQ ID NO: 1769 - DNA, 1292 bp, Zea Mays
gtagatgcctctggagtttttgtttgttaccactgctgtcataattttaaagttatgaaattattaagcagcgccgctgcagtttggtgggtgtagggagagatgtaacccgcggcggggtttgagttgtgcgtaggtgcggcgtcgcttatgggcctgattatgtgaaattggtgtactaagctgggtgtgaaaagcaggtggtggacttccggatcgtacttagggatttgcccgaacttccggtaaaggcaagtaaatacagtggtggttgctaccgtttggtttgcatcctattccctgtcattgagtatgcataagttttaattatgttaatcattgaattctatgatgaagtttatttgtttggaagtattaattctcaattgtctaatattgtggatgatcataatttggtaatgatatatgtggttgattcccatctggatgaagttgaagtgtctttttgaatcatgttatatgaagtgttgtaggcatgacatgcacatcgcatcatccatcttgcattttgaagttatgtcgtgatcttatggtccgaccgtaccggtacatttttagcatcgtacgttgcccgaggaggggtacgatgcggcttcatatccttagaggtatgaaggcagaagtcatccttgcatttgcagacatttgcactcatgaggaaatatatgaagtgtgacattactatgttactattgtggtttctacctgcgaggtgtggtaactaggtgcgttgtacgttgtatacgtgctgcaccttcgtaataagaaggttgtggaatcaagtggtggtaaaacaatgttcttatgtggttaaactgtttgatattattttacttgctgagatgtgtcatctcactcttgcattactcaatgcaggtacttgatacatgttgggaatgaggggagtagcagcacgtccactttcactctcacaataacactgcccaggcgcagccatgatttaattagaaactttttgtcaaaggaagtttgtttatttttttatatggtcgtgcgcactggttaattcagttcaggtcgtatgtttatctttccttgctggccgagtaataatacttagtatgttttagtcatgatatatgtttatactctgttgctccctcttttatgcaatcttgcaaaggggatgctgccgaaattttatatatggacgtcggaagtgtagtacagtagcattccgggttgtttgtggaaccatggagtgttacagtacaaatagaaatgcagaaggagaatccacttgtcatgct

SEQ ID NO: 1770 - DNA, 1293 bp, Zea Mays
tgtgtgttgcgatgatacacaaataaaaacgaacaatatatattctttgccaaccatcaatacagaaccaaacttaaaatattttaaaaattagattaaaaacttaattataaaagcattgattatgttgcattctgttgaacatgtttgcgcagtaatcaggggtgggccattttgtatacatgttttcaagaaaagtaatagataaaaatcagcacattgtcggtggttttgccaatttgggcctcggcagcgtctctatttgttgctccaacagcctcaacctccggtgcatgttgtctagcctccgccgcatggactaatctgtcaaaacacatggcaaactacaaataaaatcattcgatgttgtgcaccccatgttgtcatagcggttactcatcttatcatcggggcaatgtcatccatagagacctgaagaggagcaacataagggggaaaacattgctgccatcatgtacaaacacaaaaacaacattgatgtcatcaagccaagcccaccaaatcttcttaatatattttagaagaaaatagtcttgtttgtgttgtgccaatggacatcagcatcattagtgtttatccttcgacacttcctagtcccagtgttgtaggccttaaatgttttgtggaagaaatgtgatacacttccattttgcttaacacctaaaatgaatagagatgactcctgagtgttgaaaaacaagtggagtaccaaagaaagagtgttccaactagaatgtgaagtgtcaatttcaaagaaggcatcaacaattcaagagttgtacatgtcgtcaattgttgcacagcgacatggtgaaaaacaaaacgaaaactaaaataagtaattttccctacctgaagttttcctaggctaaatgcaggccatagggtgtgatcaacaaacactaccggaatttggctctttgccgagtgccatattctttgccgagtgttttatttcgggcactcggcaaagagctctttgccgagtgccacgcaaaaaaccctcggtaaaagaaaacactcggcgaagaagctctttgccgagtgttttatttttaacactctgcaaagaatttctttgccgagtgtctttttttgacactcggcaaagggctctttgccgagtgtcataaatacaacactcggcaaagagctctttgccgagtgttttttctccaacactgggcaaagacaatttaaaaatcacattttaaagtagtaaattaattcaaatgaaaaaattttcaactacaaatttgtataactcatcat

SEQ ID NO: 1771 - DNA, 1296 bp, Zea Mays
attcaaagccttaaatatgaaagtcaaggtcgatgatgacaagaactttaagcttagcgaaacactgaaaactcttcgggacagatgctcagctttgcgacgcaatgttcctctcggttgaagggcattttcaattctgttggagctacatccgaggaagttagtcattctactgaagatatttgtaacactccaggttccacaaacaacccggtatgctactgtactacacttccgacgtccatatataaaatttcggcagcatcccctttgcaagattgcataaaagagggagcaacaaggtataaacatatatcatgactaaaacatactaagtattattactcggctaacaaggaaagataaacatacgacctgaactgaattaaccagtgcgcatgaccatataaaaaaataaacaaacttcctttgacaataagtttctaattaaatcatggctgcgcctgggcagcgttattgtgagagtgaaagtggacgtgctgctactcccctcattcccaacatgtatcaagtacctgcattgagtaatgcaagagtgagatgacacatctcagcaagtaaaataatatcaaacagtttaaccacataagaacattgttttaccaccacttaattccacaaccttcttattacgaaggtgcagcacgtatacaacgtacaacgcacctagttaccacacctcgtaggtagaaaccacaatagtaacatagtaatgtcacacttcatatattcctcatgagtgcaaatgtctgcaaatgcaaggatgacttctgccttcatacctctaaggatatgaagccgcatcgtacccctcctcgggcaacgtacgatgctaaaaatgtaccggtacggtcggaccataagatcacgacataacttcaaaatgcaagatggatgatgcgatgtgcatgtcatgcctacaacacttcatataacatgattcaaaaagacacttcaacttcatccagatgggaatcaaccacatatatcattaccaaattatgatcatccacaatattagacaattgagaattaatacttccaaacaaataaacttcatcatagaattcaatgattaacataattaaaacttatgcatactcaataacagggaataggatgcaaaccaaacggtagcaaccaccactatatttacttgcctttaccggaagttcgggcaaatccctaagtacgatccggaagtccaccacctgtttttgacacccaacttagtacaccaatttcacataatcaggctcataagcgacgccgcac

SEQ ID NO: 1772 - DNA, 1302 bp, Zea Mays
cagtccgattcggaagacgatcacctcggatcgtcaccgccgcccgagttcttacagccaaaaacgcccctctctctgtctacgaacaacccatatatagtggagtcacgatacatagtcataggcctaattcacccacttagggcctgtgcagctcctcttgttgggccttgtggtccgcaggccgcgcctgagctgctggaacagcgtcgccctcgcctcctgctggtgattctcctgcgccccccttgagtagctttacctatgccatcctgaataccagcgtcgttaacatctcctcctcctttagagacagcttgtccccaagctggcgcccttggaaattgctccttgatccagtgctcatcttcccagatggccacagatggcggccaactagtccaacgtaccagcagttgaggtacctccttgcctgctcttcgttgcagtcgtgagtccataacctcttcagggatctggtagtcttgagtcagagctggtaaaaacgagctgacaataacattagcaggaacaaatgacttcaattgagatacgtgaaagacagggtgcacattgcttccttcaggtaaagcgacttcatacgctaccgagttaaccttcctgaccatgcttaaggggccaaagaatttaaacgccagtttgcggttcactatctcggctgctgacgactggcagtatggctggagcttcacatacactcgatcacccacactgaaggaccgttccatccttcctttgccagcctcgcgtttcatccgaacttgagccctctgcaaatgcatctgtacctgttgtaacatctgttgtcgagtatgcaacaggtcctgcaactcagggctagagcagtggtcaggagaagtgatctcagctacattatccagtgggcaagcaaccaattcagaattatacaattcatcacttcgcctcttaacaaaaaaatgatttccacgatgactaggtgttgtatcaacgccatacacacaaggtgtcaaaacagcaagttccttgttttgttttgatatgtccaggtagaatataaaccttgtatttttgcttccagattcaacaaacaaatatctcttgctttcgaaagcttgaaggcctgaccgaagtatactctccgttgtaatgtaaatgaggtggtcgtcaccagcccactcaatgtcagaagtaatttccttaagtagcagcaccttgaattcagaataaaatttggttcctccagactcccagttacagtttggaactatatactcactccacatgatacctccatcatca

SEQ ID NO: 1773 - DNA, 1305 bp, Zea Mays
cgagcatgaaacacaggatttgttgtgagataagtggcccctaaattatcacaccataaccttgctgcaggtggcgttggaacttttagttccttaagaagtgattgcacctagataacttctgctgttgcattggctagagctttatattcagcttatgtacttgaccttgacacagtggcttgtttttttgcactccatgatacaagattactgccaacgaaaattgcaaatcctcctgttgatcttctatcatcaatgtctcctgcacagtctacgtcagagaaggcactcacaagcatagatcggcacttgtttatgctcatgccaatatcacacgtgagttttacatatctaagaatccttttgactgcagaccagtgagctgtagtaggacaatgtagaaactgacagactctgttaattgcaaaagaaatatctggccgagttaaggtcaagtactgtaatgccccaactacacttctatatcgtgtagcatcttcaggtccaagaggttcaccttccttaatgcttaatttttcagcaaccgatagaggtgtagccatgggtttgcattgagtcatgccaacccgtttaagaatatctgaagcatatttactttgtgataaatgaataccatcacgtaccttattcacctctatgccaaggaagtaatgtaatgtacctaaatcctttagggcgaaatctgacttgagatccttcagcaatgctgacactgcttctgaggaagagctgactactataatgtcatctacataaaccaacaagaagatgctaacattgcctttattaaatatgaacaatgaagtgtcggccttagaggggcagaaaccaagttgctgcagtttatcactcaactttgagtaccaagctctgggggggctgtttcagaccatatattgctttatccaacttgcatacatgatgtgggaatttactatcttcataacctcgtggttgtctcatgtagacatcttcctcaagaacaccatgaagaaacacgttttttacatctagctgcctaagacaccagcctctagacactgctatagaaagcaccactctgatagtagcagctttgacaacggggctaaaagtatcctcataatctatcccatatctatgtttaaatccctttgctaccaatcgagccttatatctgtctatgctgccatctgcctttcttttaattttgtatacccatttgcaatcgataagattttttccttcctgtgctggtactaaatgccatgttttgttatcttgcaaggcactaaattcctc

SEQ ID NO: 1774 - DNA, 1318 bp, Zea Mays
cttgtggccgcgcttcctttttcctcgcacagccagacaccgctcggctctctggtgcccagccgagctccccatggtgcgccctccctgcatccatggccactgcacagctccctgctcatccctcctccagccgtgcgcatccagattctcctccacgcacccctacttccatgctggcgaactctctctctctccggcgtcgcgcccctccccctcccctctgctcgctcgcgcccggccggagctccctggctcaccggtgtttctccctgtgcgccgcggcttccctttccccgagctccctcagccatggcgcgcccctctccctgagttccttccctagccgcgcgctctggagcacccctgcgcgcaggggcgggccccactaaattcaatggtattcaagtgaagagttttttttgctattatagtactcttattaacatgtttctttcttatggtactctaaatataaccttctctataatagtatttataagtgttattgctctctaaaatagtattctaacctgttttctaattatttccttttcctcacctaataatctgaccgtattgcccccggttcccaatttgcatctgttggttcgtttcttcagagagtactgtccggtttgttcacagaataagagcagatccctgcacgccaaatcaagcagcggtgagaaccctgcgagcaacctgaacatgaggcagatctcttgcaagcaatctgagaagcctctgtatccagcagagtactgtccgatataaagagaaaaatgacccaagagcaatgctaatgctaaaactacttggcctcatgcctctgtacccagcagaataaacgtaattggcctcatgcctctgtaaaaggagaaagaatgaacctgacaatgtacaatatcctttcaaattatcatttcaaaggagaaagaatgaccccatagaaaacaatggcttacagttccaagacatctgcatatgtaaaagacaatttcactaacagtttattgctgcactaacatctttctctaagtgtctttaaaaagtcaatttcacaactttctcttcgcctttcttggagtcatctttcttggagctgttgtcgtagtctctaaagcctgcgaagaagaagcctcatgtgttgtcacctctcccatcaaaattccaagacgtctgcatatgtaaccatatatttatcaaaattcacttgttttcaacacaatgtatgcatggtgacaaacatgaaatatgtaccttcttgtcattattccaggactctcttgcattagttgttctcttgtagtttctg

SEQ ID NO: 1775 - DNA, 1323 bp, Zea Mays
cttcatctcagatcttgctcgtcacgtatctcctctcaatgtatggacgcttggacgtcgtcctcctccattcggacttcagcggggacaccgtctctatagtttttccccagacgtcaccagctgcttccacaccacgacatctctgttccattagtccaccctggacgttgccattgtcaagccatcgtcttcgaccttgctgtgcaggccgttgtgctgtctctgccggtctgctcgtcgtggcatggtcgtggaacctcctcagcgtcgtgcgcgtactccctctgcaccgagcacccactacaactcaccggtgctgaatctgctctcgcctggacgtcgtcgtctctgacttcagcagcagcagccccgcgatctccacatcacgtgtgcgatccgatctgcgcagccctaatgtgtcgacgtcgtctccattttgggcagccccggccacgacgtcgtccatctcggactccaagatacgcatcgggcgacactccagagtcagatcctgctacacagtaatcggttccaactcaatttgatggtccggatcccgcaaaaacttcctcaacatagagacatgaaataccgggtgtacccctgccatggaatccggcaattgcaagcgataagccaagctgccaacctgggccaagatacagaacggtccaatgtatctcaggctaagcttcccggagacactgatgaggacatcacttctatacatacaatgaatggactgataacacgatcgcgtgcacgacagctaaatctccaggtacgttctaccctagtcaattgtgtttaagagcttacacttggggccatggatgttttgatgattaggaacctttgagagaaccatcaaggacttgggaaaggccaaggtgttgaggaggagcagcaagggcacccacaacaggaaggagatcaagtccgactcggctggggtctaggaccagtctgcactaaaatgaacgcccaatatgcatccggactttgattgcgacaaacttgatattgttggaaagataaagagattatctaaccaacccaactggttccaccttaaaattcatccagagtcaacgggaatcgtcgaaacaattcagtgttcagattctgttttggtgctgtgacaccttctgttgggccattgggccgtgtatcgcgtcggagcccattaggggtgagtctaggggtcacgcatgccctaatactctatttattcagcagccaccgccacattagatttgggttttgcttagatcaattctgtcatcgaacagtgtcgccgtcatcggtttgtgagacccc

SEQ ID NO: 1776 - DNA, 1329 bp, Zea Mays
tataatttctcacatatagaattctttgtcttgcagaattatagaatatctggatagggtgagcgagttcatgaagtttgttgcatagcgatgtgctgagagcaaggagatcatatctttggaattggagctacacactaccggaatcgcgttctttgccgagtgtctaagacactcggcaaatgctattttacactcggcaaagcctttgccgagtgtaacactcggcaaagaacactcggcaaagatttcatcggcaaagggttctttgccgagtgtttttttcggacactcggcaaagactttgccgagtatcaaaaagcactcggcaaagaaaaacactcggcaaattaagaataaaaaaaattaaaaaaaacagcaaaacatttttttaaattctaggaacaactctccaatcctacctatcaccttatctgttgccctatcacttttcactattattttaaatcaaatttagatactttgtaaatggtgagattcgaactcgtaacctctctctcgcgcataccctcctataccactacactactacatcaattatgtcaatattacgttttcattccccatgtactataacaaatcgagagtaatttgattatttaaggcactaaatgagttcatttgaaaatatgaccaactataaagttgcataactttttgagatctacaagttttattttaatagtttctacatctgagaccgtttacaaaatttggattttaaatttgaaaacttcacacgaatttttcaatgataagatgatttcaaatcaaaaaattgtcaactacaaagtttcattatatttcaagacctacaacttttattttggtggtttttccatccgagacagtttgaaaaattcaaatttcaaaattcaaacatagttttgcataacaagatgatttcaaaccaaaacattgtcaattacaaagtttcataactcttcaatacctacaactttcatattggtggttttttctttcgaagtcgttttcaaaattcaaattttaaattttttaaattcagatgtagttttcgttgacaatatgacttcaaatgaaaaagttgtcaactataaacttctataacttctcaagatctacaaagtttatttttgttgtttggtcatttgttgatctcacatgatggttctaacaatatgcacaatttctatacgtctctcttctagtttcataaactctcgagagagatataggttttatgaacaaatttatttttattttgtcatatgaagaaatgttcaatatataaattgtacatcatgatgagttatacaaatttgtagt

SEQ ID NO: 1777 - DNA, 1334 bp, Zea Mays
cgcagggcggttgcatgctccttgcgcgagttacgcagggtcgggccccaatgccataggctgggtgccttggtgtgcattgggggagacctgcttgtgacgcttcggggcatgagcggggaaatctgcctttaaaaaggagttcaccccccgggcagtagccatgcctcgcttttcttgcattcaccgcacccttccgccttccgagcctctggatggggcgcgccggtgttcgctggggggatccacgtcagggtcaccccccagcggtctcaccgccggggagctcgcgctctttgtttcctgcgcggtggtgctgccgatcttgtcttcttcttgctgttgttggaggggcgcgacctcgtggggattggcgctcttctgccatcgctcagcttaaaggattttcatcatgcagccccgcatgagtctcccgccagtggtcatctacaaggacgaccaccagcctcgtggtggagagaagcgagccgggctgcggcctcccccctaccctcagcttcaaggatgttcatcatcctcgttggggtggaaggcgagctgagtcggggtcctgccttccgtatgggctggtgacccgcttcttcctccatcatttggaggagaaggatgttcaccatccttgcggaggaggcgaacctcggctacacggggccggccggctgcaggcgctgtcagctgccgcgtgtctggctccttggcctggatggctttggtgccgcctccaatgctgcctcccgccgtcaagtggggcatggttgtccgtccaccgcacgggcgacggtcgcgccgtgcgcaggtctgccgtcgccgctaagccactagtgtagaggtggccgctgtcgtcggtgctgaggtggtcgcatccactggcgggggctgcccgttgccgaggtggtcgctgccgctggtgaggctgcccagtgcagaggtggttgcctccgctggcaagaccaccagcgccacctgcggccgagcctccaactctttggctttaatggcctcgttgtcgcccccgtaggaggatgggggcgaggacctcttcgcaatggcgcgcgcatcgaggcgccatcaccgctatcacgccgtcttggaggattccgcaaagacagcggccacgaacttccaacgcgactccactggcgtctggtagtttatacctgtagagtagagatggaactaggattccgcttgaagacggatgtaatacttttactttttgtaaggtacttttgagtactacttatcaagcagtgttagcacttatctgtgtaccgtctgttcttgttgtgtgtgatgttgttgactcctccctg

SEQ ID NO: 1778 - DNA, 1336 bp, Zea Mays
tttcaattgacctaattgaggtgtaccttctccttcaaaaatctaactcaaagagtctccgagaagcaactaaaagtaactatctggtgcgtgttacgctctcttgtcgacgaatgtgcgcacactgccttgtgaactggttaactggcaatgaattagtcaccaactgcagttgttcgcccgttctccatcttaaactacagtctacaagctggtagtctgatacatgatgtttaggtattgtcgtactgtattactagcgttttggtggtaggtgggtatatgtacctagcggtggagaagctatgtacagtttatgtggtgcatatgtatcttaaaaaaatactcactccgtttcgttttacaagttgtttccgacagcttcgtgtagattaaggaacctatgaattgacgattttgccctcaacacgtctcagcttatgtctcagcattttgccgaacctcgtgcagatactgctccagcgggtaaacactcacaatggggaaaatggtagtttactttttccttcaactagagcgacaactattatgactcattttattttgcactaatggcgatataaaactaactataataaataaaatttttatcttatgacgtctatgcacacacaagaccgtcacacctcccttaaatttgctcaagcttcaccagtgaccagtgtaacgtagcacggcaaaagattttgtgttgctagcactgtctactagactctacactgtggttaagcttagctccatttataacggaagaatgcagcatcgttgccgtagttgccgctagttcagcaccttatgtatcgagtttcctgatgatgttgtacgtagggtgcatgttctattaggggaggcatgaacatgacgtgttaaccaaccagagaacccgtcaaagaagttcctagctaatcctgcagctagcgtcacccttagcgcatggttttatatatttgcctagcattcgttccattcgctgcaccccgtcctgtctatctctgtcatgtgctagctgtgcatgaccggttccgcactactactatactataccacgcttacttttactacttgggaacaagtgaaacaaggaagcagtctaggtgcgggcattagcgcgtgattaaaaaagaagattttgagatgtgtggcatccatgcacatccacatcgaccagctttccttttcattcacagctagcaacgtacattcaatcaaactcaaggatctcatctcatgttacattttcaatgccttactgtaactctgagccacagcccacagccaccacgcctcacacatcttgatccttttcttctctggc

SEQ ID NO: 1779 - DNA, 1340 bp, Zea Mays
ttcgtttaaagtttctcgatgtttgggttagaacccgtggtcgtccttgttgtacttagtcatttgttggcgtctagtattttctcacaagtgttatagtgcctcgtcattgtgcttatttctttattgtgtgtaatatgttgtgttattcttccttatgtttatacatgtgcattatgcatctcattaggtacgctagtgaactacgtgatgtggaggaccaaagatgagtcgaccacaagatgctgttaagcgtgggctactctgcaagatgatgtcgtcagtcgggccaacctgaagatggataaatcaagcaagtgcccacctgagagagaggatcggcaagcaagtctcgtctaacaaacactaacctagtgttatcccaggcaagccccggtgcatttgccacctccttgttgttttaaaacttttatcacttatatgctgcattaggttataggagttgagtgatgaaacaattgatgcattaccattccttggaatttgattatcctccttgctacctgttttataaagagaactaatgaggcttagccctgcctagagaattaaaacttgtttctgtttaaaagaatgttgtgtaacactgggtatgggtttgttttatgaaaaaggacttgtaatggtgagagcatcatctgcagtgatgaattcatcattcaagtgttgtacctctgtcaggtacatggttttgggtgataaataataagatgagaccagacgttgagcaggaaaggtcgcccgtctgtgtcgattaaggaccgcaccgaaagtaggcttgctgatctaggaccctttaactggccacatgcctcgtcatgggtaagcttagcctcggctggaccaataccagaaaggctggcctgcaatgggagtggagagatggcgagagtatcgtgtatccacctggcaagaggctggatggtggggtactgagctctcggttggcggggacccgttctggtcttgagaaacccgtgggcgagttgacatatgcaagggttaagtgctacatatgtcgtgtggttggagatcctcagctgagtattaatggattcggatcgccgttacttctcggatatgaagactggatcactgccctgcatcgtagttaacaagcgaaactaaagctgttaaaatgaagctagagtaggacaagtgaatgctctagattaggcaaatctagattaaggcaaagtacttaacttgtgaagtaaaattttggcataaggatacactactagtaagcttttctgcaaaaatgagtcttgaaacttgatgagccttaccttgaatctttttaaatccagcataccctt

SEQ ID NO: 1780 - DNA, 1342 bp, Zea Mays
ggaaacaagacaagcattgttcagtttgttgcagttcgcctgttctctagcaatcccttaagagttaagactacggtgaatcaatttgagtgatggatactacgctacacactcaacagcaggaccgcctcggaatgtgaggctccttgcataattcagttcatggtgatgtcaaggtcacgtttgttcttcttctaaattatataaactggattatgatagaaagtacgagagtaaaatattattttattatcataaataagttaaaataaggtaaccaatgctaatttactttagcttatttgtggtcttaaagtaatattttatcctcctactctttcactataatacatcacttcctcgatattaccgccaaacaccggctccaggatctcttttttcaccagcgtcagtacaccatcgacatccaggagcgggctaacatgtccgactgcaagcactgctccacgcctgtcgacactcaggcgaagctctctgaggacaacggcccccggtcaccgacgcggcgtcctactggagcctgaccggcgcgctccagtacctcaccttctccagacccggcatcgcctacacagtccagcaggtgtgcctgcatatgcacaccctatgggagccccatctcaacgctctcaagcgagtcctgcgctacctccccggctccctcgactacgacctcctacttcgaccatccccgacgtcgaagctcgtggtctacactggcgttgactgggctggctgtcccgacacaagccggtccacttctagttatgtcgtgttcctaggcgccaacctcgtctcctgcgccgccaagcgacagcccgtcatctcccgctccagcgcagaggccgagaaccgtgttgtgcccaacgacgtggtggaggcatcctggatgcgccagctactccacgagctccacagccccttcagtgcgccaccatcgtatactgcaacaacgtctgcgctgtctacctcatcacgaatctcgtgtagcatcagcgcacgaatcatgtggagattgacctgcacttcgtccgcaagtgtgtcgcttcaggtgacgttcgggttctcagcgcccccaccacgctgcagtttgtcgacatcttcactaaggggttgtcgtcgagtgtatttttagactttcgatccaatctcaacatttgtacaagatatagttgtgactgcggggggtgttagaatacccgtaaagggtttggtgctttccccgtgtaattaccctctcacccctgtataatgggcctggcccagttaactcaagtctattaatacaacacccaaccctaatccagggttagggtttccc

SEQ ID NO: 1781 - DNA, 1349 bp, Zea Mays
ccgtcgtgcatgtgagacgaaaatgaagcccaacccaacctcggtgacggcgacacgtgccaagccgcgtccccgccccccatctccggtgcttgccgaggcggcgctggagaccggccagagcacgggctgcggcgtcccaccttcgaactgaccctcttcaagtttcctaccaccaacgcggcctgcgccccccaattggcctggcctgctagctccgactccaatgcaggtagcacctgtacctcgaaccatgctttccacatggagattctctggcgtgcgccgcgttctctttgtcccgctgcaggggccgtcgtcgcggcacggcgcgcgtcgcgtggctcacacggtcacgcggttggtggcccgcgcatgggggaaggggaaggcaggcaagtggcagcagggtgctgttcctatcggcgaggagattcgtcgtgcgttttgcggctgtgcagatgaggatcaggcgaatcgcacgaacaatcatgggattgtcgtttcacctcatacgcaagggttcactatacgtaagcgaatcgcacggatgatcatggcctcgtgttcttgctgttctacccacgtgattcgtgacgggattctcgatcggatacaatcacgggtaggcgtgttgcgtagtaccatacatgctttacaatttttctttggctcaagtacctaatcgagagattcgattaagaaatagtagcagagaaaacatgccacactgctctagacacttgtgttttgctacggcttcagggaggcgatgagggtaacaaacaacaatgggcattggttaagaataaggtagaacttacctggtggaaatatcattccaatattgtttagaaagccaatccaagtttttccagggaagaggacctacatgatgccatctctttaatactaataatgtccagtccaagtcacgagtcattgcaacatcaactctgggaggaattaaatatttgattgaacattggagactgattgccttggaccttagcttgctaagcatgttagcaggaatctaccaagtgcagcaacttggtagtcattttgttttcagtaggtaggcagataggtcatgcaagtgactttaacaaagttttttttttgttggttaccatccctttctgcttatttgtagccgttgaaaacttgaatctttttctgctgtctggctaggacatcttttagtttcaggtacagcccagtattctgaaagagaaatcagttgaccatccattgccgcccttgtatcgtgatgtgctgcttcggtaaccaaacctgatttttcttgttgttccatgtgctaggatgaaaacgaactattcgccaca

SEQ ID NO: 1782 - DNA, 1362 bp, Zea Mays
cctcatcatcgtctctttggcctttcagtttaacgtttgaaaaatgcataatttacattacatagcaaacaattcagcttcgaggatgccaagacctgcactataattttatgcagatgcttacaacgctgacattctcgttcccaagtcgttaattcagacaaaatcatgctctgagaaataaaagtttaccaaacatctagataaacccagtgaattcggtatatggtccttcaatttctactgtcttacacgaatcatgttattttcaaaatatcaaattgtgaaaattatcagtatatgtgcaaatatagaaggggtaccgaactagtcaaaactctctagttccaagtgtcttcagttgttgcattctgtattgccaggaggaagacttttgctatcgacaataactagtcaagtcaacatgcttggactttgcaggcgcagctccggcacaaaccttagtgaaaagaatatatacacagtgctgccggtaattttccccccatcacaatgttttgcaagattcagcaatactagccattctgagtacctcattgaaagatttcttctgtgtacctgttctaaaccaaaataaagctcttagcaggagcttcagactgttgcaactataaaacatcaaggcaatggagacagtaacggttaaggattttcgaaacaagactgccgggttcaggaactagagcagatgtgatgccattccaaaaatggaaagtggtagagtcattcacgatcctagaaaagattgcatcatgatgtgctttttggaccatgttatcgggctctgagaaatatctgcagtacaacaacatcaaggtgagtatgaatatcttgaatccgcaagtagtactacctccgttcacaaatatatgataccattgatttttttcgagaactttaaccactcgtcttattcaaaatatttattcaaaaaatgtaaaatcttaagtcaagcacatactaccttaagtgataaaaaaatcaaaaaaattgtgataactcattaatttcttgaataagatgagtagtcaattttttaaaaaataaaagtcaatgctgtcatatatttatgaatggagggagtactcagctttcaatcaaacacatatgaagaggtacatataagaaataaatataaggaaccgagagggctctaagggctaaggccctgtttaaatacactagaactaatagttcaatgctaaaattagctggagacattcaaacaccctgactaatagttcatctattagctacttttagctctagacattcaaacaccctgtctaatagttcatctattagctacttttagctctagacatccaaacacctccagct

SEQ ID NO: 1783 - DNA, 1365 bp, Zea Mays
tagccattataattagttttagaaaggactattcaccccccctctagtccgccatctcgaccctacactcttcaaacatgacaaacatataatgttagagaaatggtttagcatttctcctgtatggtctatgctctaggcaatatgataagctattgagtggaatatctcattctatattggtagatatttatttacttattcacaattaaacatataatggtctgtagtaagagtgcatgatcctaggctacgcaagggttgttcagaaatcttctgtgccttttctttttagagaactagatttgttttcccttctatatagttgattgaagcacatactgaaaaaagggagactcggtgtcaggagacctatattccgttagcggaattttcatcatgtgtgctgctaatccaataccaagttgttccttgcaagagttcttccttgttattatttcttgcaagagggagactcggtgggtgggggtgtttttatggctgcaccttgttttcaagcatgctgcaatccctgtagtaactctgactaggatacgacattccattcctggcttgtacttgctaactaataagctaataaaaatgtgaacgaaaataatgtcatgttctgaactgtcacaaagagtgcatacgtcataactattttcagatagaatatttgtcgctccttagttcatttttgaactaatcggtgacaaataaaaaagaacggagggagtactaagttagtagaatgctggttcacaaatatatttattttgatgtcacaaatagaattgctctggtggaatagctattatatgtacttgtagtatcgctttacagttggatgaggcctcacgtgcttcttttggaatacttgattttccttttgtaggagactgctgatcatcttttgtacccaaacccaggatcaggattggttcatgaactacatctgcaatatttccattttcttggaagtctacttgggaagttgttggaggctatggtggatacaagacaagatgggctcttttcttagtatgaacaggtccgaccaactcaatatgcacatatacagagtatatcttaatagctgctaacatatcagccatagttagtagggcttactgaacatcaagttatgaaggaaagtataatgactttgtgcttggtcgaatcgacaaatgggaagcaaaaacaatgtagacctctagcaaatgtgctgcagtttttctgctaggtcgaattgcttgcgatgactttgtgaaactacagcttgtgtagcatggcaagagtataacatgtttcattgcattgtattttgtttagggagaaatttcccttggcacacgaattttg

SEQ ID NO: 1784 - DNA, 1372 bp, Zea Mays
tagaacccctcccccgtgagacccgcaccgccgcacgcgcatcacagggtacactccacctctccttcccacgctcactctccctgttacgacgtccgcgtccatcggcacctacgccacccgtctcccccgcgtctgcctgcgccaccatcgcgcggtctcggactctcggtgcctcgcgtcagcctgataaatgaaagcacacgctgtcgtctcagtctgataaccagacacaatacgccaatgcggcaacaatggaggtcctcccccaggcttggccgtgggccgcctgtccgcctctacaactctctctctctctctctctctctctggatcggcgacaacggggagaccctcggtcggcactcggcgaagggacactcgggtgtgtggagtgggccgtgggcgagcggcgagaaggggtacgacggcgccattgcaattgcgacggagggacagccgagataaatgtatatttgggactctaaacatagcgctttgcaatattgtcatccgaaagatttacgtcgcaaaaaaggattacaaacatcttctacttaattatactaccattttagagtattgtcttgcttttctaatctaatttcatgtattttgtccctgattagctatttttacccgtatgaaattatagggcacaactgaacttactactcgtctgcgctctccgcgctcataggatcaacagctggcagctggccaacaggaagccaattgcaacaccaggaagctagtatttgcaagttgcagcttgtatgcgtaggaactaaaaagctggtatttgtaacttgcaggatgcaaacaactcttaatgttcacgtaatactcatgaaacaccgggacgatgatacaacttccatggccggcgtgtccctgggctgggcttatgatgcggacgaggcgccactgtccagcattacatcgcccaacgcgatctcgcctaaagtggcggtcggcgcggccttggccagcgcgcacagggccgagctcgatggaagcccgacggacagtgcagcaggggtgagcctgagggcctggacagggtatagggtggtcgtggccaagacggtggccagtcgtccatggcggcgtggagacagaacgcgcacacaagataatttggtctccttaggtacaaaatacagggaaagaagtaataaaaggaagattatatagtaaatggtagtataatcaattataacatatttatagtctttttttttgcgaattaaatcttttggatagcaatattgcgaaacactatatttagagtcctaaatatacaattggctcgggacaggcgacaggtgactaggtgagacccagccgacctctggccattttcagctaa

SEQ ID NO: 1785 - DNA, 1387 bp, Zea Mays
catatgtttctatggaatgctctcacacgtcgggctccttattctacccagccaggctccctcacgcggacgcccagggccctctcaagtctcaacacactcgttgtctctagaatcctccccatgtctcctctctgctcgcctcattccccaacatcgatcccccacgcgctcgcgctctgcaccggctcccaggcacacgtcgacgacgcattctggcacgtgttttcttcctgattggattccccagcaccggtcagtctcgccttggcctcgggccattgcatcctaggccgagctcggccagttcaccagcgacctggccgtggcgctcgccctcctgctccggtctctccatcacgctcggctccagctggtcacgctcctcgcaccaaccccgactccaagtgctgccatgacctcgtcatggattcgaggcatcacatcgtcgctctgctgcataggcgcacgtgttgtcgcctccctgccgtcttcgcttgtgtgccaggtgggagttggccggaggttttgtattttattttccaatttcagattatagctgagacctagaaaatgacatagaaaattacagaaaaatgctaaatatgtaaaccaaatttgttgagttcaccaagatgagtactatctgataaaaatattcattaggcttgaacaacaacttttatgtttaggccttaattaaagttaacttactaacgcttattttagttataggaataaaaaaatatagctccaaaaatgctgaaactttgtaaataggtttattatgtctaaaatagtgctgggtaaaagttttaatgtatttggagctggtttgcctagagatccttgaaatagctaaaagaagaaatataaaaaaaccacacaagtagtgttaatatatgttgtaacggagttagaccctataaagtgttaggtagcaaatttagtgagccttagtatgtttagttctctggtttgtccaactaaattaagtttaagccttcagatcaaatgttaagtaaagtataagtataggtaagcttgtcatgtgcttagttagagatgtttatgttccccacctctcctttgtgagagtttgcatttcatatcataacataagcatacatgtatttgtaattgacttgtagaacacctagaagaagtggtgtttgaaggagtctactccaatgcctgcttatcaagtggatggatctatctaactaaaggttgggtagaaggattttgggatcttctcctgcaacaaggaaaagttttattcccttatctttaggttagttacttcatgtggaggacttgaagcttagaaggtttttatatatcttttatggaaaggcttcacccttccaattattgtaataagtta

SEQ ID NO: 1786 - DNA, 1401 bp, Zea Mays
ctgtcgacgcacatgatttcaacttcttcactcgctaggattggcatctcgtcggcgtgccctgctgcaacctgtcggcgtgtcctgctccagcgacctcgaactccaacccatggatcaaaggaaggtgcaacagccacaaaggagtcgtcgaaggtcgtcgctaaacactgccatagatgcaattcggcaagaatcaacaggtccccttgcagttggagttgctgaccgccctcaacttgcatctcggtcacagttcagcagtgacaattcatcttggaccgcgctcaatgttcggcaacattgatccctcttggatggcatctgattctagagtggttactacacgtcactactaagccaggatgttgcagatgattttgtctcagttgattatgtgcaagttgatattgaagttgtacaatcaccggggctgaatgaaatgagctcacattcaactaaaaggtgccgatccaaaaaattcagtgaagaggacacactattagtttcaggctatcttaatatgagtaaagaccctattattgaagagataaaaaagatggcacattttgggaaagagtatggaaatactttcacaagaataggacattcgagtgtgatagtaattggtcgtctttgaagcgttgttggggtataattcaaaaggaagtgaagatttttcaacattactatgacaccacagaaagaaaaaaaatgaaagtggaaaaactagtgatgacaagcttgctaaagcgaaagcgaaatttcgtgaagaccatcaaggaaagacattttttgtctttcacgtttggattattcttaggcatgagccaaagtggactttcaaagattcaaagctgaaagaccttcatgaggctaatagtaatggtcctgtcaatgttgacaaaccactagggaggaaagatgatgagcgagaaaacatgatggctgcgatatggtgatattctctttggagaagttaacaagatgagagaagaaaggcaagaaacaaataaataccggaaggttcgtgatgacaagttttatgagcttgagatgaccaaggttcaattggagcgagacccgcaggacaaggacattaagcaaacagacacaagcacaatggacgatgactccaaactatacttcaagatgatgaaacaaaatattttggctcagtgttttgggagtagttaggcaatagtacctgacttgggtttcaggaccagtattgtcaaataaaaacctttagtttgcagtctcgtgttctgggaataaaaacgtaagctaccttccctgggttgataggtggcttattttgctcaattgtaataggtcgaatcttgtttaatactttacactggtagtatccacagttcttgcttcatattgtaatagttc

SEQ ID NO: 1787 - DNA, 1408 bp, Zea Mays
cctgtaacaaactcgtcacgctgtaaccatctccacggaacccagagtccgttgctcgcagcctagaatcgaccttcgtagggctataaagccatataccgggcgccaccaattgtgcacccacctgacgacatcgtgccaccaccgagagaggacaatagagagggagagagagagcatggagctgtcgcggctattcttcctcggagatgcgaatgggttccagtgaagagggcatgagagtctacagggcacatggaagctacggctcccaccaatttgacgagcatggcttcagagccggggtaattgctcgccgtcgtcgtggagccatatcttgccgcgggcagtgtggtcatcgtctctgatttcggtaagaaacccttcctgcctgttcgccctgtcctcctttttgtgtagcataaactaggctcgcggttggtggtcgggaccatcggttggtcgcgcgatggccatggcaccgccgtcggggtttggacgccaccgtggatcggcgtcgggaggtggaaggggatccctggccatggaaccgtaagggtttagggatcctcgggtcagagtgtctataaagcttttcggacgagaaattcctatatcgcctttgtcccggaatctattgcgggttctctcatctagtgaaactttgtaaaagccttgcagtggatccctagtcattcaccttgtaagtgtctaagggtcttgcaaaccctggctaaacaggaaacacgtcttgtgggtaaagatgtgcaacctctgcagagtgtaaaactggtatatcatccgtgctcgcagtcaagagcgactcaggactctcacatgattaacttatagaattaaatttaatttggcatatgcattacattgtgggattattattaattgtgatcaattatttatttgggttggtatacacttgtacttagtaattgctaataaaagtttgaccaacttattaaaagcaatgctcaaccttaactatttttcttggtaagtcttacacttcacatgagcccccactttaagtgagctcatacacattattccctacaacttgttgagcgatcaacatatgtgagttcatccttattgtactcacacctaggtcaagaacaggtactacaagatggatcatgaaggatgctacaatgagttcggagaggtctagctcgtcttctcccagtcaactatggttgcagaggatcgttgtcgtcaatcgtcatatgatgtaattattttagctattttgtatagaacccctattttataataaatatgtgacattgatttctgtatcatgagtcatcatatgtgtgaaacttgatcctagcacacatttgattcgtgcccgggtttgcccttaaatccgggtgtgacagtatggtatgcc

SEQ ID NO: 1788 - DNA, 1409 bp, Zea Mays
cacacattatactccaaaaatactgttaaatcttgtttttgaggaccttcggaagccgaaggcccccaatacctactgaccagaaactaacgaaagaatagataatttcgtacatggtgatgatttgctcataaacctcttatgtgtaaaaaagggcagaatgatgctagattttccatctggcaaaagaactcaccttctcaagagaccaattcacatgtctatctttgtagataagatttatttgtatgttgattacccattgaactaaggcctatagtcctttttatgtcttctaatttacattcctgtgatgttgtggtgatgtagaacaagctacctcttatgaaagaattgagtacacctgatggcagaaccgcaccagctgaccctaccgccaccacttagtaattgttctcctattaataccatttttctattgttgcttgcttttttgtccatgtactctctaatagtttaattgaatgtaaatttataatcataacatataaagcgattagcaatgtgcatttaattctttttttactatttatcgctatgttccctaccaaacacattatttttgtaaccttttttactcaaagcacaatcaaagtagcgacgaaaatcatagtactccggtcttgtatataagcaaatgtgcaagaagcggacatgcacattgcaaataagcttttgtggtccatttggccagggtatttaacaggctccttcgaaactaaacataaaaaataccaaattcaaggatcatttactaaacaacactttctatggcagaagaaagcactttagacatgcaattagcatacaaaatgaattgcgtgagtcacgggaaggaactgacaccctaccgttgcagcacacagacacaaacagaatgaaccaagggaactttttttatttcttctttttgcatagaattcatgcagccatccttttttggaaattcacaattataaattacctgtgtccacaaggctgatcagctcaaagcatatgtacaggcaaatatgcaaaaaaatgcacctcccatatcaatcacagtagcatctagtataggatcatagatataagaaaagagaagaagcatccttactgagcaagagtcgaataaccgatccatgcacgccatgatttgcatgagttagtttctaatatacagtcaatagattaaactgggatcgagaacaaattaaacacaccatttaataacagagataggatttcctcaatgatactctatgacgcctgcctgtgtccttgcgttagaggcactactgtgtagaccatgtcgttgtttttgcaccacaccattggaggaaggtggctccttggtggtctgctttttttcaaaaataaaataattcacactcaggccacaacaaaga

SEQ ID NO: 1789 - DNA, 1410 bp, Zea Mays
caaagctaatgttttagaaacttgcttgtaaaccttgaatgttttgtcattctccttatacataaatgttttagttttaaagcattctcttagtttctagactgttcacgacctgtagtgataaaaaatgttgatagagcttgtttgaatctaattctgtgccaaacaaagcaccataggaatatatattgtaatataaccatgctcacgctaagcgaaggatcaatacaggcatgtcatatatataacttatatacgccaaaacacccttgtgacatggacatataactgcaactatgatttagtcttaaatatgagtgcatgaaaaacaaccatttatgtgtctgaattttagcttgtgacttctgttgagttttaactctagactatctcaacttacttgggtctaaaagactttattgttgttatatcaaaacagcttgtctggctccttgtttcttgttttctgtcctaatttgtttggacaaacttgaatattggcttttggctttctatgaaattcaacggctcttggaccgtactatggtaagttgacaatgttttatcttaaaaagatctataaataagagacaacattactacattggatatattattgttattggaagtaatgttaagcacagctaaaaaaactatgaattaccatggtctatgtttagggacggagttttatataaactgttgctctccatattgtatccctaatccctatagttttagctaaatgtgaagatcagctatccacatatagtttatatatgtttaaaagttattcttttttcatcagctatatgatgtattggttgcatttatctcttgtaacaaaagataccttcatacctattccaagcagtcataataaagtaaaactgaaataaatacagaagacttgggctacaaaataacctacaaattattatgcatgttattaggggctaaaacacaaatttagtgaggatatcatagttacatatctacaaagcagcattgatgcaaatgatttttgaataaatgatttccatccaaattgtagtgtcttgcccatatctttgcatttatttactgttgcacatagcagcaaccattcgtagaggttgcatgatgtgtatattggagaagcaaaatatggcgtagcactagcgaagcaaatctgcagattttcttggtagcagtgcagtggagaattgatgcagatgccagaatttacaggtttgcaaagcatggcaaaaacacgattcagagttcaattttgtccaatactttttgccaaaaaaggaggattattttgtcaagaatctatgctgctgcttctttccaacaatgccattggcaattcagaagtactagcaagatataaatgtaatgtacagtttgtaggaaagcaggaaa

SEQ ID NO: 1790 - DNA, 1416 bp, Zea Mays
gggactatctacaaaaatttggcgtagtgatatgtcctgtgcctaggctgctaacaaagaagggtacaagtaccacaatttactaggcacgtgtctactaataaaagtactaacacactgtgaatggattacccaaaaacgtgaacatatttgcaactcgatcttcgaatacatacacagcatgtaaagcagtaaaagggataaataaattgatgtgaacatcaccttcgtaggagtggagcttctgatgcaacagggaaaaacagctcactccccgaaatgtgaacatcaaatgtcacaggataatcgttagtaagcagttgtcaaattgtcttgattacagggggaagtattaaccacagacgtcgatgcaacctaaaccctaatcagtacatggggggtgaccggatccgtaacagcacatcagggaggagacagggtacacatggaagttacgaatgtacctgcgaagacgaggagttgggatacgggaggagtccaaccttgcagacgaactggcggcggcgcaggcaaaaccctagcgacgtcaacggttagggaggttttcgaaacgagccagccgggggaggacgacgagcggatacggaacggaatggaggaaatgatccgtgtacctgagaagacgacgaatgcggcagatgagcagaggggagtgtggtcgaggtccccgacccgatgcggcggaggaggcggcggcggtcgagggagagagctgagtcgcgagcgcggtggaaaccctatcgcgaatagcccgccttccagaggatgcgtgggtcgggcggcttttcgtttcctgtacgcgggcggcttctgtgggaagcgcgaccgtcaaaagctggtccagaagctagacgtttggccgcggcttcagcttctggcggccagaatccgcccagaatcccaaccaaacaggggcatactccctccgtttcgttttagttgtcgctggatagtgcaaaattgaactatcccgcgacaactaaaaaacgacaactaaaaagaaacggagggagtatataatttgaccagtgaagaatataattgatggtgcatgtcggcagctgtccatatgaccatacagccgctgcagttgatttgcttttgacagctggtatatatgaagtttagggtttggacttgttgagacttgagagatcccaaacatgtccttatacatcaattcaaagcactagagtaaattgagcttattcttgtttgcattggcccattaattcaagttacctattctcatcactgacacaatctttacttaaaaaaacaatctacttttatgtttcaccttttaaattttgaaattacataaacaggtttgaaacacaataattttaactactaatctctttttcgtagctcagattgtttgaataatacacc

SEQ ID NO: 1791 - DNA, 1428 bp, Zea Mays
gcatcatctcgcgtcctttgctcatggtaacacatggccgcgcgcgctttccgcgtgctcctttgcacgtggccgcgcgcgctttccgcgtgtggtgctcatggtcgtcgtgtcgcatgcagtcgtgccgtttcgcgcatcataaactcgcctcgcttagaatttctcgtgctaactatattacttatttatttgacagctgttagtgtagcaaattaaccaaaacttaatagcagttataatttaggtttgataatgttatgattaatatttgtttagcgtaaatgcgctaacttctcgaccgtagctccgattatcgcgtttcttttccttgcgtgaccataatagcgagctctattttgttttgtaaattttattatgtttttatttgaatggtgtaatattcttatgcatatacatatgtctattttttgtgcctgttggtattcgctatgtaacgcgaatagaatgcgatctgttttcgagcttcgaggaatgacgatcaagctttgacgaccaagtgaacgaactctttgagttctacgagatcgaagaccctgagcatctgtttggtgaaggcaagtgtcctctgacccattatatcccatttactttataattcactgtcccgcatactatgaacaacataaggattgactagctttctatttaccttgtccttgattaccttttgggttactatggttagcttcatgctagcgctttactttaatcaatgaacatgatgagatacaatgatgatattatggtttttttctggatatgatgatatacttgtgtcatttaaggggactcgagcggtttctcgagtgcctctccgtaaggacctgttcgttggatgaccgcccaggaaaacagtgcaaccatgagggtggaatgggacgcccttagctgaataattagaggaactggggtgtagttcgcttcgctgtcgtgcctgttgggggccttcgtcttccgaaggtcctcaaaaacatgattaacaatgtttcccaagcataatatatgtataggaaccttcggactcaggatgaagttgtacacaatatggaaagcaggatcggaacgaaggttgaaccagcgccgaagctacgcgcaaggatgcttcggctcagtagcagaaagaggaaccaacttaagaaggaaaaggctatctagtcctcgatagattgttattaagttaatagtgtcaatagtgaatatgaagggcatgaatgtaattttgcgcatgctgcgtcctgtgcctataaatagatgaacagtacccccatactgttcacgctgacttgtactcgctagtgcgtcacgcttgtatctttgccttctgtcaagccgaaggtacaaatgtaactcaatgtttttcttattcattcatgattatataataaaagatatattaacagtgtc

SEQ ID NO: 1792 - DNA, 1428 bp, Zea Mays
atttgttcaaggagaaaaacaaaaggagccatttaaacacatgggaaaagaacagacagaaaagactactcggtgactacacctcgactcagattgggaaaaaaacatgtgttttctgcataactatgtgttttctacattgtaaacaaaactccatccagtctgtaggaagggaaaaaaaaccgaatgcataactgctggcaggaacaaactttctgaaaaaggcaaacggactaggataccaatttcgtcgccaatactaatacatcgtcgaaaaaaacaatcagaacaaacagggacgacctgtcctcgacctcataggcgtattcattggttcattgtggttcagtctgatcatttctactccactttgacccttctatatataccttcagcgagacttgccttaatgaacaacacggacatctgttgtttcaccatccatccatcaccacgcaattgctgttggccgattcatggggacaaggcttctctattttgctcacgtgaagaaaaacttgccaccaaccaagcattttctcgtcagtattggtacaaggtatattttcgcgtgcactgtctatgaccatctgaccaaacgagatagccggctcagcgcgttgaacaaaagatggttcagctttgcagccctgctcgcactgaaagaactgctgagcatctgctgctttggtagactacctttgcttgcccaacctaatccctattgcagtgcattacagcagaaaagctggtaaccttttctttgtttgggcatctgttttaattttggtttctttcgtcatggaaatatagatgtagttggttatttgttcttgtttggtgaaattttaggatgtccgttaatattcttatttgctatttggctatgcctcctttggtagactgctgcatggtagtcttgagattgacggcgaatgtagtcgatgactaagttaccatggttttaaaggcggaactaggcgcccagccaccgcctgaacgcctagacgacttaggcggacgccttactagccaaatatcaaacagctcataaactataaatcatcacaaatacacaatacaatagtggatctgaaatagccacaaagtagtctccgaaggaacaataacaagtcacaaaatttaaaacaacacaataccaaatctgaaatagccacatagatagtttctaatggcgtaattaatagtaactagttgcagctactaatgcagcaaatatgctaatgcaatctagcaatagctactctcccatctctcaaaaatcatcatcaaactctcatgaaatattgggtgactccccttctccaccatcattgccaccattaggttcatcttcacaatctatgatttctgcatcctcatgtggaacatttttttcatcttcctcttcagactctggcaaatttt

SEQ ID NO: 1793 - DNA, 1442 bp, Zea Mays
caccaaagcgtcgatccatcttctcgtttctcagggctcgcggacggcgcagcacagttttatcttcctttcctcgccctcgccaggccggcaccggtaggctgcaaggtatcgcgccgccgcgttggacctcctccaagtctccaactcacgttatgccagggaaccaaagtttgatggaacggtttttgaaaagaaaattgcctccagctagtgactctaatgatcctggtgccgatggagagacatcaagaaggggagcaaatgcatcaaacactaaccttgaccgtacagcgagtcatcgtcctttgcgagtttcacgaaaccagttaatgttgcttattttgggccatgcaaatgctttgtcattgtcattacaaaggaaagataaagacattttagaggccatggtagaggtgaagttaacaaagcagagatttcagcaaattagggatgatggttgggattctctattagaggatgtgttatccttttgtgaaaaacatggtattccgaagttggacatggatcatgagtacattaatcgccacaagcctaggcaaagaaccaaccgaactaactatcaacactatagatatgattgcttgaaccctgttattgacttacagcttatagagttcaatgatcgtttcaatgaggtgaattctgaattgcttacccacatggctgcttttagtcccaataattcttttggtgcctttaaacatgagagtttgatggaattggctaaggcataccctgatgatttcagcccagtggaactagatgatctcagtagtgaacttcattgttacattgataatgtgagagctgatgcaagatttgctcaattgggtactatttctgagcacggtaaactaatggtggatacaaaaaaacatcttgctttttcattggtctatcggcttctcaaacttgtgctagttctccctattgcaactgcatcagtagagagatcattttcagcaatgaaaattgtgaagacggtcctacgaaaccggatcggtgatgactttatgaatgattgtgtcattagcttcatggaacaagaacttcttgatacaatttcaaataatgatgtgatagttcgattccagaagatggatggacacaatcgtagagtgaaattataaaaggtacacttgtaaaagcttattttatcatgttatgtttttgctaattttgtctttttattatacgtgttaaattttatcattatattatcaatattcgttatgtcaccctattatgcatagggtttgataattatgagtcgtaagtccgaccccggtggagatttatcctagattcgcccctgtaagatggatggacacaatcgtagagtgaaattataaaagggtttgataattatgagtcgtaagtccgaccccggtggagatttatcctagattcgcccctgt

SEQ ID NO: 1794 - DNA, 1442 bp, Zea Mays
gtatacgatccataaacaatgccgttcgttcccttattttaaagcaagtgttcccctcgccttttgggccgcagctctcggcactgtcacctatctcataaacatcctaccaccaaaaccctcaactattccacgcctcacttctatctattttgtaaacatccttcatatgagcatctccatgtttttgttgcacttgttatcccaacctttcagccacagccccccacgaactttcccctcgctccaccctctgcgtttttctcgggtattcccctcaccacaagggctacctttgtctcgatcgtcaatccaatcgcataatcatctcgcgccacgtgatctttgatgaagcctcttttcccttttacgaggcttcttcccctcccacgcgtgctgcccttgatttcctggatgtttcacctaacacggtctcagttccttttgaactgtcaccagttttttcttcttctctaggtactgctgcaacaaaggactgttcacctggcaaaccacctgtggctgcccctgactgctcaccacagtcccttggatagccgcgtgagcttcagcaggcttccctcaccttcaccaacagcagccccggcgtctcctgctgctggaccagcagctccgacgcctcatgctgctggaccagtagccctggcgctccctgatgctccagggactcgcgtcatgcagccgactccaccagcagctaccccggttgcccccagggcgatcaccgtcgactgtttctgtggacaggtgtattctcgccgtcgatttcctatcgcagcgtctccttcaccagcagcccaggcgtctgatgctgctgggccagcagccccggtgccccctgatgctccaggagctactccaactgtccctgccggcgtagttgttgtgcccctatggtcaaccaccaccgtatgaccactcgaggcaagcgtggtcttcggttcccagctctgtttgaagcttcggcactgtctccaattccccgcagctatcgcgctgccctggcagatccccattggcgcgctgctatggaacaggagtatgcagctctagttggaaaccacacttgggatctcgttcctcggccacctcactccaatgttgtgacaggcaagtggatattcaagcataagttcaacgccgatggctcccttgagcggtataagtgtaatacctaatttgtaatagataataaaagaggagaaaagtttttttcctatattttatgtgtatgttgaacctacttatcatcacatgtgaacaccatattcaaaaaaataataattaataaaagacttaccacaaaaaaaatgtgcatcatgttggttctttattttgtgtgcattatgtggcaatataaaagtaatgtgacaagaaatatattaaattcccaagtggaaatttagaatttaaaagaaatc

SEQ ID NO: 1795 - DNA, 1442 bp, Zea Mays
gggcggtttgcatgctccctgtgcgacgattcgccttcttcgcgcttcggtccagcttgtacaatgtgtgaggcctggcccccatgtcatagaatgggaaccctggtgcgcatcgggggagaccttgcccgtgatgcttcggggcacgggcggggaaatctgcctttaaaaaggggctcatccttcgggcagtagccatgcctcgctcctcttgcattcaccacacccttccgccttctgagcctctggatggggcgcgccggtgttcgttggagggatccgcgtcagggccaccctccccagcggtctcaccgccggggagctcgcgctcttcgtttcctgcgtggtggtgctgccgatcttgtcttcttcttgctgttattggaggagcgcgacctcatgggggttggcgctcttctgccatcgctcagcttcaaggattttcatcatgcatcccggctgcagtctcccgccagtggtcatctacaatgatgaccaccagcctcgtggtggagagaagcgagctggggtgcggcttccccctaccctcagcttcaaggatgttcatcatcctcgctggggtggaaggcgagccaagttagggtcctgccttccgcatgggctggtgacccgcttcttcctccagcatttggaggagaaggatgttcaccagccttgcggaggaggcgaacttcggctacacggtgtcggccggctgcaggcgccgtcagctgccgcgtgtctagctccttggcttggatggctttggcaccgcctccaacgctgcctcccgccgctgaccagggcgtggctgtccgtctaccgcacgggcaacggtcgcgccgtgcgcaggtctgccgcatccgtggcatctcccgtgctgccggccgcactgttccgacgccgtccggagagtcatacaagacgtcgtacaccgtggaggtggcggccgcgttcttggatggtcttgtccttactccgtaggagggtgggagcgaggacctcttcatgcgcggtgaggtggccgccgtcgccggtaagccaccagtgcagaggtggctgctgtcgtcggtgctgaggtggtcgccgccgctggtgaggctgcccgctgcagaggtggttgcctccgctggcgagaccgccaacgccacctgccgccgagcctccaactctttggctttaatggcctcgttgtcgcccccgtaggaagacgggggtgaggacctcttcgcaatggcgcccgtattgaggcggccatcaccgttgttacgccgtcctagaggattccgcaaggacagcgaccgcgaacttctagcgcgactctgctggcgtcgagtagtttatacctgcagagtagagatggaactaggattctgcttgaaggtagatgtaatacttttgcttttttgtaaggtacttttgagactatttatcaagcagtg

SEQ ID NO: 1796 - DNA, 1443 bp, Zea Mays
gtccgctgttcgactggtcgccaggacaggaggacggacgccagccgcccagcagccaccgctagtccgctactccgctagccgctagggcagggcaagtgtgtgttgtccgccagcctgaccgcctctccgcctccggtgctcacccagtcggccagtcgcccgcctcgtcggccgccgcctcgccgcgcgcagcgcgctgccaggaaataggccgccaggcgcccgcagtgcctgtccggcgtggtgacgtccgcctcaagctgtcagactgccgctcgacgctcgttacgcacgccgccagcccgctagtgtaaggatcagaaaccaaacacaccaaagcccattggtcggacaggatctgggtcgctcggcacgccaggtcttgcgaggagaacgaaacaagccgcttgacgaaccgggtcattatctgccaatctggtactctgtgtgcctgtctgtgagtctgtcagctctccccctctgctgtcctcctctgtctcttgtctctgatcctgcttgggagacagtatcgatggatttcgtggagcgtctcccatgttctgtcaacgctgattgcatcttaatttaattgttgtggacaagtttactcagtatgcacactttttgcccccgtcccacccctatactgcaagttccgcgactcactgttttatgttttacaagctccatgggttgtcatctacactcatttccgaccatgaccttgtctttactaataagttctggcaccatctctttaggttggctggtaaagaattatgtttgagttcctcttatcacccacatacgaatggacaaaccgagcgcgtgaatcgtctccgtcggtgattggatgtacatgaagttacatccaaaagtccaatcgtctatgatgccccgtgctcatcacaggcttaacttcaaatatttcggtccatatcagggcttgttcggttagtttccaatccatatggattgagtagaattgaatgagtttaaatcccaagaaagtctatcttattcttaattttttccaatctcatccaatccatgtgtaacggattaaccgaacaaggcctcaggtgacagattgtgtggcacaagtggcttatcgtctacaattgcttgcgtctagccatatccaccttgtggttcacgtgtctcaactgaagctgcctactggttttcaaggcgaattatgaattgacgaatgataggttgtgttaatttgatattgtattggtgtggtatgtgaaactatgagtataataactattttttttgttgttaaattagttcagaattaattgaaattaattattatgtatatcaatcttaacgtaaacggtagacaaatggtggggctatgtttagtgtttagatgtgtttaaacatgtttaaacagaattaaacggtttttctaatgtagcagcatttcag

SEQ ID NO: 1797 - DNA, 1457 bp, Zea Mays
tggatccctcgccatcagccttatccaaatatccaggacgctacctcctcacagctctacgctcggcctccttcgtgtccgtgagctctcacttgcgtctccttcctagccatctcactggtcgcgcgcgcgagctcctctgcagccgctcgacgcccatgcttccgcccagctcgccggccatcaccttcctggccgcgcgcgctttctccctgcgcaggacgccgctgaccttgctccagcccagacgtcgtcatctccgacctccgaccctaatacctacagcacccagctcgtcccctccccagccgcatctcctaacgctcggccttcctctgcgtgagcgcgcagaactgtgcctgtcgtatgctcgtctctgccgagcaccgtctgccccagcgtcaccggcctccctgtgccggcgtcgtgttctggtggccgagcatcgtcaccagcgctccttccttaacttcggcagcgcatgctcttctccaagccgacgctccggcagtggcgtgctcggcagactcgcgccctcccggtagctcgcgtgatgttaaatccggtggccgatctcgcctccaccggtaacttcacttcgcaactcacctattgttgtggtgctcctatgccacgacacttatgccggtgcatcgtccgtgccttgtgtttgtgctggcacgctagctgatcacgtatgtggaggacaagagccgggtcgaccccaagatgatgtaacgaatcggttactccacaaggtgatgctggtggatcaacctgaaggtggacatgctgaacaagtgccaacacaaaaggctggtcatcaagtggtcgtcgtctaacaaacactaacctagtgttattccaggcaagccccggtgcatgcaaccccttccttgtgttttaaataatttttatacactttaagtctagcgaaatgtgcattagatttataggagttgcttggaaaccctttgatgcattgcctaccttgaaatccatccctttatagatacttctgatgaagtatcaaaatatgatttacaaaaatgcttagccttgcctagaggtaaatcttgcggatagaggctgtcctttacgctaatgcctagctcaggggttatcctgaggaaggatggcttctgcctgcaagaatattttcattgggagcagtggtgggatcttactgcaaagttccctataatgctcttttcatccaaaggaacacaaacaatcctaagggtggaagtacttaaatcgagacttgggttaggaacaggtgatgttctacccaggttgattaaggattatagtgaatgtaggcttgatgaccgaggaccttttaactggtcacatgccttatcatgggtaagcgcctcgggcagactaataccagaataagataacacgcaatgggagtggagagatagcgagagtagcgtgtaccctccgtggca

SEQ ID NO: 1798 - DNA, 1458 bp, Zea Mays
ttgccattgatcacttactttttcctagccattttcttattaattataatgatctgcatagggtaattttgatgggatccaataggttaccccagttttggctatctttataccttgtggccaattaatatttttgggtagtacatgctattgcttattgtggttttgggtatggagatacactattcatgatttcatctttattatctatttattattactgttcatgttaagatcattatgttaatgggaacatggagcgaccatccgggaaaacagtgctaccacaagggtttaatgggacgcccttggctgattaactaggaaagctagtggatgacttccttacccgaaaggggcaagggcagtaggggagtggtcagtgtagggaggtccttgggttgattttgctgcgatggcggtcaggcgagggattcctgcactagagtttcctataaactatagcgggatttctgaagctagtggaactttataaaggcctcgtagtgttaccctgcctcgcctcctcggtagaggtgtatgggattggctgtctcttggcagatgggtaacatgacttgtgggtaaagatgcgcaacctctgtagagtgtaaagctggtatactagtcgtgctcacggtcatgagcagctcgaacactcacatgattaatctatggaattaaaactcaatttgacatttgcatcacatttggtattattttattattaattttatttattattactaaggtttggtattaacttatacttagtaattgctaattaaattttgaccaacttataaaagcaatgctcagcttcagcctttattttgttgatcagccttacacttcacatgaactcccacctttggtgagttcatgccacattattccccacaacttgttgagctatgattgtatgtgagctcactcttgctgtctcacaacccccccacaggagaagaaaaggcggtcgaagaggagctgcctaactctgaggctttcgacttgatctagatggcgtctcctagtcagctttgtggcgctagggactaatatttagttcgctttattttatcatttatttttgtaagacttccgctatgtaataagtacatttatgatatttatgacatttatctctatgcactctattattatatgtgttgtcttctctagcgcatatatgagatgcacccgcctttgttccttaaatccgggtgtgacagggttgccgaaggtatcaactactacgacaacgactcctagaaagaggagaatggctagtgttttggatgctgttttacaatttactaagacgccaacttctgcttttgccggagcttttgacaagaagactgaagatgcaagagaagtgaccactgcaagcgccacttctattcatgttgaaacagggccttcgggggctgcgccagtagagatgatgaaagaaag

SEQ ID NO: 1799 - DNA, 1466 bp, Zea Mays
gcgagatcagtggtgtgcccaacgtacccacgacgttcttgatttctgcagacacacgcagcagactttgtggttctttgcgtggggaggttcagtggtgtgcccaacgtacccacgacgttcccagagggcgaaggtccagaggtgtttgacgggcaggtgatgcactccatggactacgccaagatgggctcgagcaaggccaaggagacgataaggggcaagcgtgtcaccgtcgttggctacctgaagtcggcgctcgacatcgccgccgaatgcgcgcaagtgaatggcaccgctcacccttgcacaatggtggtccggaccaagcactgggtcttgccggactacttcgcctggggcttccacatctcaaggctctacctcaaccgcttttctgaactcctcatccacaagcctggcgaaggccttctcctgtccgccttggccacccttctgtctcccttgaggtgggctttctccaagttcgccgagagctactactccatcccgatgaggaagcacgacatggtgcccgaccacagcctgttccaggcgctggccgccgccaccatcgccatcacgcccaaggaccactacaagcggctggacgaagggagcatagtgctgaagaagtccaagacgttcagcttctgcaaggacggcgtggtggtcgtggagggcgagccgtcgtcgtcggcgtcggcgccggcggcggcggcggtggtgaagagcgacgtcgtcatcttcgccaccgggttcaagggggacgacaagatcagggacatgttcacgtcggagtacttccgaggcgtcgcagttgggtcggcgtccaccaccgtgcctctctacagggagtgcatacaccctaggatccctcagctggccgtgctcgggtactccgagagcatctccaacatgtacacgtcggacgtccgcgccaagtggctggcgcgcttcctggacggcggcttcaggctgccgagcgtcgcggcgatgcaccaggacgtcctcgcgtgggagaagtgcatcaagaggtactcgggaaggtacttccgccgctccagcatcctgctgctccacacctggtacaacgaccagctctgccgcgacatggggcacaatcccaggaggaacaaggggttcttctcggaactgtttgacgtctatggccccggcgattatgctggcctcacctcctgcgctagctctaaggaacactagacctttgttgcgcggtacgtgttacgattcatgctcttttcctgctgctacgaggagtgagtgagtgttcatgcatgttcagcgaatgtgtgatgcgtgtgtactgtcacatgtgtgatctatcaccatcttaatttacactttgtctacatgatgtaaagctttcgtgccgtataatcaataaatttcgtgtcatattcatagactgattaatatatgtatactagtcgtttgcccgtgcg

SEQ ID NO: 1800 - DNA, 1476 bp, Zea Mays
gttaattttgcctataccatgtttgtttttattgctacgactagcagttaggttatgagtcactagaagagcaagttggtacctgagaatctcaagtctaaggcaagttgtgcccttgatcacttttctttgcccaataatgttattgttaatcactatgatatgctcaggttaatctgatgggacctaatcggtttccctagacttgtttatcccacaccttgtttaccactaaacttttggataggtttgctattgctctacctagttttgggattaatattacattatgatcatgttccaattataatgttgtttaattattgttcatgacaagatcattgtgttaattggaacatggagcttaacttgataaacacgtgctaccacaagggtggaatgggacgccctcggctgactaattaagaaagctagtggaggactaccgtacccaaaaggggcaaaggcagtaggggagttgcatatagggaggttctcgggtcgatcatgctgcattggcttttcagatgagggattcctatattgcccttcctagaaactatagcgggttttctgaagctagtgaaactttgtaaaggcctcatagtggatctctagccattcacctcgaaagtgtctaagggtctagctaaccctggctagacaggatacacgacttgtgggtaaagggtgcaacctctgcagagtgtaaaaccagtatatcagccgtgctcgcggtcatgagtagctcaagactcttgcatgattaatttatggaactaaatttaatctatcatatgcattgcatcgcgggtgttattatcaattgtggtctcttacttaattgggttggtatctacttatacttagtaactgctaataaaattttgaccaactctaaaagcaatgctcggctttaaccatctcctttggtaagccttacacttcacatgaactcccacctttggtgagttcatgcacattatccccacaacttgttgagcgatgaacgtatgtgagctcacccttgttgtactcacatcacccccaggtcaaggacaggcaccactggatgaggcgcttgaaggatgcggtgatgagttcgcgagtggtctaggccgtcatctcccagtcaactttgtgttgctggatcgttgttgttgcatgatgtaattatttaactattttgtatagaactccgttatatatattaatgatgtgacattcgtttttgtagcatgtgtcatcatatgtgtgagacttgatcctagcacacttggtgattattctcgcgctcgggttttggttgcccctagaacccgggtgtgacaatttcccatctatgctagttcaatttcactacaaatgacacaatgtacatctacaggttcacatagaaaattggggatttaagtaggatatcagactgtgttgattattaaatatttggaaccccttatatgggatcaatttatt

SEQ ID NO: 1801 - DNA, 1476 bp, Zea Mays
cacaaccctggttagtactagtacagtagtaataatcgattaaccagaaaaaacctgaaagtgtaacttgatctggaattcctggatccgtgcgcacactctaggcgttgtgcgtgtttggtcccgtcaatcagtcagtctttacgacgcattcgcattcgcgctcacctccagaaccgagatccaccaccgcgcaccttcacgactcggccggcgctccgtcactcatgatggccggccgcccgcgcccgcagacggagctgcactcgccgtccgcctccacgcggcggcgtgagcggtggctggttgtactcggcgtcgcactccacgccgtgtacatgctcagcatcttcgacatatacttcaagtcccccatcgtgcacggcatggatcccgtgccgcctcgcctctcggcgccccccgccaagcgcctcgtcctcctcgtcgcggacgggctcagggcggacaagttcttcgagcccgacgaacgggggaggtacagagcgccgttcctgcgcggtgtgatcgaggagaagggccggtggggagtcagccacgcgcgcccgcccaccgagtccaggcccggccatgtctccctcatcgctggcttctacgaggaccctagtgctgtcaccaaagtgagtattgtatttggcaggatggaaggccaatccagttgagtttgattctgtattcaatcagagtcggcacactatctcatttggaagtccagatattgttcctatattctgcagtaacctacctcacagtacctgggacacttatccccatgaatatgaagactttgcaacagatgcatcatttctggatcattggtcatttgaccagtttcaagatcttgtcaacaggtcttttgacgatattaaattgaggcagttactcctacaagataagttggttatatttttgcatttactgggttgtgataccaatggccatgcacaccgaccctattcaagcatatacctgaacaatgtcaaggttgttgaccaaatagctgaaagtgtgtacaatcttatggagaactacttcaatgacaatcaaacagcatacgtgtttactgcagatcatggaatgagtgacaaaggaagccatggagacggacacccttcaaacacagatactcctcttgtggcatggggtgctggaattagaagcccaaagttcctggcttatacagagaaacctgatgacggctttcggtttgtagataaccacaaacatgatacacccactccaaaagactgggcccttgaaggatttgaaagagtagatgtcaaccaggctgacatagctcccctaatggctacacttgtgggtttgccatgcccgatgaattctgtggggagcttacctactccttatttgaaactaaggaaggctgatgaagttgaagccgttctggccaatacaaagcaaattcttaaccagtttctccgaaagtcactatgatga

SEQ ID NO: 1802 - DNA, 1488 bp, Zea Mays
taggcttagattaacccaattataaaagtatcagatatcatataataaatgttgctattgtgtagtagatacttatacaaagctaacgcaactggaacgagtcaaatcggatttaaaacggaggagatacgaatttcctaaggtttcatgtgcttggcatccgattaattaagaaataaattttaatgtgactttcatgtcaaaacagagacactatatgataaacaacattattacaaaattataggaattggaatgaataaatttggacctcatatgaattttctatggattaaacaaattctagtatttattttcacattaaaaatcattttctattcacttttactgaatttctaattcttcggactgggcgccaaaatctggaaaagccaggggccccagcgcaatgcttactagactcagtgcacagtatttatggactgcgggttaattcctgataagcgcaaggtctcttttgaaagacgtactgaccgaaggggtacgggcgagtattggccatccgatcaggaaacaagggcatagattaaatccgccccacttgaaccgataagcaatacgagccctcggatcaaatttctgcgcctaggatttaatgtgactacgatctaatccgctccgttcattacgatctacggataacaactctctctccccccgcatccttagatctccatccgatggctacaccccgatcacgcgaaccattatgcctatctctaatctcatccgtcgattgcgtatccaatgaacatgttcggcccacgctcctaccgcccccagcaacggcagcacatccccgatttgcagcggcggcatgccccgaccacggtggcaccataatcgacgattctagttcgacgaaattgcacatcaatccgtattacatggagcaggagacttggagcatgtcgaccaggtaacgtaccgaaggtttaggcggccacaaagttgttccacggcggacagcgggtttgcggcggagtaggagcaccggcgagaaatcgcgtgcaccctagctcccaatcgcgccagccgagggagccgtgcgcaccaacgtcgattgcaccagcggcgaacccgaaggtcaccggcgagcttggtcctttctctctctttgatggagttcggtgtgactaccccaatggtggcggtgacgcccagcgcccaagagacggtcgaggcaaagcgagaggtccgatcccagctatttaaaggggaagaatctgttgcggctagcagaggcgagaggaaaacacggtggaaggtgtagccaccatggatttggttgaacggactagtacggaggaatcgaccggaatcacgcgcgagctgttaggatgcagttgggttcttcggatggtggaagaaggcgcgcgcgcgaagataggggagatgatccgggcgaccatgccgtgtggatatatagcggcgcggacgttccccagccggccgaacaccatggaa

SEQ ID NO: 1803 - DNA, 1507 bp, Zea Mays
gccaaacaatagtacacatctttgagataaatgtgcacctccaagtacaaatggacgcaaatcatgtttttttgaaagccatatctgaaacaaatgagatatattctttttacgaggcccacattttcaacatataaagataatatctaccatgagtttgtaaatacttttcaacgacgcccatatttttgctaaatatgctcaaccaagtccttcaattttagatgagttgtacgatcttgaagatctatttgattctctagcactctttcaaatggaatggattcaccaaaggagaatttgggttgttcgacgatggcagaacttgcagcctcattcaagtcaagattctcttcaatattctctttcttttcatcttgcactatcatgttgtgaagtatgatgcaagctagtataatgttctcaaactgtttttatcatgtagacgagctggtcgcttcaaaatacaccatcgatgtcgtaggacaccaaatgctcgttcaatatcctttctttcgccttcttgatgattagcaaattcctgatctttgtcattgataggcatggatatttacttaacaaaaatagcccattccggataaattccatcagcgagacagtaaccttggtcatatttattcccattaaccgtatatttcacccgagcaacttgccctttgagttctcagatgaaaattgatgattgttgtaggacattgatatcattattagaaccagcaacaccaaagaatgcatgccaaatccaaagatcatgtgaggtcactgcttcgagaatcagagttggtactttttgaccacctcgagtgaattgacctttccatccaacaggacatctttcccattgctagtgcatatagtcaatactccccaacatgccaggaaatcctctactctgtccaacttttagcaaacgttcaatgtcttccaccggagtccgtcgcaaatagctttcactaaaaacagcaataataccttccacaatttttttcaaagcttctaatgcagttgtgtcaccaatcttcaaatattcatccaggtgatcagctgcactgccattggtcaattggcgtattgctgctgtacatttttgtaatggtgtcaggccttgacgactagtacaatatgtccttgtagtgaaatagtcagaccacttgcctagctcctcaataatgtgcagaaaaagtggtctcgacatacgatatcttctacgaaaaaagatggagggtagagaggatttttggagaagtaatcatcatacaatttttcgttgaatctcttctgtggtcttctgattacttcctcggacgaagatgatgatttgatgccacttcatgaatagtttcgatagtggctttcaaaaaacagtgacctcagtaacaacatcattcattatgtcatcctcagcgagaaaatcatctaacaaagcattactagatgggacatctgacatcttgtggtggcgtcaaatggtgaggactggtataca

SEQ ID NO: 1804 - DNA, 1509 bp, Zea Mays
gcaacattagccgtgagaatggcctgagtcacatctcaccacatccgcgaccgcccgaccgcgacgctgaaggggaacgcctcgccgccaccggcgacagctggcgcgagaggctccgtcgacggacctgctactcgcttccttcatcgccacctcggatggcaggccccgttgaagcacacacactggctgcctcagcaccacctccgacgccaaaccctaacctggactggcgggttcgacacccacccaggcaccatcgcctaccctaaggtactctccgtccaatccccgtccaccttctgtgaatcaagttagacatgacaaatcaatcaagcacgttgatatcgagctttttgattctgcgtgagctccatgcatttcctattttttttccatcaatcgtcgtgtaggtgatggatcagcactcctgttgcttaagtttcgctgacaaggtcattaatgcatccagcggtgttttattatattgattgtgatgaccgatggcgacggcttggcctgtgtcagtcattcccaattcgccggtttgcccctacatttgttgtgtagtgtcattctctcaggcgtaccttctagatggttgacctcacgttactgccttcctcccaccaccccaccctccctagttcttattttttcttggaaaatgggatttagaaaataagatgttgcttcatttacttacattccttggtattggtaggtctttcatctggatgcagggaggagggagctctgcagcaaaggaagtctgtagtcaccatggtccatttcaagaacaggtacatggtggtggaggtctttgtagatgcaggcagaggtgatacagaacaatactgtcgcactgccttcttactttgatttggtgcacttatgaaaccttccagaaacacaccttatttatccatgtagttctgtctgttatgtccctgattaaagtattgctgcatgtcaatttggacgtacggtcagcctcattattatataacgtggcacttttgccacactgcaatactaataataacatgtagtccttaagaaaagggccgctagctctctctctctctttttgttatggccgaactgcctcagttgagctcatcaaccatcactgcattcactttttgttttttctaggaagcatcaggcggcttgcaagaaagctgcactggagtgcgattgcgacgaagcgaaattttgaacagtacaggttggccgcgcggtggtagtgtcacggtgggtgtcgtccggtccgtagagatcgagctgctttgagaagattagagaggactagagagctagctagccgaagaaggaagaactcgtatctcccccttggtgtttttttctgtttcgttgtatccgcgtgatgctgttaattctgggctatctaaggattttttttttgccccagttattagcatgtgctcataccataacgaattgctgcattcttctgccaatacagttttggataatagggtaact

SEQ ID NO: 1805 - DNA, 1510 bp, Zea Mays
gaggtccagaaccaccgcaccgcagcccatcgcactggcacgaacacacttgtcttctcttaaaacgcagtcgcacagagagtttgcattgcacacacaggtcgcaggcgcgcgcatccgcaccacggcgccccatccctcccgtcagcgtcgctgcctgcctgcctgcctgcgtccgctcgcaactgcaacgacagggaggcgcgcggggagggagagggacaaaccgagaaaggcacggcacagctgcctgcctcggccctcggcacgcgctcgcgccctggtgactggtgaacactgaggactggaggcggtgggcgcggcgggtccagccaccgcgcggttcacggcggggcgcggcgcgggcgaatgccggccgtttcaacggcgggcggatcggcctgttcccctggcgctgctggcgccccccctaggcggtgactgcgaggcccgatcctgaggcgggcggcgactccgagagggcggttggctggttttcttgccaagtgccagtcagtctctctcgtctcggcgacgccgcgcgaaggtcggaactcggaatcctcttcccggcgtcgtcatcccacccccgtcggttcccttctaactcctggctcctggggccgccgccgagccgaggagaggcgcacgcgcctcgggaatggagctggcgcctccgctccgcctacgggatccgagcctgggatggcttcctgcaacttgcgcaggtacgtacgtacggcgcaattcacagacttcttcagtccagtaccgcgcactgactgtgaaaaaaaaggatttatttcttctagtacgatgccatttcttggtttcaccacagcaccgttgcaggaaagcaaatcgagttttcttttcccttggaacacacttgttggtcgatgcgtgcgtgctttttttgccttttcaaaaaaaatgggcaaagagaatgcactggaatcgcgcttttgttagtagtaattgagcgtttcgaatctgaatggagcaggtcggggtcgggcatgtagtattttacattgtgggcttgcagcagcattttacattgtcaattctcaagcttggtgcatcggtggggtatgactttatttatgagaacgtgggagtgtgaaaactctcggttatcttttttcggagaggatcttttactaatcccaccggtacatctactgttgcaaatctcctttgggggtgtcgagatagcgatggatcccgccttccttttgtcctaagctgtgggggggtctgagatacctcctcctgacttcctcagtgtgccgtgctgcggcccatgatcgcccccatgaacgagcagaggaccacacctcttccctttggtttcttgcatctgagaccacctgctttacgtgctggacttttggcttcgtgctgactgccttttgccaaagcattctggcccttgagaaaaacaacggcattaggtgtggttattgccttattgggtttaggttaggtgccctgcgacgctgctttt

SEQ ID NO: 1806 - DNA, 1513 bp, Zea Mays
caaaacctcataaatgcatgtattgtagtgttaacaaacggaatggaaccgatgcgtcacctgtttgcatacctctcatgcgacatatgtgaggtcctgtttattggacagccttagacagagtccgtatttatgacaaggcatgtgctcatgcaaaattttggtagcataacacttctgttctccattgcatctccaaatatgtgctttgtcggtcactctggtcataaatttggtactttattgacatcattttttatttctttcattattatgtatttcattctatatttgtatttgggtagatgttgaaacaaaatgtcaaaaaatcaagtctctaacttggagtttgcttgggacaaggagtagctcgagaagtgaggactcagtgtttcaaggctttggttcttccatgcgtagacgtagagcactgacacaacatttgcctacagacgatcaacacgatataagttacttgttaaattaattctttttgtacatgatgactcgatcgtttaatcacattcttatttttaataggataatgaaaccgagcgaccgtcaatacaagacccatcgagaggaaaggtagctgtgggtgtggacgtgcaggacccacgagacggtggggacggtaggggagacgatggtggcgatagcggggttggtgcaaattcggtaggtggggattctggggctggtagagattcaacaggttggtctagatcatctcgagtaaggaggaaagtacattttattagcccacctctggagcgctaactacgcgaaaaagcgtgaaacacgagcgagcgtgtgatatttccatagttgcatcgatcactctttgtttttctcatataaagggtcatgcatgccttcactcatatattggttgacatctacttaaatggacaatgcgggactatcgtctatctctatacaccaccttggtttcctaaaataaattaggccagtcataaatgggctaaaataggataagttccaatagataatacgcacacttttggaacattgtgtatgcatgctctcttagagcaactccaatgggagccttaaacatagaaacatattgaaatatagggtctaaacaagaaaggatagccccaatagaagccccatttcaatgaaattcagagtagcatatttgggactcaagaaatcatggccctatacagtttgcgcccctcccaacctctaggggaaagttcacggagccttcttcttcgtagtctccagccaaatcttctctcgaactcgctccaagcgcccgtttcattcgcatctcatgcctgcccaacattgtggatgccccctctccatcctgccgcctcccctggtttgtctccttgctcccctcctccctgccccctctccactacaacacatatggccttctataacgaatattcaacgacaatataacaattcgtcactagatcaccttgtttatgacgatttctagaagatggctcagtatagtggtgaaaattta

SEQ ID NO: 1807 - DNA, 1515 bp, Zea Mays
acatcaaagttttcacttaagctctaataactatctcggctaagagataatctactgatttctgttagtattctaaactctggcaaagctaatgttccggaagcatcgtgatatttcccttctgcgggaatgacctctttcaaaatgaatgtgcacaggtactcaactatgccatacaatgcaccttcagttaagttctccgggctttcttgttgaaatttctgtaaagaaagtttataaacatcatctatttatactcaataataacacatttacatctttaatgacataaatacatacgtgactattactaataataccttgccagagttcgtgatgtatcgtccgttcattctcatgaactcgcacacgtagaacccacataggaccgatccgggtggttgcttgtggcactacataacgggagattggttatttagttgcaatattgtcctatgtacgtatatgtatgatatatattcataaattcacatacttaccggccagttataatggatgttagtggcacgccttttttggacgtgtcgtactttccaccttgtagcttataaaacctaaatgtcatgtgatctcaaatagaatcactatgttattctacaattctcatcgatataagtatgcatgcatagaaaaggcttacagctctaagatgctgaggaattttgaataggccgaaagctcggtgtgcaaggagtcgagcactagcacctttccaaccttaggataaatgatgaagcatatccagtggtccctgtacgaatcaaacttgtgatacatgtgtattgaaattattaattttatttatgcaaaatcacacttacttaaagttgtacgggggccactatggattccctatcttgaaattgaagcattgcgtgtcctatgtaggtggcgtatcttgctttaaaatccttcttcagatcctggctacgcacctcaatttcttcgtcagttagtctctgtaatgcttcgttgtcttttccgattgtaaaagtgtggctatcctcgcatatctttattgggttgagatactcaaccctttaactggcactagcattgggattggtgccataaaggatctcctactgatcatgttgcattctgcaacgcacacgtgcatgtcagatattgaaaatttatacaactcactaataataacacatatatgtggagtatgagtgacacttacaacgcacatatggttacaagttgcacgtcgagtctctgaaggttcatcattaaccacatgtcctcgaatggaacaaagacattttgatttgaaccaataaaagcatgggtggtatattgacactgatggtgccgatgccaactgaagatgcccgcatgtaccaattatgcaaccttttaatattagtcgggaccttccttagtttctcaaaagtgagtagtggtctgcccggcacatattttttaggtacgtttttataatctgccttaattggcttctttatctttgcggccattgcctcaacc

SEQ ID NO: 1808 - DNA, 1519 bp, Zea Mays
tacgaccagccgagccatccctccaaatccccagttcttccaaaaaaaagaacgctgtgttctgcatcctcatgcaagcgccatcgcatgggagatagaagagagagagagagggcgtacgctgtggctcccgttctgctgccgttcgtgggagatgtccatggaacaatcgacgcgtcgcactgggagccgaagaaccaaacaggtgatggcgccggcagtgtcttccctgcgctacggcaacaacctctcggtggtgggaatcttcgcgcgcgacggccgtgctctacgggggcatctaccgtaccatcgtcatgctaccctgcgcgaccatcccgctcgtccagcgaatgggccatcgcagactgctcgggaacgaccccatcgactgctccatgatcttccgctacttcctctcctccatgaccatccgaaccaacctccagaaactgctcgacttcgccccgccagcaccgttcccacgcgttgaaccttcatggtgctcctcgaccgggcccgagcaaacaagctcaccggcgggcgggacgctggcggcatccaccaaggccggctctagactagcctctccacgtgcctccttgtctgctggtgctacggtggcggcgccaatgagcttttccccgtgctggagtctgctcccaggtgtcgggcggatgggaggatgacagtggctggatcgtggattctgggttgtgcggctgtgatgagaacacgcatacccctttcgcgtatcctgatctggtctgtcggattgggatcggacgggatagagtgcatcatcggcgtggacgatttttaaccatggatctcggatccggtggcccgtattcaatactggttcatcagtgaggtaaatctaatccgagcactcggattgtaaatccaacggctacaagatgacccataccccttcagccgacccgttttacaaaagagtccttacactatccagaaaacaacccgcagttccgcggcagtatagtttgagtctgggccacttttgcgttattgcccctggactcttgtgatatcttgtgcgcagttcagaaattagtaaaaatgaataaatgattaggaaattgattttttattatataaataatcccagaaactcgtttaattcatataaaatccatattaagtccaaattaacccattccagttcctataattttgtaatattattgtttatcaaatagttccactgttttgacatgaaagccacattaaaatttatctcttaattaatcctgtatcaaccacatgaaacctttggaaattcataacttaaaatccataactccaaaattaataattcatgttccagtgatctcattttaatatgtagattattaatatgtattttgttcttatgtttggtgtgatgttaattttgcctataccatgtatgtttgtattgctacgtttagcggtgaggacacgtgtcatctaaagagcaagttggtacctggaatctcaagtctcaggcaagttgtgc

SEQ ID NO: 1809 - DNA, 1522 bp, Zea Mays
tttttgccaagccatcaatgaggacccgtgtttcatttgagacaggattctttttacttggtgggcatgctatttatttgggtccagatgatatccagatgggcaagcgtggcctgtttgacaaggccgcaaagctacaacgcccaagaagattgaaaggggaaaatgcgcagtactcgatctacttatcctgcaagaagcaacttcaatgataagaacaagcttggggaaggcgggtttagtaccgtgtacaagttgtacaggtaagcaacacaactcagtatgcaagggagcgaagcgtagcatcgtctgcgctcttcttccttcgcatcaaggtggatgaattttatagggaaaggtcacagatagaaataaaataccggtgaagaacttgtcccggtgtagtatacaaagactggaccagctgcacaatgagatgcaagtatcggtcaatcttcaacacgagaagcttgtcagactattggggttctgcatgcaccgggacgagatgatgctcgactatgcacatatgaagaacggaagccttgacaggtttctatttgactaagcaatgatagtagatattgttgatctgtcaatgatgatgatgaggtggttgtcacagaagaacacaatattgatagaaatggtgtttatgcgaaggcattttcttacttgacaagtgacaatgacattcttgaaagagagcatatttcttacgaacaaggagattctattcaaggcacatcatttcttaaacaagggttcattatagatgatggacaagctgaagttgcccagtgcatggtaacattagagatgcaaaatcttggatcagatggtggatgttatgcttctcaatgcacagagatattgcggtgcaaatacttagaggagatggtggacggagtgatgctgcccactccacaggaacactactgatacgagaacttaaaacaaatggtggacaacatgatgcggtccagtgcatatcaagtctacatgtgcaaaagcttagagaaaatcaaatcaagctttatgggtcctcgtccttcctagaatctattgtagatgacacaagaggtgattttactcactacacaatagactgcaatggcataaagctcagtgcaccacaacattgctaagacaggagtttcaagctgcacgtgatagcatgcaagaggttatggtgagaaattcagttgaagctaccacatccttgacaagtacacaacaagggagacacatgagaactggattattcaatgtgtcaactgtgacaccatttccccggcaattttgatcttgccacgtcaaggtcttctccgagtgagtgaattcacattgatagagattgggcatttcgtggacctagaggacaaatcacatccaaaatttgttgatgtggctcctatcaagtgcaccgtgttcccctcttcaagaatcaagagtttgatgctgccgccaaagagatcaccaaggcattaacaactcaatttctattgggaggagatatggg

SEQ ID NO: 1810 - DNA, 1543 bp, Zea Mays
cccgtccgtgcggcacttcgtctatagccgctgtccgccgtcgagtctagctacccatcgcgaagtccctgctgtcagcctccgcacatgtcctaaactgtcatagccagtttgcctccatctcgtggaggcgttgcgctgccgtcgagtcctgatatcgatctggttgtcatcgaagtgaagcttagtttaatgctcgccaaggtttcgatcaaagattttattcggagactgtcgacgttctcgcaagttttaaatcggatttaatggacggtaagtggcttcgttattccagtcgactaaatatgatatttattagactacctgaatcgtttacggtgatttgatcggtagtcgtacatgttgctgatcccttgcgttataatagttattacgttctaggtagtttgtttgggttattagtttcgagtaatttaatattagtacggtatttaacatgtaatcgacgaaaaatccggatccgtattcgttaatcaaagtagcgaatctaagctaaatttattactggcgcgcaagttgttagccgaattgttagatagattaaataaatatgtgtgatgcgaaataaaattaaattagtttttgtaagcaaagtgatataatttataaagcaagagataaatttagcatttaattaagtagttgatgagttatgtttaggctaattatgtttacaagtctatggtttgttgttcgtgatgtttgtgttagattcgtataatttagagaagcgtaattattacgcgtagtcgtatatcgataactagtatttccgtatgaacttgtacaacgcctcgccgctaggtgtttcgctatcgcatagcactatttaggtgtgtgatattcttgtcgatatgcattcatgtgcataatgcatttcattcaggtacgttaattaatcgcgtgatacggaagacgacccaagtcgacaccaagcgtgggctaatccgcaggatgaagctaatggaccaacctgaagatggttaaatcaagcaagtgctcggtcgagagatactcgtcaagtggacatcgcctaacaaacactaacctttggttactcaggcaaaccccggtgcatttgccacctcccttgatattttaaaatctttctcacttgattgctgcattaggtaataggagttgattgataaaacaattcctgcattaccttccttgaatttgattaccttccttgatcacctgttttacaaaagatttttgatgcttagcctttctttagaaaaacaaaatgttttgtttttacaaaatatgatgtggcaaaagtgggtgggatgttttcgaaaataaaacttgatggtggatctgtcaaaggccttgatgggttcaacatcggaaaagatgtacctctgccaggtaccaaactttgggttgaaatgattaagctgagaccggacgggtgacttgcacgagaaaggagtctcggtgtagtgtctccgtctgagtcgattaaggaccttgtcgatgtaggcctgctgaccgaggaccctttaactgatcacat

SEQ ID NO: 1811 - DNA, 1546 bp, Zea Mays
tgcatcctgaggtctttatattctcatgtactgctcagttcgtgttacggcaaggaatagaaaagctggtgtttgggccccaggcgttcgggcgccattgccttgtctctgagttgctgttcattcgtcttcctcctcccaacgtccattgttcttgagcgctagtgggttccaacatttggtaccggagccattttatgcccaagatcttgcgctactacctcgagtccgagtccatggcgatggttccgcacggcgccggggggagttcggtctccatgtcataccttgtgctatcgccggcgagctacacggcgtgggtgatcaaagtggagtcgattatcgatgcgcaaggtctctgggaggctgtgtctccactagatgatagcgacgtgaacgctgtgaagaacaagacggcgtgggcagagcttctccaagctctgcccgatgacatctttatgcaggctccaccaagaaaacgacggcggaggtgcaggcgagcctcagactcgtttcgtcggggcggatcgggtcaagacggcgcgccacgctcatgggggagttcgacaagctatacatggaggacggggaggcattggacgactacgccggcaaaatcagcggtatggcggcgcgttatgctaggcttggcgcgacgctcaacgacgctgccatggtgaagaagctcctcgacaccgttccagatcggctcttccccgtcgttgcgggcatcgagtagttctgcgacgtcgagacgatggcgttcgaggaggcgctcggcagattgaaggcgttcgacgagcgttcccggtggtgcactcatgctggcggcgaacggcgcgacgaccaactccttctcacagaggccgagtggaaggctcgacaaaagaaaaagtcgtcgatcgggaagtgtttcaactgcggcaatcgctgccacttcgcaaaggactgccccaagccgaagaaggaggaggcactattcgccgatgtcgaagaggaggcgacgctcctgtgagtgcaggaagcagtgccgaatttagggggagattgttaggaataaacccgacaccgcgtattggtgcgtggttgccgagtagatgcgtgtccgtgcatgtgttgtgtctgagtcgtgcagcgaccataggagcagttagtgcatgggtgtgcgctgtgttgcacgtgtgtgcatgtgagcgtggaatgagtcaaggtgcatgcgacgtgcgaggctgcatgctgtttttaggagctctggtgacttggtcctgcggctggccacgtcttgcgcgcatagacgcgtcgtgcccatggccgtatgatacggatcaaggccgttagatcagcagacatggagtgagtgctccaccgtgcatcctgaggtctttatattctcatgtactgctcagttcgtgttacggcaaggaatagaaaagttggtgtttgggcaccaggcgttcgggcgccattgccttgtctctgagttgctgttcattcatcttcctcctcccaacgtccattgttcttgagcgctagtgggttccaacac

SEQ ID NO: 1812 - DNA, 1553 bp, Zea Mays
tccgttgcgatttagttaggccgttaggatttgggcgtcacctcccccgggtataagaaccagttgccgcacccatctggctatcgtgcgtcgtcaccttcgaccgggtgtagaaagccgagagggaggagagagatcgccgttggcaatgatacatggatgcgtcgctaaagcggccttcatacttggtccagggagtaacccagatcccatggaagatgtacgcatgaagctatgggcgcacttactgttcggcgggctcggaatttttctccggtgccaaccaccctccgtggacccgcgccacgacgagagcaagcacctctatggcataatcgacggtaagcaccccaccaagcctttttgcctatgcgtccacttcaggtaccaccggtttgcgtgtggattagtgctctgagacatgagatggttgaacgccggcgagacaccatcgggagcacgcgcgcgccaccgtgaatcctggtgggttgggggagaagatgtgtgtgccgtcaatgagactcgccgtcgatcgggttctagtcgaccacgattagaacgggagcataccccttcgtagtttgatcccaaaccgtagatctcagatccttgggctctggttgtgcacacattagatcagccatggcattttgcataagagcccctatgattttatttattcaacccgtcgtctaggttccgtacggatcagttaatacgggtccctggtttttgtaaactgaccctatactttccaaaaacctacaccgccaacgaaagggaaatatattattgggccatttctacttcgttttggtgattaaatgctcaacacattatatttatactgacatcatcttacatgagcaatgatcataggtacataaaagcaaattgagcttgaaatagggcataatacaaatctatatggtaccaagtgaaaagggtaagctccggacacttagtcaattattttgggtactaatcatatttttctaagtgctagggactttacgaagtcaagccaaaaggagcaaaaaagattctaaatagaaaagagaaagttggactactatgtgtagcaccggacggtccgatgccacccaccggacagtccggtgtgcatcggacagttcgatgcacggtccgaccaaatggctgctctggagaaaaatcagcaagcgtaggctataaatcatcagaaagtccgcacggagcgcgggacaatccaatgtgccagccgaccaatgactagtagacacgtcggcctgggaccaacgatcacttggagcaccggacaatctggttttctggtaccacccaccggacggtgtggtgcccctcagaacgaggtcaccacaacgtggagtaggcattggccgaaccacgggataaaatcattgtgtaacttgtgtatttctttattgtgattgttttcttccatagagttctcacatattcacttgtgttattgttcctaagtttgatatatatcttaaaggaacaatcaaatgaagagttctcttcttctctctacctctattcatctcagg

SEQ ID NO: 1813 - DNA, 1561 bp, Zea Mays
cttgcacaaaggtctaattttaaaccctatactaccaaatagggtaccaaacacccccctgaaggcatcccaacagctccttaatttcattcccaaattcatgttttaggaaaaaaacaagaaaacaagcactccaacaattccctaattaccttccctttcctcccgcgcgcgcaaaaacccagtcgcgcgcccagatatccgccgtcctccctcgaccgccgtcgttcgtctgctcgaccctcgtcccttcatctcctcgacgacgacgaccttcatccaggccacgcccctcgtcgccgagacaccgccggcaaacatccaacacctcgacgacatatctaggaggcagccccggtcggaagttgcggcccactagaggcccatcgtcgggcccagccccaaccctagctccagccgccgcttggctctcctgctgtccgtcctggtaccgcgcggccgcaccacctctccaggctccagctccagcgccgcagcgcgctcgcccgcggcccgcgcctcctgctcctgccctcctctgtcctctccaggctccagctcgcccgtcaggccgccaccgccaggcgctcgcccgccagcgcgctcgctcgccaggccgccaccgccaggcgcagccgcccacagcggccacagcgcgctcgccccgtcgcccgccaccgccaggcgccagccgcggagcgccggaggcccggagccgcaggccgccgcagcgctcgcccggagccgcaggccgcagcgcgctcgcccgcagtggtgtcgtcgtgctcacctacgagctccgcgaccgcatcgttaagctggtttactagcttacccacgcacggccgccgccgcctcacgcacgcagcagccggccagccgcggtacgttctccaggtcgtgccgacgtccgacgacaaagaaggccctgggggcgctggcgcgcatcgcgagtcccctcgccggcaagtatatttgcaagcagaccctcgagctccctcggagggcaagttcccgaaccggggaatcaaggacgtcgtcaggagcatctgttgcgggaacgtagggaaaatgtcaacgaatcctgatgaacctaagagtcgtgcccggacagactttttgctcaacaatgaactggaggtccagaagttttgggatgagaacacggtttttcaggctgatcctggcaatgactctccaagccccggggaaaaattctttgggaactttccatacccttacatgaatggcttgctgcatctgggtcatgccttctcattgtccaagcttgagtttggtgctgcataccacaggcttcgtggctccaatgttcttttgccctttgctttccactgcactggaatgcccatcaaggcctccgcagataagctagctagggaaatccaacaatatggatatcctccggtgtttcctgtggcagagggttctagtgctgcagtagcagatgctacccaggctgaccaggctgatgttgttgccccagataagtttaaggggaagaagtccaaggctactgcaaaggctggtgcacaaaagtacc

SEQ ID NO: 1814 - DNA, 1569 bp, Zea Mays
aaaacccgagctcggcgctgccttggccatctagtactataccgccgagggctatcatagaagttaatagccaccgccgtcgtgagcaattggggatcagagtgagccatcagcggggcgaagagaaaggttgcggccaccgttagtgatccccttccatgcctctatactgcgctcaaaattgtgcccaagttcttcatcgcgctaaattgaagactcctaaagcttgaccggccgataatcccttgtcggccttcacagccacaacgcctcccatcgccgtggctacaggccatcacctcaccaactctgaggcgaggtgacgagtaacttgaagcccaacttttgggtcaacgcctattatcacaagtcacaggcatgttgtgcccttgatcatgcttctttacctaataatgttcctgttaatcactgtgacatgctcaggttaatttgatgggacccaataggtttccctagttttatttaccccacaccttacaaacaaatgaactatcgggtagactcgctattgctctacctggatttgggattaatgttatattgaattatgataatgttccattaatactgttagtttaattattgttcacgataagattattatgttaaatggaacatggatcaaccacccaggaaaacagtgctaccaaaagggtggaatgggacacccttagttgaataattaggaaagctagtgtgagttaatcctttcccaaaaagggcaagtggggtggaggagtgcaggtgtagagaggtcctcgggttggactatatttttagctttccgaaaaaggaattcctacatcaccttcggcgcagaatccgtagcgggttctctcctctagtggaactttgtaaaggcctcgcagtggatccctagccattcaccttagaagtgtccaagggtctagctaaccctggctaaacaggaaagtcttgtgggtaaagatatgcaacctcagcagagtataaaactgatatatcaaccgtgctaacgatcatgagcagctcggaccctcacatgagtaacttatggaactaaacttaatctgtcatttgcattgcattgtgggttttattattaattatgatcttttatttaaatgggttggtatctacttatacttagtaactgctaataaaatttgaccaactctaaaagcaatattcagctttaatcatcttctttggtaagccttacaattcacctgaacccccatcgtaagtgagctcatgcacattattccccaaaacttgttgagcgataaacatatgtgagctcacccttgatgtactcacatccccccaagtcaagaacaggtactgcaatatggggagcaggaaggatgtcgcgatgagttcgtgagaggtctaggtcatcatctcccagtcaactatggttgcggaggatcgttgtcttcatatgatgtaattatttagctattttgtagagaactcctattatatagtaaagatgtgacattcatttttgtaccatgggtcatcatatgtgtgagacttgatcctagcacacatttgattcgcgct

SEQ ID NO: 1815 - DNA, 1575 bp, Zea Mays
cctggtgcatgtcgagggaaaacttcactcgtgacgctttaggggcgcgagtggggggatctgcctttaaaaaggggttgatcccccgggcagtaggcatgcctcgctcctcttgcgaccaccgcgtcctttcgccttccgggcctccagatggggtgcgccggtgttctccggaggggtccgcgtcaaggtcgtctcttccggcgactttaccgtcggagggcgggcacccatggtggtgtcgtcgatattgtcttcttcctgccgccattggaggagtgcaaccccatgggggttggcatcctttcaccgcccttcggctttaaggattttcatcatgcagcccggctgcagtcccctgccggtggtcatccaaaaggatgactaccagccttgtggtggggagaagcaaaccaggctgctgcctccctcctgccctcagcttcaaggatgttcatcatccgtgctggggaggggggtgtgccgagttgaggctccacctccgcgtgggtagcgacctgattcttccctcagtgtccgggggagaagggcgttcgccgtctgtggcgctttcagctgccgcgtgcctggcttctcggcctggctggcactggcaccgcctccagcgctgcatcctgccgctgggacggagcgtggctgcccgtccaccgcacgagcgatggtggcgctgtgcgcgggtcggccacatccacggcttctcccactcctccggctgcactgggaggctttacaagacgttgtacaccgtggcagtggctgtggcgttcttggatggtcttgtcctcactcctgttggtcgaaacaggggtgaggaccccttcgtgcgtgctgaggtggtcgccgtcgccggtgaggctgcctcttgcaggagcggttgcctccgctggtgagggcatcagagccatctatcgctgagtcccctactccttggctttagtggcctcgttgtcaccccctgtaggaggacaggtgcgaggacttatctgcagcggcgcacatgctgggatgattgccgctgctgccgagtcgttggtgcaaaggcgaccgtcgccatccgtgctggtgcggttgcctctaccggtgagccgctcggggtttgttatcccgtggcccttgctggtgtggaggtagttcattcctgcacaaatgaagttgggtcccgcttgtaagggagtgtaatgacatctggttgagagcaaaatgtaatgacatatgtatgcagggttttagcctgggaaaccaagttgtgcgtccgaaccccctagatggaggcttcaagtactaagacacctgccgcagggcggtggagtatgcaggctcacggcacgggaccaggctgagcggctacatggctttcggaccaccccaggagacaagtgcctactcttcaaaaccggacctccagttcgttggacgcacaggactatagttttaaatactaggacacccgtcatggagtggtggagtgtgcaaagttttgggtacgaaaccaggctaaccggccacacaggctccggaccaccctatggaacgggcatccgttctttagaaccg

SEQ ID NO: 1816 - DNA, 1577 bp, Zea Mays
gtggcaaaaagaataatcctcgcaggttttcagcataatggttgacaaaaacagtggagcgcaaatagcatatgagttaacgttatcaactatccactacgttacaaatatgcaaaccaaaggataccttagcggcaataaagtacatagtgcgccaatcactcaaccaacaaacaacgatagtttggtagaacaccacatcaaaagcaaacaaagtgcgagcaacactctgtacgaaggaattctttgattagaggaatctaagaagtaaactgcatcaacttccatttatgtttctgcaaaatgttatttttgttttgtttctacataatgttatttatcgcagtaggcaactgtgttggcaaattcagcactaagttattatgaaccaactatttatttaatcggaactgatagatgtcgaaggtaatgtggtggcaagtatggcactctgttgcattcaggaaacccatactgacaacaggacgacggcgtacatgtcttagcagttcatccgttgatttgttcaaatgaaacatatgagttaggacaccagccaattcaaacattcttaatgatctctgcctgaccatggatgtatataatcatatacactttggtgtaatatttattttgtttatagagactcgcattcttgaatctagcaatttgacaagcttagataattaaatactattatcagacctgtggatacttgtctccttgtcatctttgcatgaagcacaacttaaacgacataaactgagcagtgtcgtgcctaactgtatttagaattctaaatttacatagatatatgtgatgtctatattctggactaataccaaattcaatagatgggctgaaactacatatgggatgcttaagcacatcggaaatatgggatgcttaagctcaatacagttgatatatggatgcttaagcacattagaaatctacattgtctgacttagtgtagtctgtacacaatgaaaaattcaagtggttaaccatcaaataaccagagagtgtggtcatgcactaaattcaagctcttaaccattaagcaacaaatagaaagtgaatgtagaggataaatagaataacaaggaaaataatgttcatgacaaataaaggcaatctgaaattcaaggatgggttacctgatataccttggtatttttcttatcattcagaattggactgtcttcgttcttcaatggaacataggagctgctccggcgtccatttcctgtactatatgtagaacttcataggttgggtaacagataaccgtggtaatagataaatttcaccgaacctccttcaactatttgttcctatatgagccttacaaattcccagattactctgtgatgaacttaatcttaggcctcgggatagcctagataactctgtttctccccaaaaaagtatagttccaagaaattgatgtgccacatagtgacaactaaggaagtgctacatgaccacacctaatctaaaaaaatgcaggtagtctatccatatatgcatgtatctaaatgtctgtatccagtgaaacaggaaacaactatcta

SEQ ID NO: 1817 - DNA, 1585 bp, Zea Mays
acattcaatacacacacacactttggagatagagcggaagactttacaaacatactttatatttccaaaactcaagttttacaacataaaaaattataaatattacaagtcctgatatactcaaagtgcataacttattaccatagcgggaaggtagaacccttccaaagttcacacataaacctaactaatcctccttcaagactggaagcatcttccagccacagggacacctagaaagctcctgattacctgcaataacatgggttcgaaaaccctgattatgaagtgtacttttgcaagtcttacccgactaaggaaaaagactctcaaggatatgctggatttgggaatcaaggaaaggcttttagcaagaatcaacttcaatagtttgcagaaagcttactaaaatgagtccttactttgaatattttaatgctagattaagcattaatagaccttgtttgcatctagtctaatttcataatcacattaatcaatacaacatgatttttgctcattatgattccatccatgacttagattgtaggtcagtgaccaaatctccattatccgaggatataatggcgatcccaatcgatttacccagctggggatccctaaccacacgacatatgtagcactgaacccttgcatatgccaacctgtcccctgctatctcaagaccagaccaggttcacgccaaccgagagcacaattactccaccgtccagcctcttgccacggagggtacacgctactctcgccatctctccactcctattgcgtggtagcctttctggttgtggtcaagctaagattaggcttactctgtcccatactagggcatgtggctagttaatatagttctcgatcatcaagcctacattccctataatcctgaatcaacctgggcagaacatcacttgttcctagcccaagtctcgatttaagtacttccatccataggattgtttgtgttccttaggatgattaaaccatcttagggaaccttgcattagatctcccaatgatcctggtgaaaatatttgtgtaggtagagccatccttcctcaggataaacctgagctagacattagtgcaaaggacaaactctatccgcaagacttacctctaggcagggctaagaaatttttgtaaacaatatttgatacttccaaagaagtatctataacaggaatggatatcaaggtagtcaatgcatcaaatagtttccaagcaactcctataaacttaatgcagatttcactagacttaaagtgtataaaagtcttctttaaaaatacaaggaaggggttgcatgcaccggggcttgccttattgcagtgaagaggttctagatccctctattaaatacccagttagatggctcccatcacttgatgagcaggcactgaagcagaccgctcttcagaaaccacttcttgaatttcatcttcttcttcttctgggaattctacatgtaaagatatggatatgaatgcttatgcttatgcaacttgaaaagaaaatactgaaaagaatcacaaggcttacacctctctaaaggtgcacacaaaaacta

SEQ ID NO: 1818 - DNA, 1587 bp, Zea Mays
caccaaccaaaccaaggagaaggagatgccgagcgagcgtgggactggaattcgtgcttgccaagcaagcaacaggcctgggctggccagagcgtgcttgagttgagctccacgatctgggcctgcatctccacgaccgtctcctgagctgctgcctcactcagcttcgcgggagagcccgggcagttcgagtgctgctggaacgctgctgctccgtgaggaagggtcttcttcgagccggtcgggcactcgggcgacggtatgggactcgaaggtgcttgcttcatctccactccaccatctgcatgccgaagccatcccttcaccccagtggcgaatctgcacttctgcagtgactctacttcaagttgatttagatataggacttgaaggttctgatgagcaggggtataggcaacagaaaatcacctgacaatggcagctagtttgtttggtcactaaaactgtagaggttggagtgcagctcacataccccaggcctccttttggctgcaatttcgcgcagtcagcactccacagcgaagcagtttaaggaacatggaaagatgatacggcaacgactgctatgcaagcagtccttctatgcaagcgtgcaatcaaatcatctgatccattagattatgatccaaccacagacacaactatagtttgttagaggtttttttataaagattattaagctgatggtgaaagggttaaatatgaccaacggttcgattacgatctaatgaatcagattatttgtttgcacacctgtacagaacgactgcttgcatagcagtcgttgccagatgatacgggttacactccaaatggataaataaacccagacctttggcacaagggtcttgctgcttggtcacaaacagctgcttcaatgtgcaccgagtctgactgaaagcgtgctaagcaagatgccggtcaggcaggctccagtcgcccggaagacgccgcctccacctgcgcgcctccctggtccctccccacggccggaaggttcccctttcccgcggccgctcgcctcccgccgcgtcgaccgtacgcttcggaggctacggacctgctgcaacgtccgcagtggccactggccgcgccgccgcctggcgtgaagtgtgcgaggcgagcggagtgagggtcgcgggattcggatttcagatcggtcacgtgagacgtgagacgtgagagcggagtgaaggctgcccgttgcagcctgtagaactagccctaaaaagactagtttgggatttcagtttacattttggcttcatttatttatccagaacaattggtggcaggaaattctataaagattagttcgggaatctttttttttaaaggattttatttttttaaaagtgaaattaattcattttttcttgagaaaatagaaatttattaaaaatatgactagctctaaaaggtagaaatataaaaagataaaattctaccctggcctattgagttttattagtttcttttcgtgggctggaaaggacttgataatttggttttggactccgcccactatatccaaacaggtttctataaagttaaattacattacat

SEQ ID NO: 1819 - DNA, 1605 bp, Zea Mays
ctcgatgaccctgtatatcttcccccgccgccgagtccgcgtcgtcgccaaactcgctgctgccgcgcaattcttgcgaagtgggtacgaccgacgcagcagggatataagcctacgcctcagaactcccagttcccatctccgctacagaaaaccccagcaccagagaggtcaaggagaggagtgtcgcttccatgcgccatctcaagcgaacctgcgattcagtctcgggcaactcacgtgggtggccaacagaagattgcagaagcgcgctcggggttcgcctgtgccatgggcggactggtgtacccggaattgctcgtcagagcgggagcgctgccgtcgtctgccttctaccatgggcagggatcttcgcggcataatcagtgacgagcaagtgattgaggatccaggtgttcagcaggtagaagttgctgagcaggagctcattgaaggcaagttgtgcccttgaccacttttatttacccaataatgttctttataatcattttggcatgcataggcttaattttgatggaacccaataggtcaccctagtttggtaatctttacaccttgtttatccctgaacttttgtgtagtctttgttattgctatatatggttttgggtgttgagatacttattacatatggtcattctttattattattattgttctatttctgttcatgataagactattatgttaattggaacatggagcttaacttgagaaacacgtaccaccacaaggcttgaatgggatgccattggctgactaattaggaaagctagtggaggtctaccttacccgaaaggggcaagggcagtaggggagttggcgtgtagggaggttctcgggttgattttgctgtgatggcggtcagacgggggattcctgcattgagcttcctggaaactgtagtgggttttccgaagctagtggaactttgtaaaggcctcgtagcgttaccttgcctcgcttccttggtagaggtgtatggggtccatacaaccccgtggcagatgggtaacatgacttgtgggtacatggtacaacctctgtagagtgtaaaactagtatactagccatgctcacggtcatgagcagctcaggactctcgcatgattaacttatggaattaaattcaatttgtcatttgcatcacattttggtttattattaattttgatctattattactttggtttggtatctacttacatttagtaactgctaataaaatttgaccaacttattaaaagcaatgctcagctttaacccttatttcttgatcagccttacacttcacatgaactctcacctttggtgagttcatgcacattattccccacaacttgttgagctatgatattttgtgagctcacccttgcgatatataatccccccccacatgagaagaacaggtgctccagaaggagccctacaatgaggagtacgagcttatctaggtggcgtctcccagtcagctttatggcgccaaggattaatatttagttcactttactgttatcatttatttatgtaagacttccgctatgtaataatgatatttgtgacatttatctctatacactttgt

SEQ ID NO: 1820 - DNA, 1633 bp, Zea Mays
cagccatgatttaaatagaaacttattgtcaaaggaagtttgttttttttatatggtcgtgcacactggttaattcagttcaggtcgtatgtttatctttccttgctagccgagtaataatacttagtatgttttagtcatgatatatgtttatactctgttgctccctcttttatgcaatcttgcaaaggggatgctgccgaaattttatatatggacgtcggaagtgtagtacagtagcataccgggttgtttgtggaacctggagtgttacacattgtcccttcagtcaaggggtaaggtatgatgatgcttccatcatattccttaaccatgtatcataaggcttctacttgataattgcgtctggacaactgatatagtttatgtccagttactggtctgtttaatatctattaaggattgccatcactctcaataggtatttgatagtagtcatttcctttgctactatctattttagtcttaacatcatggttcctttatgcattcgtcttggatgtctgttggaaaggatcaactcaaataagtcacactgtcatgtggatggtcctcatgtttccctgtttaaatatggtcctcatgtttgcctgttagaaggtgttccaattgaagtcatctagagagctgacattgttttggaggacattcattccaaaaaacctacgaggcgtgtgatcagtgaaattaacagcaacagacaagagcagtaccaggatgcagagactaaaccgatggccttcgacacacaaaaaggtgacctgaacggcttcttctaggaactatttcccttctaattcaatttttggtgactaatattggcgaggatcccatctagcttcctaattatgttggctttcactagtgtcccttcagtcaagggtcaaggtatgatgatgcttccatcatattccttaaccatgtatcataaggcttctacttgataattgcgtctagatgatcaacatagtttatgtctagttactggtctgtttaatatctattaaggattgccatcactctcaatagatatttgatattagtcattttctttgctgctatctaatttagtcttaacaacatggttcctttatgcattcatcttggatgtttgttggaaaggatcaactcaaataagtcacactgtcacgtggatggtcctcatgtttgcctgttagaagatgttccaattgaagtcatccagagagctgacattgttttgagggatattcattccaaaaaacctacgaggcatgtgatcagtgaaattaacagcaacagacaagagtagtaccaggatgcagagactaaactgatggccttcgatacacaaaaaggtgacctgaacagcttcttctaggaactatttcccttctaattcaatttttgggcgagtccattctacttctgggcatatttcatcgattccagcagttcatgggtgatcatatcgacgctcatcaccacaaggtgctggaagaaggtttcgacaacatttcaagctaacaaggtcaagactagatgatcctgcattattcatgagtccttcgctcgcccagcttgaaagaagtttatttgaaagcataattcatgttgggcctgtgcttcgtcg

SEQ ID NO: 1821 - DNA, 1643 bp, Zea Mays
tttcttaactatctcaaatgagggatgaccaagacgatagtgccacaagttaggagacgatctggtggcaccaagagcttttttcagatgcgtactcggtatggggtagagaccatttttacatcggccttcaaatagcgtcctcttggtagcttgatccttaacaagaaaatgatttggataaaatgcaaggtatgcatgattatcagaagtaagacggtgcacagatataagatttttatcagcagcaggaacatgaagaacatgattaagtttcaaattggaattaggggtactaataatagcatgaccaatgtgactgatattcatacctgcaccgtttgctgcacggatttgatcttttcccttgtacttctccttcatggagagtttctcgagctctccagtgatgtggtcggtggagccggtatccgtaccagtttgtgtccactccatatgaatgtgtcgcagccgatgcactcctctgattgggataagactcctcatcgagcctgtaccagcattccagggcggtgtggccaatcttgtcgcagatttggcactgtggtttgtcgtcgctgtagctgctgttgttgaagtacccgcggccaatgccacgtcctcctggtgtagctaagccacggccacgaccgccggagcggccacggccaccaccacgaccttgctgattgccacgaccgcggttattgctgcctccacggccgcgtttggccatgttggcagatccttgcgatccgccatgcagtagatccaatctgtgctcaaagctcagcagctgagagaccaattcacccactgagatagactcggtgcgcgcccccaccgccgtcacgactggactgaactcctcatcaaggccgaccaggagataagaaaccagctcttcatcatcaactttctttccagccgaggtcatatcatctgccaggaactttatttttgcaacatactccgtaacagacatgttacctttgcgggtcgttgcaagtgcgatcctcgtgttgacggttctcgcacgtgaggcagatgcgtacatccgcacaagttctccatacacctcttgcggtgtttcgagtgtggccacttgggccatcacctcccgtgacagcgacgtcatcaggaacccaagcacctgctgctccatggctttccaggcagcatgatcgaggttgggcaccttcttgaccttctctccatccttggcttcaagttctgcatgtggaggagtgccggtgccgtcgagatagccctgcaactgcgctcctcgcagtatgggcaggacctgcgccctccataaagggaagttggtattggtcaatttttcggtgatgacctgaccgaacaatggagacgcgacgttgagcgccgaggagctcgccatggcgacgggcaagactcaggcgacgctagatgtatttttgtgggacctagctctgattaccatgaaagcaaccaggaatgtttaggaagcgttctcacctcttcagaggccgcgtagctttgttaatatatgcagagaagagccctctgcatggcgtacaaattaccaaccgaaatcaaggagatgccggtattatacctttctattttacaacaaccatatctggactttcctatcttta

SEQ ID NO: 1822 - DNA, 1650 bp, Zea Mays
gtcgctgtcgtgtgccactgcatgtggacctagcatgtcagtggctcttcccgcgcgaatctcttgttccggcgtaacggacttcgcaatcgtcggccgccaccgctattcccctgcttccgtgtgcgtcgtggcttcggcccttatatgacggcaccatgaccgctctgccttcgtggctaacttggagcgggtgagaaaacgccaatgccatgagtcgtgggaggggaagaactcgcgccaccaccgtcatcttgttcgcatcgccgctcgaggcctttgacggggtcggggtgcatcgccggtgcaccctgagcacgagggtggaggttgagggcatcggagttggaggcttccctggaattgctcgtcggagctttcactgtcgtgctgtgccttagtccaccgcgggccgagctaccgcgcgcgccaccttcgacgggcaagtgactgaggacccagaggctcagcaggtggaaaatactgagcaggagctcgttgaaggcaaattgtgcccttgatcacttctatttacccaataatgttcatgttaatcattatgatttgtataggttaattttgatgagacccaataggtcaccccagtttggctatctttataccttgtttaccactaaacttttgggtagtacctgctattgctttatgtggttttgggtgttaagatacaaattattcatgatcatgcttttattatcaatttgttatttactgttcatgacaagatcattatgttaattggaacatggagttaccacccgagaaaatagtgctaccacaagggtggtatgggacgccattggctgactaattagtaaagctagtggaggactaccttaccaaaagggcaagggtagtaggggagtggtcggtttagggaggttatcgggttgattttgttgcgatggcttttcagacgggggattccaatgctgcgctccctagaaattgtagcgggttttctgaagctactgaaactttgtaaaggcttcgtagtgttaccctacctcgcttccttggtagaggtgtatgggattcatgaccccttggtagatgggtaacatggctcatgggtaaagatgtgcaacctctgcagagtgtaaaactggtatatcagtcgtgctcacggccatgagtggctcggaccctcacatgagtaacttatggaattaaattcaactggtcatttgcatcgcattgtggtttatcattaattttggtctattattactctggtttggtatatacttatacttagtaactgctaataaaatttgaccaacttattaaaagcaatgctcaactttaaccattatttgttgatcagccttacacttcacatgagctcccacctttggtgagttcatgcacatcattccgcacaacttgttgagctatgatcttttgtgagctcacccttgtgatatataaacccccccataggagaagaacaagtggtccaggaggaggcctacaacgaggagtacaagcttatctaggtggtgtctcccagtcatcttgatggcgcccaggaataattattagttggctttatttttatcatttatttttgtaagactcttccactatgtaataataatatttgtgacatttatctctatacacttg

SEQ ID NO: 1823 - DNA, 1651 bp, Zea Mays
tgaccaagttgatctacttctatcatctcaggcacctcttcctgcaatacctctgcatgtatcgcatcagcttgttgaccaagttgatctacttctatcatctcttctgtaggttctacaacacatgtgtcttcagaaaagctctctttgtggtcaggaaggataacaccatctactttaactagttcatctgtttttgcatttccatcggtagtatctggaatggcatcggagatgtccagattgatctcaatagaagtttgaattccagaaggtgcttcggttattacatcaacatcaggagtgttggccgtgcttgcaggttctgtgttctcagttgcattttctggtcctagatcatggtattgttgaccttcttttgtttgtccaatagcttcttgtgtgtcttcctgtactgtgttatttgtagcaattaagttatattgatcttctggaactgcatcctcaagagcaacactgctttgttgcactggtgcttcagtatcaactgcttcggcaacttcactttcttctacagtagcttctctttcttctaatgattcctggttctgtgcttgaatatttacaggtggctcccttgttgtcgtgtcatattctggtgttgtctcctcagatggtggcatgttgctctggttgcctgtttcttcagtcttttcattcactgggtcattggtttcttcagcataatcttgattcagcacttcaagagcatcagttgctggctcatcagcatgttcagatttaggcacctcttcatccaccacgtctgcatccattgcatcagctctctggctttgctgatcttctacattggccacctcttctgtaggttctgcggtagatgtatcttcaggaaaactctctttcttttcaggatggataacaccttctgttttaactagtttatctgtttctgtgtttccatcagtagtatcaggaatggcatcagagatgtccagattgatctccacaggagtttgaattccagaaggtgcttcggttgttacatcaacatcagcaatgttggccatgcttgcaggttgtgtgttctcagttgcattttctggtcctagatcatggaattgctgaccttcttttgtttgcccaatagcgtcctgcgtgtcttcctgcgctgtgttatttgtagcacctaagttatgttgatcttctggaactgcgtcctcaagagcaacactgctttgttgcactggtgcttcagtatcaactgcttcagcaacttcattttctgctacagtagcttctctttcttctaatgattcctggttctgtgcttgaatatttacaggtggatcccttgttgctgtgtcatactctggtactgtctcctcagatgttagcatgttgctctggttggctgtttcttcaatcttttcattcgctgggccactggtttcttcagcatattcttgattgagcacttcaagggtatcagttgctggctcatcggctttagatttaggcacctcttcttgcaccacgtctgcatccattgcatcagcttgctggctgtgctgatcttctacattggccacctcttctaaaggttctgtggtagatgtatcttctagaaaactctctttgttttcaggatggataacaccttctgctt

SEQ ID NO: 1824 - DNA, 1658 bp, Zea Mays
ttaaaatcggattgtagccgtcagaatcggcttctttctgccggccaaatactccgcttgtcagataatcgctttggtgaaaatcgttcaaatcaacgcgaacacaacatccgctgattcatcgcgatggaaataatccgttctagatcctaaactctactgaccccttcctcttcctccgcagcgtaagcccaaaatattcagattctcccgcaaccaaccagattctccggtaattcattcaaatgaagtgggtatgttgtggctttcttgcttagcctaaaaagaactggaattccccgggcggcgaaggccctccctttcgtgcagattccacgcgatcaattcgtgggtcgtgacagcgagcagtagccagcagcggatcgatcgatctgacaacggatgggcgggcgccaccggccgcatgtgcgggtgtgtcctgccagcagcaaggcgcgccgcgggaggcagccacggccgatcgccctcaccccaccggcccacccacggccccgcgttcgcttcgctcggccgggggttaacgcggcgcggcgcggcgcttgaccacggtgcgtccatgcaccagcggtgcccatcggccatcgccatcgccgacaacgacaacgacgcgaggctcacgagagcccatttgtcatctgcgctgcagtcggtaaacgattctttttcagcgtgatttcacgctgatcagtccgccagccccgctccacgtgaaacctcttcgtcaaaggaaatccgatcccagtaccggtccaccagcacgagctgcgcctgcgcctgtcgctgtcggcgtccgggcgcgcgcggaggtgagcgctgaacgtgcgtggtgggctcctcaggccgtctcgccgccggcggtgattaggtgggggttcgtcctcgtctggtgaaaggccgtcatgctctactctcttgccaagttgccagcatccatgtagtacgtcttaatttctatggtgtccgtccggtcaccggcggcgaggcgcgacttgaacgggctttttttttttctttcatttctactgtatttgtatctcaggtcgcgtcactgttcactccacactctaggatggttttctctagtcgctcgcgggtcgattttctctgcgtgagacaacgatggtctgaccactcgcgaagccaaccatttgatctgtactctaacggggtcagacgaacaacgctatcttcggcgacgcgcgcggtgagcgcgcattcattcattcattcattcattcattcattcatgcaccgaacaaatcggtccaatcacattcgtatgtattgagtggactaggacggtagaaagggacacctgaactcaatttcccccgctaataagggccatgtcatctttgcacacgctgacatcctagtaatatattattagtactacatgtacttatgttcctacctaatgttgtatataatgtatatatttatagagctacacactatctatttgtatgtttataccacgtgcccgtcttagttttgacaaatccatctagtagtttaagccactcagtatgtatcaacctactcagcactcttgtcctattaggccatgttccaatcccacgagataaactttagcaactatttttagctacttttagctatttagtgatctaaac

SEQ ID NO: 1825 - DNA, 1712 bp, Zea Mays
aggggctaggttttgacagatggtggcagtgtcgacaaagtcggtagaagagatgacccaagcaaagactgcgatggcgacttcgctagacccgtgagcgtgattctacgctgctattgactagggcagagaggtcgctagcacgtctacggttgagggtgtggcggcaactaacatgtggcaacttcgctacatgagtttttttaccgaggtctatgcaatggtaggctgctatcttcactgatcaaatgcatctagggcgctggtggatgttgcgacctcccaactgtgttctgagaagaaatggcaggaggacaagatagaacgcctttggatgcagaatattgaagccattaaggacaagtctgtggccgagaacaagagtcagaacctgttggagaaggttgactcacttgagaaagagaatgaggggctcgatcgccagctaagtgaggagaaagataccgcttaccacaacagggtggatgttatcactcgggttggcgtggacaaggcacatacactttttgttgatacatatcatgatctaggcatggagacaacccccttctacaagtcggggggaggtggggacccgcttcctcgtctggatgcaagaggagttggagtccctcctgtctattgcgacgacctcatgtcttatgcctccctcgttacctgtgaaggggtagcagatgccttgtcccatgagggatgtaggcacttcgaagtctttgaccagagtaacgaggactttgaccacagagtgttccaggtcgaagatgttgtgctaaagagtttgactgaggcactgtatgaccggatgtggggtccccacggtcatggagtcgtccaagagagggctggtcgggtgctggcacaggcgctaagggatgaagagattgaggacctcgctggcttggaaagcttaatggatacgcaagatgctggtgcgaaggcgaatacagaagagcagtcatcgcacgggagggtcggtggtactgaccctgcagcagtggggaccttgcattcgtctgccgctgagcaggttctggtgactgggcttgcgcaagcaaattttggcttcctggacaaagggatggaaatggttggggctgttgaatgtgttacaccattgtcttgttggagttcaacaaagtttagcaacgatggctctgaatttgactcatggtcgtcgtgtagcgaagggtggttgagccctttcgcgaagatggacgaagagtcctcggaagagaatttggatttatttgttgcgttagatgtgtccgcggtggaatctagaatggaggagtcttcatctaggggcccgacgacaactgtggtgaaaagcaaaaggagaagagtgggtgtaccaaaacgaaggctagggagtgccggagcttcaccaagaggaggtgagggctctcgaaggcgtcgtagtatgggactaggaggacctcgcccgtgggtctcactcctcaaggtgcttcgtatgttgcccctgcgccctcaagagagggagggggcgtggtcagaagaggggcctcactggattgtttgtgcgccaacaactgagtgaggttttgaagaacggggccttagggcgctttttgaagacagggagcttaggcttatgttgtttaattttcgggaggctggtctaatcccaaaagcagagcttttgtaatccttagaagatttgtattgtcgtg

SEQ ID NO: 1826 - DNA, 1712 bp, Zea Mays
ggtgatagctttgggagcaatagaaaaggacaagattatggtagccagggcctacaacaagaaggtcagagcaaagtcatttcaagtaggagatctggtgtggaagaccatcttacctctaaggaataaagaccggaagtttggaaaatggtcgccaagctgggagggtccttataaagtaaaacaggtgatgtctggcaacgcttatttgctacaaacattacaaggcaaggatttgcctaaggctttgaatgggtgtttcctcaaacagtaccatcctagtatgtggcaagatgcctaagagaaccgatgtgagcacatcgagttagttgcttttggttcgcccagctccaccaaaagacaggggggcatatgtttgaatcatatttgagcctgcggacggtccggccctgaggccggacggtccgcggtccggacagtccgcgcctgtgggccggacggtccgcgcgtgcgcagaacagattagggttccgagttttgtgctatggttgttagctaaaatcatgggataagctcggaaattagtttgtaaagggtccagcccccctcctctataaatagagaggtatacggccgatttgtaataaacaatcgaatcaatacaacttctatttcgcattttatcctaggagtagttctagtctagtttaggttttagccttccaatccccaattcttcgtctctcttcgactctacgtcgattagaggagtctaggtcggccggcccgagcctagacaccacctaggatctctcctccccgacggggtccctcccgggagcgagatccaggcgtcgtcggcggtcttccgccgcccctgcgcacgcgcggaccgtccggccctagggcgcggaccgtccggccgtcaggcaaggaactcgggctcctgcaccaggtcgcggaccgtccggccctgtgccgcggaccgtccgcgcctgaccagaaagcaccgccgcctcgcaccaggccgcggaccgtccggccccggcgcgcggaccgtccgcccctgtgcagagagcaccgccgctggttctcttgagtaattggcgcctccaaaaaggcgtcaacatactttttggcgactccgctggggaacatatatctaagcttatcaaatcggccctcaatggccggttcaagggatagctctgatatttctccaagcaacatcatagagccaacttgggagaccttgccggctgacgagcagctccagtttgaggagcacaaggagcggatgatccaggaggcgaaagcaaagttcttggccaacttcaaagtggacaggaacaacaaggtcgtccgacatcgggcgacggatccggcttcgctccaacccacgccagatatccccaatgtaagtaataccaacgatctgcaatctcttagaaattatgtagaagatcagcgtgaacaaatgcagaacatcatagggggtatgcaaagcgatcttaagagactagtacgtgcattcgataaatctagtaccgcaaattttccttcgcacgaggttgagttaggagataacgcgcgtaacacatcggctacaggttgtcacgaccagtcacaacccctttatgggatgccgatggaaacataccctaagcaaccgcaaatcggcagcaaaccagccgatctgcacatgcccggaccgtccgcacgtgagcgcggaccgtccgggccaacagcag

SEQ ID NO: 1827 - DNA, 1720 bp, Zea Mays
ccccactcctcctctgcaggttaccgtcctagtgaatgagcataaatgtgcttcaagcagccggattagttatgggaatgccaatcaagcatgggtagcacagaaggccttgcctttactaagaaatgagccttcacttggtgctaagactttgcaaaagaggttacaagacacatacaactgtagggtcagttatgatgtgacatggaaagaaatgcaagaagctctaaaagagatgcatggcaattaggatgatagtttcagtatgttgtacaggtggaaggaagaagttttgataaaagcccctcatagtgtggtggagatagacacccaagttgtagatgaaaatgtctacttccatagatttttctgtgcacttgagccttgtatagaagggtttcgtgctgcttgtaggccttaccttagtgtggattcaactgcactcaatggtagatggaatggtcacctagcagctgcaacagcgttagatggacacaattggatgtacccggttgcgtttgggtcatggagtctgagagcaaggataattgggtttggtttatgacacagcttcgaagggccatagggaatatggagaaactagctatttgtactgatgccggcaaaggtttgatgactgctgtggaactacttttcccacaagctgataagagagaatgtttcagacatttgatgcaaaatttcatcaaaagattccatgacaatagttacagaggaatgtatcctgctgcaagagcatatagacaagctgaatttgatagacatattgggcccattttgcattctgaccctgaagtgattacctggctaaatagagatcacaagttcaagtggatgaggagtacttttgatccagatatcaaatgcgactacatcaacaacaatttagcagagtgtttcaacaactgggtcaaagaccacaaagacctaccagtagttcaactagcagacaagattagagagcttattctggtcttatgggagaaaaggaggagaattggtggcaaactatgtggaactatcttgccagctatagtacatcaattgaatataaggtctagaggacttggtcatttaaaagttttaaatgctggaaatggtcatgctgaggtttttgataatagccccaaacaagaaagacatattgttgatctaggagcgcaagagtgctcatgtctggagtggcagcacactgggaaaccttgtgaccatgccatagttgtcatcactagttttagaagtgaaaagatcgaaaactatgttcatgatttttattcagtacaaaagtttagataagcatactgtagagtcatctatcctataagggatcgttcacagtggcctaaagttgatatggtccctgttgtaaaaggacctttagcaaaacgaggtgttggtaggcaaagaaaattacgaatgaaaggttgtctggaaggtgggagtaaacctaagacaaccaataaagaaggtgtcaggcaaatgaaaagaggccctatacgatgcaaaaaatgtggagagcttggtcatagacaaacaagttataagtgcccactaaatggtacccaaaaaaggaataggaaactatgtaagatttgaaatatgttgtgtgaactatgtgttatttgagaccatgtgaagtgtaagaccatgtgaaatatgttgtgtcaactatgcttgtaggccttatttgagaccaaca

SEQ ID NO: 1828 - DNA, 1732 bp, Zea Mays
ataagatcgaattttattaaacggaacatggagtgaccacctaagataaaagtgtaaccacgagtgctattatggctctggctttggtaatttgcttaatttgcttagtacttagcaacctttcctgaaatatgggcaagaggaggagcggttgatagtggcagctcatgttaacatggggacgtagtcttggctaagctgcctcgcctagagggcctccacaccgacttagaaaccttagctggttgtttcgtactatgtgtattttgtgaaaacctcataatggacccctagccattcacctcagcagtgtttacgggtccgtacaacccaggctagatgggatacatggcttgtgggtaaagttgtaccacctctgcagagtgtcaaactgatatgtcaaccgtgctcacggagtcacagttaagagcaacctggacccttacatgataactagacttaaagatggagaatcgatcgtgatccgatgatttatacatggtttgcttaagtggtttcacttaggtgcttttgatataatcatatgcttatgattaattgggaattttgggatacacttacaattagtaagttaggcgttgttaataaaatattgaccaactaaaatgcttaccgcttaaccatagcctaccttgttaaccttgcataactcctcccacttgctgagcccccaccataagtgagctcaccccttgctaaattttttatcagaaggtgatgagaaagactttgacgaagatattgacgattactgagtctagcgacgctccggtcatctttctgtgggagattacccatgttatttctgctgtactttgatgatgatactatttaagactttttttgtctcgatgatgtaataaagttattatactccctttacacatttattgcattgtcttttgatatattacacttgtgacatcaacatatgtgtggaaagtggttcctgacacacatatgctatgcattcggttttgccccaaaaccgggtgtgaagaagtggtatcaaagttatgctgactctaggtcgttagactagttagaaatggaaagcccagtctattcaaaatatgcttattttgcctttacaaatttattttattaattttgcctttttaaaattcaactaaggtgacattttcttcttgtagatggtgcgcactctccaaacgacccgcgtgaacaccaacggtatccctccacccaggcaggctcctttctaccagttgtggtggaagaagtcccggtggagcaccaccttcatgtggggaatggagtgatcttggaggacagctctgaggagattttggcaacacacactccattgtcagagtctcatgcctttgctgctggagcttcatcttcagtaccgccagtgccagcacctcaagccccgactcctataggcgatgatccggatgattctggtgatggtggagacgatgatgatgagacaaatgagagcacctagaggggggtgaataggtgatcttgtaaaaaacaacttaacaaaacaaacttggactagtattagattagtgaaagctaaggccaagtttgagagaggagtatgagcagagaaaacttcttcacttaattgctcttcacaagatgagtattaaacttagagcaattatgaagtgaatagaagtagagagaatcgcacaacaataaagacaagtgacacaacgattttatgacgtggttc

SEQ ID NO: 1829 - DNA, 1735 bp, Zea Mays
tttgtatttaaaatagaaatgttaaaaaggttttctggaaaaccagtttacaccgaggaccctaggcttttcctaaaccagttctttaacttatacctctacgcaactattcatctgagtctctgacagttcaaaaacccccctaacttctattccttcttccccgaggtccctccccccttttgaacagtacccacgaaaggaaaaagggtggcgcggcttaccggcggcaagggaggtccggcgaagggtggggttggcttcgggaggtccttgaggacacaacgaggtacagcttgatgacggtgatggccggaatcggtcggaccacgtgcgcaggcgggcgagctcgtcagcggcggttgctccggcctatccacggcgatacaggtcaatccaagggcacgtggagcttcacggggtgctaacgagtcaacccctgcaaggaatcgaagaataactcaccgtggagcccgatctacgttcgtcggcagtcgggtgaagtccggtgaccttgatccggtgtctccggtgaggcaaagctcgattcctcgctctgggagcttcactgaggcacgtagagtctatttcgagggttggacggggttgggaatggctctgctggccggtctacggtggcgggtgctcgggcggccgctggcacgtcgtgtgcagggcaagtccggcgatctcttgctctggcgaggtcgagagcgcgcgggggcatacggctgaagccctggctggctttataggcgcgggcaggagacacgggcgtggcttggcgcggcgcgggccacgcggggtcgggcgctaggcgtgctctggcgcgttcagggcgcgttgaacacgtggaggtgttcttctgcccatgttcaaaagcttgccgagatcacaaacgtgcgaatcttggcaaaaattcggcgcaggcctcctcctggcacctagggctgtctcttgtatgtgagttccaatggcagatatgccctaggtagggagatttgcggacgccaaatctggcttgtctccctgtccactccgcgacaaaagtgatgccaaatcaagtcaaacgaatttggcttgggttcaaatttttccagtggatgccttaggtggtttggcacctttttggtattcagaccaagtggttttggtgccatttactaagtgaacacatctgatctttagattagggttaaattttgacttaaagaagattagagagctctagtgtgctctctacttaaggagtggatttggggtctttaaggggtctttttgtaatgtttccgctctgcattttgtaggttataatgttacttaaactttggttaaggattagaatcaagatttggccacttgattaacttatccactgatcccttgcttagaagtctagtgcccttaggggtcttagggtttaacctccttggctcaagatgacaattgttcaaaatgtttgggtaaagcttttgtcatcaacatttcttagctaacccatgtttccaaggttttaggtgctccttctcctccaattaaccacgtgtgataacaagtcatcagtgcctatatgaagccagtgcctgggtaacacctgaggtgttagagagatgatcccaccgaaggggtatctttagtctaatctgagccctggatccacggatcaacgatccaccgcatttaggcaaatggtagggcgacgatctaatcctggccatccatcactgatccaacg

SEQ ID NO: 1830 - DNA, 1739 bp, Zea Mays
gggctttattccagtcttgtggactgcaccgtaagcgtaggagcgacttggaccttggagtgcgctggggctgggagagccctgatcctccagtggtccttagcaggacttgtggcgtagatgtcattccttcggagtggcccgacatcaagttgctcaaagggtcaagcccctaccctggcctaggatggcggagatcccagggcagtgatcattgtcctaatagttgagtccctatcacaccctgatttaaggggtaaacccgggtgcatctcatatgtacgccaaagaagaacaacacatataatgaccaagtgtatagagataaatgtcacaatcattattacatagcggaagagtcttacaataaatgataacaataaagcgaactaataattattccttggcgacattaagctgactggaagacgccacctagacaagctcgtactcctcgtagtagacctcctcctgtgctacttgttcttctcctgtgggggatttatatatcgcaagggtgagctcataaaagatcatagctcaacaacttgtggagaataatgtgcatgaactcacaaaggtgggagctcatgtgaagtgtaaggctgatcaacatataatggttaaagctgagcattgcttttaataagttggtcaaattttattagcaattactaagtataagtaaataccaacccaaataatgagagatcacaattaataagtaaaccacaatgcgatgcaaataatcaattaaatttaattccataagttactcatgtgagggtccgagccgctcatgaccgtgagcatgactgatataccagttttacaatctgcagatgtgcgcatctttacccgcaagtcatgttacacatctgccacgtggttgtacgggccccatacacctctaccaaggaagcgagacagtgtaacactacgaggcctttacaaagttccactagctttagaaaacccgctacagtttctaggaagcgcaatataggaatcccccgtctgaaaagctatcgcagcaaaatcaacccgagaacctccctataccaacaactcacctactgaccttgcccctttcgagtaagttagtcctccactagctttcctaattagtcagccaagggcgtcccataccacccttgtggtagcactattttcccaggtgttatgtttcaattaacatagtgatcttgtcatgaacagtaaataactcatttataataaaagcatgatcatgaataatgtgtatcttaacaccctaaaccatataaagcaatagcaattactacccaaaaatttagtggtaaacaaggtataaagatagtcaaactggggtgacctattgggtcccatcaaatcaacctatgcagatcataatgattatctggaaaattattgggtaaataaaagtgatcaagggcacaacttgccttcaacgagctcctgctcagtatttttccacctgctgagcacctgggttctcagttgcttgcccgtctactcgcaacaatacaaacaaacatggtacatgagaaattaacatcacaccaaacatgagaacatactgcataataacattttacgcatcgtaatgagaccgtaggctcaagaatcactaaattcggagttacggttaaagagttatgattttccgaagttttaagtgtttggtatagaataaactaaatgaataattttaatctatgtttcatgttaaaacaaag

SEQ ID NO: 1831 - DNA, 1771 bp, Zea Mays
gtgtgaatgaagaggagattggtaaacagaaatggtttgccggttaaggtgctttgagtgtaaatgtcgagcatgttggtcttgttggatagccagcaatatcgcactcactcgactcgagtgttcgggactatttggttgccgtaccagaactttgtctagcacaggcaaccatcgtatacatcatttttcgtctctgttagacaacatccaagtagtcacttcacgcgttacttcccttttttcgaaagaaatctggaaagctacaaaaaccgttgcggttattgtgtttttttttcgtgtgtgaccgatttaacgtgttcgttcgccgcgtttacgtttccaagtgttttgaatggtgttttcgccttttagagaatccaaggagggtcctcggagaagcaatcgacatgttctacagatccaagtctctatctattttaaaattcttttctccctgtcatttctcctccgtagagctagtttggcaacttgacgtggttaacatgagacagcaagcaaaacgagggagaggatctttttttctttcgcattctaatcccctctctccgagtggaggagatttcacatgcgggttatatttccatgcgactgtttgaaagtatgaagttatgggataggtaaataatgggatgtattgcaaaaaataaaaacacatattgcattaattacttcttcgtggtagctctaggcttccctggtgtgcatctatgattttaagggctcccggacaaactagacagtagactctttaggctattgtttaaaaaaattcacataactgaaagagataatagtactaaatatatgtttatatataattttagaaaacaatgtgcatattataaactaaaaggaccaaaaaaatatttttttgccggctggatcgattttatacagcagttcatcgtatatagatagaaattttaggcccctttctggcttgggcttccggccgttgcccctctagcctaggctctctgcggggcctgtctagcagtctaggaaagtattggcctatttggtatgtctctttttaaaataaaaaggcaagaaaattcagaaaagaaaatagtataagaaggttactaaatatcaatgctagtactgtataatcataaaaaatatcaaaaataagtttgtttacataaaaaaaacatagccatttcttctaccaaaacctctgcaaataaaataaaacataatggtgaactcttgtaacagatttggcttgtttttctcaacaagtattagttaaaagaatgcaactgcaagaagctaatacatgtagaaacaagtacacacaaaatatttttggctttatttgtgcaacacacatatatacacacactcgaatgatctctataaaccaattgatacatatgccttgtaaaactcacagttcctatatttcagtcatatataccaaactgtacaaaccttcatgtataatgcctacaaaatctcacggtctgcttctaaacttgcatgattgccgcagttaagcaccataaagttgaaaaggtaggtgcttgactcttaaatttgcttatatgtgcaagatattaatactgacttagctaacaaaactataagcggtccaataagaatgtgaatgacattggtatcactacacgacggttcacttttagcaacccttattcaatacgaacggttggttgctaaatgttaagtgctgatggatggcgctaaagatgtttttaaccacagtctattagtcgctaaaaac

SEQ ID NO: 1832 - DNA, 1803 bp, Zea Mays
aaattttctagccacttgagctccctaaaaccactcgcatttcatccatttcctcttggaactcatcttctcggagatactcatcaagacggtgcgacgtcgcaatccctgcatggtggagttcagtagtgactccgacaaaatccaggaggaatctcctattccttctcctctgtctcatcgttctctctccaagagaggacgaggttctggccgattggaaagggaggggccctcgatgccctcgcaacctgcgcgcgggggcgtcgaaaggtaggcgccactcatccccgccaaagcacctcctccacaggatatgctccttgctaggaggaggatggagctttcgacgacgaggtcgaacctccatcgtccgatgctctcctcatcaccggtctccacatgcatccggcgaccgtatcccagggccaaatgaacctccaatcgacttctctttgaagggggtggactcccttcaattcttaaggttcacaaatcccactatcacacccagacatcctggtgtccaggacccttggttctggacctttttcaggctgacttttataattccgtcatcatgtataagaagcacccagtcgttagacatcgtttcaatgactaggaggggtgtgagaatatgggggatgctgacatgacgtcagctctccgtaacttagagagaaaggggttgaaaaatataatgactatggaatacccctgtaacgacgaagtagtggctcagttctatgccactctctgggtaaagaaaattgacgaagaagctgatgggtatgactatccagttatgtacttctttatccaaggggtctggcataaagttagttaccgtcgttttgcccacatcctgggcttctctggtgaagatattcagggcagcaatcttaaagtccatgacattaggctgtccatgcgggaagaaactaaatttattcatatttctttggagcaggagttttggatcactgccaacatgcataggtactataggtaacttaactctttgtccaggatgaccgttctcccaaatggcagaaatcaaataaatgtccttagggagagtcggattctccttcttctccttgctccaaatagtcttgctcgcataaacgtgtttgacatgatctgggaagagatccttcatgcttcttggtctccactcaaggggtgtctccatgcaccctttattatgaagatggtcgaagtggtcactcagactcgattcgagaagcctgtcaaacactcccgctatgtaccatactgggttgattctagcaacctagctgctcatacaaagcgggccccctcagggtctagaggccctgcttcttctgatgagccacctcctcagcctcctcatcatgagtcctcctctcgcgtcgccgctggctcacgtttgatggaccgtagcgggagaggtagaggtcagggtcatggacggggtcgaggctggtgactgttcattcgtctggcaaagggcatttttggcgctttcgccatgtgccgcgaccaggcaatcgaggagtccgtgcacaggcgccgaactgacgcgctgcatgaggactttcgttgttatgctgccaccatgggtcatcccctacctcctaggtcccctccgcctctgacccccaccttccctgcgaaccttaatgagtggcaccaataggaatttggtgtgccattcattactcctgaggatgaggccgaggagtttgatgaatcctactatacctcggctcctcctcctcctcctccctatttgggtcagggacccattcctag

SEQ ID NO: 1833 - DNA, 1803 bp, Zea Mays
caacaagtacttatgcgctcgattcggagttataattcaggagatatcgttgtttgaatccggttatgttgctgtccaaaaaaacagatttttcaggtgggtgaacagcagtggtattagcagtttctggggatttttcgtgggtaattagtgttaaccagtatggtaatcatgtagggatttgtcttatctttccaatgagtacttatgcgcttgatttggaattatattttaaaagatatcgctgtttgaatctgggtatgtcgctgtccaaaagacaaagaaaaacagattacagggttcatcttgtggactgttttggactaattagatattggaatttaattataaattgtatacaaaacttgtggggaattttatgtagatgcctctggagtttttgtttgttaccactgctgtcataattttaaagttatgaaattattaagcagcgccgctgcagtttggtgggtgtaaggagagatgtaacccgcggcggggtttgagtttgtgcgtagatgcggcgtcgcttatgagcctgattatgtgatattggtgtactaagttaggtgtcaaaaacaggtggtggacttccggatcgtacttagggatttgcccgaacttccggtaaaggcaagtaaatacagtggtggttgctaccgtttggtttgcatcctattccctgtcattgagtatgcataagttttaattatgttaatcattgaattctatgatgaagtttatttgtttggaagtattaattctcaattgtctaatattgtggatgatcataatttggtaatgatatatgtggttgattcccatctggatgaagttgaagtgtctttttgaatcatgttatacgaagtgttgtaggcatgacatgcacatcacatcatccatcttgcattttgaagttatgtcgtgatcttatggtccgaccgtaccggtacatttttagcatcgtacgttgcccgaggaggggtacgatgcggcttcatatccttagaggtatgaaggcagaagtcatccttgcatttgcagacatttgcactcatgaggaatatatgaagtgtgactttactatgttactattgtggtttctacctgcgaggtgtggtaactaggtgcgttgtacgttgtatacgtgctgcaccttcgtaataagaaggttgtggaatcaagtggtggtaaaacaatgttcttatgtggttaaactgtttgatattattttacttgctgagatgtgtcatctcactcttgcattactcaatgcaggtacatgatacatgttgggaatgaggggagtagcagcacgtccactttcactctcacaataacgctgcccaggcacagccatgatttaattagaaacatattgtcaaaggaagtttgtttatttttttatatggtcgtgcgcactggttaattcagttcaggtcgtatgtttatctttccttgctagccgagtaataatacttagtatgttttagtcatgatatatgtttatactctgttgctccctcttttatgcaatcttgcaaaggggatgctgccgaaattttatatatggacgtcggaagtgtagtacagtagcattccgggttgtttgtggaacctggagtgttacaaggatacaaagaatataaagggtagaaattatgattaagcaagatttgaacacactatcatgaaaagggtccttatatggcacaaaggtaatggagaagtgtcataagtgatgtacctttgcgttttaccttttcaaaggggtgttccacacttgtgttgtatttagagttc

SEQ ID NO: 1834 - DNA, 1809 bp, Zea Mays
catggttatcgaggcatacaagcgatgattcgtagaatgagcgcagtaattataatcacatctcgattaaccacacacagagtaatttgaactaaaacatagttcatcccacagaatattacagataatagtccacagacatatgacatagagttaatagatcaaaccaagttccaaatgcataagacataaactaaagcggcatgaaaaagtaaaatgcatatgcatgatcttaatgtccacatagaaccaccaactccccctgaaggagacgcctgacaacttctcatcacttcttctctccccctttggcatcaattgccacaaaggagaggccttactgatcactcggcggaggatgcatgttgtaataatgagtgctgaaggtatcaaacagggaggagaactggccaaagtcctgctggagctgctgctgcctctgacttatatcatgcaggttgtcagttgtagaaagattgtcaaactgactggagagagcacccatgttatcttgaaaactttgttgcatattattcagccttgacatgatgggatcagtgacattagtgtgaatttgatcacgaaagtcagaaaattcagagttgagcgcatcctagttgctgtcaaagcgagactgcatgtcatcaaggcggtgatccacatgtgacatcaggccatcaaagcgagcatcaatatgagtctccagcccttgctgcatattgtgaaaataaggatcaaagtatcctggagcaggctcccaatagtgctgaggctgaggaggaggtggaggaggaggcatctgctgttcctcaacattaggagctgctccacccgcatagccagggtcttcctcatcatcggggaatggagtgagtggcctggtgaggaaccctatctcatttttaaaaggcctgaatggagtgtgaacaatctcacatgggccctcaaatcttgtcttggattttatgagagccataatgtagggagcataagccaagttttgattcttgtccatctttaaatcattaagttgcctcatcatgaaaagaacaatgttcatgacttcaccattcatgatgtgctggattatgttccagaacttatctcgaattttgctcttatcaccactcttgggaagaatggtgactctggcaatcttgttgatgacagcaggatgatgtctgagtcctgctgtttctccaaacctcctgggtataccgagcctggctggctcataaaactgcacaaaatcctcaaaattatcttcagtataaagatccaccccagcagaaatggtgccatagttcagactgttggcagcggcaaagtcagcaaaagaagcagaataccgcttgaagccagtcatccatgtgatagattcttctgcaatatcaatctctgaggtagccaagaattgcttaactgccatttcattgaaatcagtgcgctgccccataaactgatataacccacatgtttcaaatttgggaatgagaccctccatgactgattgactgagcaagaaggaccaatcaatcacctgatgcttatgaaagttggtatccaccagggtgccccaaaagacatcaaactgcagctgagtgtggaaaaactgaatatttgtatctgatggcagagcatactggttcacagtctgtctagaacagtactcagccatagaaaatcgccgcttgggataagtccatccttggatatcaatgggataatctggatgaacatgaagaaaatcttcagcatccatggattcagtgcccccagctgaggattgggcctctgaatcagtggtcg

SEQ ID NO: 1835 - DNA, 1855 bp, Zea Mays
ccaagagctacacaacactgacacgctacgaccatgcctgctagttattttttattgagatctgagcatgagttctgtgatgtttcagtgatcttgtgtccatgcgcttatttctttgtgattcttgcatgtgttgctgcattatgctcttgtgtgtgtactctatctccctcccttactttgagttgtgattttgatcatttgtaaggttgtgaaagactccaacttgtggagattcctcacaaacctgaatacgtgatataaggaagaactgtggcactcaagtttgatctttggatcacttgagaggacttgattgcaacccttgcccaaaggaggacaccacaacgtggaggtaggatttggtcgaaccacgagataaaaatcattgtctcttgtctcatttactttattgtgatttcttcttcttcctaagttctcttgagtcacttggaatattgctcttagaatcttccataccttggaagagcgatcaagtaaaggaaacttttctatcatcttctccattcaaacttggttttagcttactctaactttgtttttagaccaagtttaagttattttaagctatcggtgctggatcacctattcacctcctaggtgctctcaatgacaatatcatcgactttagaggaactattctctaagaaaatgagttgcatgtataactcctatagaatgatttatcggatatctctcaagtgaccatgactataagtcaatactttcctatgttaaatttatttcccaagagaaatgttagctggagcaagaggaaatgatcaatgatagccttaaacctgaatataatgggtttgttgttggtgtgagtggttgcccaactcaaccacctttagtcgagttggagaatttattagttaaccaagaggagttagccaaggaaatgggcaacatcatagtaaagaaagaatataagacctcataataaaggaagagtcatttaggagacagcaaatacccaagccaaaataggtagaaggtgacaagtatcatacaaaacaaaaagtccttcaggggagcaagagaaagagttgaataaaaaaactatgtggtaagaatggtcattttgctcaagaatgttgacttccaaaagtgaattttgaaggaaattttgaaaaaaacatctaataataaaagcgattgggatactggatcttggttttctcaagagtataagcaaatgacttagaataggatatagaggtcccttcttttgcagcaataaatggtccaaaaattaactacaacgaaaattggattatttattctatcagctctaatcacatgaccaattatgacaagaatttggaggagatgaccgactataagggaaaggaaaactattgatgatcgacaattcaagattatttattctcgtgttggaaaggtaatcattccaaaatatggtttccatcgaatcaaattcgataaagtatatcatgtattcaaattgaagaaaaatcttctatcagtctctcaattgatagagaaatgaaaatatgttatattcagattataaggtgtgttatatttgagagagttaagtatcttggaagaaaagaagagacaattagtttatgtactctctgttgagcctccttttgtgagaccatggacctttagcatgtctgctttggacttgtcaattatagctagttgaagaaaatggtgcaaaagcaagtattgaagtggttttctcaaattgacttccaaattgatcagctagtgctagttgtcatgtgttagtatggtaaggctcattagttaccatataaggagtcattgtatcaacccgagacattggtagatttat

SEQ ID NO: 1836 - DNA, 1895 bp, Zea Mays
tgagattatctgtgaggttctatatgatgctttggttgaatggaatattgatgagaagacctccaccttgacactagacaattgcacaactaatactgcggtaatctctgaccttaccaagaagattggtccatctaaacttgttttagaggggtcgttgatgcatatgcgttgtgctgcacacattctaaatttgatagtgaaggatggtttagatgtgatacaacctgcaattaaaaagattcgtgatagtgtagcattctggacagccacacctaaaagagtagagaaatttgaagagatggctaagtttgtcaaagtctctttggtacacaagctaggattgcaaaactaggtggaactctacatacaagatgctctctattgctattccatatgagcctatttttaactgtgccactcgtgttgaaaaactttatgactgtgcaccaaataaggaagagtgggattttgcgagacaagtggttgatagactcaagatgtttaatgagattaccaaggtcttctctggaacagattatgtgactgcaaatattcaactccttaaaatttgtgaggctaattaaggtgaaaattacacagtggtctgaatgtggaaatcctatcatagaagagatgtcaaaaaatatgatagaaaaaattgaaaaatattggaaggatattcaaggaccaatgggaatagcaactattttagatcctaggtttaaggttgattatctccttgggttctttgagactttgataggtcaaaatagtgatcagtgtgtgctaaaatttgatgaagtaaaagagtctttatgtgatttgatgaagtactatgaaatggatgagggtgaagatacaacagagtcatcaactcctctacttgacactagtttgttatcaacaattagtgcacatgctgctagtcgaaggccagcgatgacaagagttaaaattgagctagatagatacttggaggatgatttggttcaaatttcaactgagaacttccagatcctagactggtggaaggtggctggaacccgttatcctacacttagaaagatagcacgtgacatattggctattccgatcagcactgttgcatcagagtcagcttttaacactagttggtggattcttagtgaacatcgcagcaggcttactcctgaaattttagaggctttaatgtgttcacaggactggataagaaacaattacaaagatggtgctgaggttaatcaaccaagtttttgggactgcttgcaagagattcaagaaggtgtcgagattgtgatgatgaagcccgaaaggacttggacgtcaagctatcagtttgggcgacatgaatcctattacttgatgctcgcttgctactcttgcttttgtattgttgcttaaatgataaaacatgtactgagagatatttctgtttactgtttgattatatttgtgatgtatggacatgtggctactagaagacaatatttgttttgagtatgttgatgaaactacaaaatatgcatgctagaatgaatgttgaattgtctctaatgtccataatctatatgctgaaattctgaatttttgaataatcgggtcaggtatggatacccatgggtatttagtacccggtcgggtatgcgtatgggaggtttttcgtacccgaggtcgggttcgggttcggggatgggggcgggtctatgttcatgggtacgggtctagggagttaatccccactggggaattccccattgacatctctagtccggtgcccccagaacaggaaacaagctaatcagggatctcatagccattgcactgttcactgtctggtgcacccacagacagaaggcaaccagggccttccaaatggagctccaatggcttct

SEQ ID NO: 1837 - DNA, 1917 bp, Zea Mays
ctaaattgcttgataccatgaatgagtagatagtacacatttagccttaagagagtcacactaaaacttgcaaaagttaaaacttgatttttagactcagctagtgcttttgacaaccaaacccctcagccaaacagctgcatgtctagaggtagaggagtagactcctcacaccgggtaagtctagctgagtattagtatactcagccttgcttgtggcataattttacaggttctctggaggacatggttgctagagtgacttggccgtccatcttgccaccgggttggatagtcgagtggaaccctacctcggctgaggaggagcatgaggagtgatgggataggcttccccatccgccgtttgtttatcgttagttttattccgctgcattccgaacaatgatgactacttttgctaaaactccgatgatgatgtaataaatttaatactccttaatgtatggttttatgctttattgtatttgctctgtgcctcaccatcgagtgagtacgtggtacttgatcctgttagtggcctcgtcggactagatccgagggactgacgtgttattcccatttaagtgtggtctagcctctaaggcgggacttaggcacttaagttggaataattcgtgcggttccgccacttcggcgagcacgcagcgaaacaaccaacagcggcgacagtcgaatcggcaacagagcgttggcgaatttgacgaacatgaccactgtcgcgtgctgacgcagataggacaatggtggctggtggaatccgagccggggaaaatgaacacatgactgggcgttaacgaccaggtccgaacgcgaggaagaaactcgactggcgagctggagcgagctgggcacacgacgacttgaggatgctgcgcgcgcgcacggactcagggcgcacagcgagctaaggaacgatgacgaggtcgcggccgagccggacgaggagcatgtggccaacaccaagggcgagcgtagcagggaaccatgtcccgcctggccgagctgaaggaagcacagaccagagggagtgccacggcgcggagactacgcgagctggagtgctgcgatggggcttgagccggcctgacgacgagctggccaagcaccagagaaagccagccgcgatgctgggagttccggccatgggaagtcaggggcgagtgccaactgagtgcatgaagcagcgcgcgcgtggtcgactggagctgagcaccggtagggacctgcgcgcccgacgagcagagcaggggcgcggctgcgcacaagcggacagagggagggacgaccagagcgtaggggagttcgacggcggccgccatggcgcgcaaggagggcaaactccagggagggcggccaagggaaacttcacgccatgggagagagcagagagaaacgggctgagggaggagcgagcagggagggagcgcgtgcagggagagaaatccagcgccagggaagagctcgcaacagggacacggcgagcagggaggggtaccgcggccatggagatgcactgcgagggagaaaagcaggggcacgcaggagcagtcgaccgcgcgctagtgagggctggagatggggaaggcatctgcaaactccaggaggagctccagcttccaggtcggacgccagggagcttaggccatggcgacgagcttggggagatggggaaaaccggcccgccagcgagccggagcacgggaggcacgaccatggctggagcaggagcggtcggccgagcagcttgcaggggagttccatggctgggaccaggggcgtgggagctagagctgcatggcagggagatgggcgcagggaaaatctcggctagggagatgagcacccaaatgcagctgccgtatttgagcagaggatagggttgaggaagaaaaaaat

SEQ ID NO: 1838 - DNA, 1997 bp, Zea Mays
ctattgcccccgagcacgtaaccctgttgtcaccaccgttcacccttgttggcctacttgctgctgagagcaagttccaacaggatccacctttgatttgataggttattcagatgctgattgggtggggtgtaaaattgataggaagaacacatcagggacttgtcagttcttgggaagatccctagtgtcttgggcttcaaagaaacaaaattcagtagctctttctaccgccgaagccgagtacattgccgcaggccattgttgcgcgcaattactttggatgaggcaaacccttagggactatggttacaaattaaccaaagtccctctcctatgtgataatgagagtgcaatccacatggcagataatcccgttgagcacagccgcactaagcacatagccattcggtatcactttttgaaggatcaccaacaaaggggggatatcgagattgcttatgttagcactaaagaacaattagccgatatctttaccaaaccattagatgagaaaacctttaccaaacttaggaatgagctaaacattcttgattctcagaattttgattgatgccttgcacacatagctcatttatgtacctttgatcatatctctttcatgtgctatgactaatgtgtttttaagtcaactcttatgctaagtcatagattgaaaaggaaatggagtcttcggcgaacacaaggcttccactccactctaccgttattatttacccttcgccgtcactccgcttcgctctccacattggtataatccttcactcatatattgtttgccaaagggggagataatttaaaaagggctctaaagactccatttttggtgattaatgccaaagggagagagagtattagcccaaagcaaaaggactgcaccaccacgccaatttcaaaatttttcgaaacaagttgttttcaattggtatttttcaaattagtctaagaaattctatctcatttggtatctatattttaaggaggagtttttcaaaaataggtatctaaaatatttgatcttctttcaaatagaaaaaccctcttgaacactaagaggagaatttcattaagggagagttttgtttagtcaaaggaaaagcatttgaaacagggggagaaaatttcaaatattgaaaatgcttctcgaaatgttattcatatacctttgactatttgcaaaaagtctttgaaaagaatttccaaaaacatttgaaacaaaacaagtggtgcaagcgtggtccaaaatgttaaataagaagaaagcaacccatgcatatcttatgaaagtttaaattggtttaattccaagcaacctttgcacttaccttatgcaaactagttcaattctgcacttacatatttgctttggtttgtgctggcatcaatcaccaaaaagggggagattgaaagggaaatagggtaaaaccttttcctaaataattttggtggttgaattgcccaacacaaataattggactaactagttttgatgtgacacgatgcctgatcttcatgatgtaggatcaatcttcagataactagcttcaaataagccaagataacttgctccaagcagcgataactagtgcaacctgacaaataaaactcgaagccaaccaccgtctttaaccggcagcctgaatcgaggattcgtccaaccacactctcaaagaaccaaccaacacaacctacaatcaatcgaggagacctcgaagggagtaggagcaccacttgggagtggatgaagccgccgcttctgcaatcacacgaaggaattcacaagagcaaaggggtagagatcactctcaatatttgttagcacacagctgaacaaagggggttctgttttagattatcaaaagctgccttacatcatagacatagggggtatttatactagtaacaaccagccttagcgaggtataaacacgaaacaaaagtattttcacgtgctaatgtgaaggagcctcttcggg

SEQ ID NO: 1839 - DNA, 2001 bp, Zea Mays
cttcctcaaccctatcctctgctcaaatacggcagctgcatttgggtgctcatctccccagccgagattttccctgcgcccatctccctgctgtgcagctctagctccggcgtccctagtcccagccatggaactcccctagaagctgctcggccgaccactcctactccagccatggtcgcgcctcccgtgctccggctcgccggtgagccagttttccccatctccccaagctcgtcgccatggctgaagctccctggcgtccgacctggaagctggagctcctcctagagtttgtcgatgccttccctatctccagccctcactagtgcgcggtcctctgctcctgcgcgcccctgcttttctccctcgcagtgcatctccatggccgcggtgtccctccctgctcgccgtgtccctgttgcgagctcttccctggcgctggatttctctccctgcgcgcgctccctccctgctcgctcctccctcagcccgtttctctctgctctctcccatggcgtgaagtctcccttggccgccctccctggagttcgccctccttgcgcgccatggcggccgctgtcgaactcccctgcacgctggtcgtccctccctctgtccgcttgcgcgcagccgcgcccctgctctgctcgtcgggcgcgcaggtccctgctggtgctcagctccagtcaaccccgcgcgcgctgctccctgcactcgcatggtgctcgcccctgacttcccatggccgaaactcccagcgccgtggcactccctctggtctgcgcttcctttagctcggccaggcgggacatcgttccctgctgcatgctcctcgttcggctcggccacaatctggccgtcattctcagctcgctgcgcgccctactccactgtgtcgatctgcctaactccctgagtccatgcgcgcgcgcggacccggccgttaacgtccagtcatgtgttcgttttcccagctcggattccgccagccaccattgtcctatccgcgtcagcatgtgatcgtggttgtgttcgtcgaattcgccaacgctcggttgccgatttgactgttgtcgctgcgtgctcgccgagtgtcgtctgttgtacctcagcactcgtgcttgccgctggcttgcgttaacgctcgagcgtctgcttgttgtcgctgtggtgcactcgctttttgtccatcgagcttcacgcatgctcgcgctaacctgctcaaccccacctcgccagctcactccagactcaatctcgtcgtcgttccgtgcatcgtcaagaaatacaaagcgtcgggtgaagacaaagctagcagtttgatattcaccaagtgcttgacaaaacgctcgaacaagtcatcgatcgtcatcctcgttgtttacgcctttccggagcgtcaaacactcaacaagaaccgtgacggtgccctctgcacaggggcggacggtccgcgcgcggggccggacggtccgcggtctggtgcaaggcgcggtggtactctctgcgcaggggcagactgtctgcggcctgcggccggacggtccgcggcctggtgcgcggctagggcttttctgcctgacggccggacggcccgcgccctcgggccatacggtccgcgcgtacgcagaggcggcagaagtcgtcggcggcgcctggatctcgctcccgggagggaccccgtcggggaggagagatcctaggtggtgtgtaggcttgggctggccgacctagactcctctaatcgacgtagagccgaagagagacgaagaatttaagaattggatagctaaacctaaactagactagaactactcctagaataaaatgtaaattgtattgattgaaggttcgattgattgttacaaatcggccgtagacctctctttatatagaggaggggggctggaccctttacacgactggattccgggttaatttcgcaaatctagccaacaaacatagcaaaaaactcggaaccctaaactgctctgcgca

SEQ ID NO: 1840 - DNA, 2039 bp, Zea Mays
atgaactttctataataccccactagaccaaggaatcctcaaagttccttactattagtaggaactggccaacttaatttgaactgcttcaacctttgccggatctattgacacaccctgagcacaaatgacatgtcccagataagctatttgttgttgtgcaaaagcacacttggaaagcttgatatgccattggtctttcaacaacaactgcaaaacttgtgttagatagactagatggtcctcccaagtcctactatacacaagtatgtcatcaaaaaagacaagtgcacatttcctcaatagtggagctaaagttgaattcatggcactttgaaacgttgctggcggtgctcccgtcaagccaaatgccataacatgaaactcaaagtgaccgtgatgggtttggaaggcggtcttatgttgatcttgagcattcattcggatctgatgaaacccagcacataagtccaatgtagaaaaccaagctgctccatacaactcatccaagaattcatctataattggtacttgaaactttgcattcaaatagcgatagtccacacaaaacctataagtgtgatcctgttggtgtaaatagttcaatgtaaaaggacctccttgtataatggagtaatatactttgtgggaactgcagcccgagaggcagcagcacaatacaccaaacaacatggtattcagagctagggttagcctcccctatcgtcggtgctgccattggagctcgagctcgagctcgcacgcgtgaggaaggagaaggccgtccaccggccccggagcacgtcagcgagcgcgtcggcagttgggaggaggcggctgctcccggtcgccccaccggccccggagcgcgtcggcagctagcaaagaggcggctgctcccgcaccgcgcaactcgtcgcagaacccgccaccggaccggcccgccgtcaccacggtctttgctggcacaacgccggcctgttgctgctgggcattgctgctgccccgtgggtgctgctgctgccctgctgtctcgagtggtggccgcggctcaggccagaggaggaggcggacagctagaaattgttgtcgtggtgcagtaagaggaggagctggtgcggtaagaggaggcagccagaaggagttggtgtggttgtagtgctgctggttggtgtggctgcagtgctgctgttattggaagttgtatgctagtgtttgtcggtgcttgttgtatagctgcttgattcggtgcttatgtgaagatgagtacagaagagatggatcccaatagaagggaagaagaggctgcaacgaaggtaataattggtggtggttcaggtgggattacaaagagtgagatgatgagtgagatgatgagtgagatgaggattatgatccaggagcttatgtggtagcattaaaaataacacaataaaaactcttactaagaatggcctaaattacaccgctatcgcttgtttgcattcattacacaccttcatatacacgtccttgcaacgatgacagctgacaagcccccttcttcgtggactggattgttttgaagggtcgtacatctactggggtaggacggaggttcaagctcattggtgaagaatcagagctgtctcacgtggggtgtgttgaggcttggcaacgacggcgcactgtgatcttttttcttctgtgctggtgtgtttggttgtaggcgtcgtcgtgttttctttggccatgtgcggcccgttttgcggagtcggagctgcttgtcccttgggtcgagctcggcaacgataactctagatgagttgtgtgtgaggggctcccgttgtcggggatgtttgtgtattttgtaggcggtgagtgttgtgccgtattgatgtcctaatccaatcgacgagtttggcgtgttggtatcccaatccaaccatatgttgttttgttgctatgtccgatccggacccttcacctttattaatataatcggcagctctcctgcctggttcgtttcaaaaaaaattaaatcattattttcataattc

SEQ ID NO: 1841 - DNA, 2052 bp, Zea Mays
tccacgccaccccctggctagtgggcccgtaggcgtagtgccccaaccggatgcttgcttgcttctctaatcttcttccacgacgcacgtcctagaccccataaactcgaaactgcctgccccgactctctccctgcacaaccggctcatcctcccctctctagagctacctgttgcgtcatcgttcgtcggatccgcgccatcaccactcgtccgccaagactgcgatccattccgagctttgagggatcaacgatcaagcgttggcgaccaagtggtcgggctcttcgagttccacaaggttgaagaccctgagcatctgtttggtgaaggcaagtgtcctctgacctattatgtcctacatacttataattcaccgtccaacattacattattgaaacctaaagattgacaattctgtatttccttatccttatttaccttttggggttatcatggttagctttatgctattgctttactttaatcaatgaacatgatgtgaatatttatgatatgatgatgttatcccaatgatgatcttgtgatattttaggggactcaggctattttcctgagtacctctccgtaaggacctgttcgtggagtgacaatccgggataacagtgcggccatgagggtggaatgggatgcccttagctgattaattagaggaaccagaggagtagttggcttcatcgtagggccgtcaatggggtccaggcacagtacttgctctaccgaggctgattgcagaggttctttgatttggttttggttagtcaccctttctttggggagaggtacagtgtttatcaaactggacaaacctaattggtggctatgacctctggaaaatctttgtaaagtctacgtagtgagaccctgctaggtcaccttggaagtgatcaatggagagtcatgatctcctggcagaatggggatcacgacttgtggggaaagtgtgcgacctctccagagggttagaaactgatatatcagtcgtgctcacggttatgagcggccttgggatcctatttgattagagatacagatggtttgatatacaatggttctatttattattttggttcgatgatgataatgatgttcctcgatgaggaaaggattcatgggttggttatattataaaacttggcttccactaataataaatacctgaccaactaaaaagcaactgctttgaccttaacccccacataaagctagtccacttcagccaaacgagacatttgctgagtacgttgatgtgtactcacccttgctttcacaaaacaccaggttgcctttggtgcaatctatgctcacgtaaataagaaggcatctctccaggagttccaggacatcagcgagatcgaggattagcctagcgacctcccccagtcagctgcctgtggtgggtttatttacgttggctacgtttcgattctgtgtactttgatttatattatataaatgctctagtctttaatattataacttactcttccttgttattcaaagcattgtgctatgatgagtcacttatgtaatcgccgtgtacgtgaatttctggtcctgacacgtacatggttcgcattcgatctaccttccaaaactgggtgtgaccacttaaagggattcttaagacgggctctgttaggggcctgcttcatcgccgaaggtcccataagaagaaacaccttcggaagactagcacaaagccgaagctatcaatcaaagggcttcagagtacatttccaaatgcaccgacctaaagatgaaatgaccaattggcccgtgataacttgtattatgattataaacctttgtaaaggatatgaatgtaatttctcacaggctgcgtcctgtgccaataaatagatgaacagtacccctgtactgttcacacgattttgtattcgctcgtgcgcaacgtttggattttttgccttctgtcaagccgaaggtataaatgtgattaaatattgtatttaaatacttgaatttatgtaatgaagatatgtgaataatgttatatgattgttcatg

SEQ ID NO: 1842 - DNA, 2091 bp, Zea Mays
cactattcatccgcccaatgagctctgctctgcatccaggcgtggaaaatggaggccggcttgtggactcccttttcctccgcgttctctctctcccccgcactccaacgctgctttccaaatagttcgtcttcttcaagcacgagcgtcgcctctagttcctgtctgtggctccggccgtgttgttgtccatgtgatggaagcctgaccagagtgtaaacctcatcgggctagagagagattcccgggaagcgcatgatgctcatcgtcgacgattggtcgctcaagtcaccggtaacagatccgggttgtccctctcactcgcttgaaatctcgccgatctgaatgccataaagcttccaaggttttcaattaggggtttattcgttcgggttttcgatgaactctgaggccgtgtccactcccttcaaactgacagcacgccctacaatttaaggcaaatcttcacagttttttttgttccccattaatcagtggtgtccacaacacctttgttacaactgcacacttaataatcctaaacccgcacgataggggcgggcccaggatttcaaggatggtattccgaatctcagtgaccacaattttcttggtagcctaaatttattatttatgaaaaacagataattatcctttatccatcgaacacagatatgatataatttgttgtccacgagtacgagtatgagtataaaggcatccattggtaaacatttcgtagatatgaatatacagtatccatacccgttacccgatgtgtatctgacattagtatatatctatatatgcgaacctatatgggtacaagtataaatctaattttgtcttgtagttatagatttgtaaactatatacttgtgtcctaaccacgcgattgttatccctagtcacacggtagggaaataaaaaacactagcgaaaagcgaagtttaggacaaaatagctgtaaagtagtgttattttatgttttgacaatattttagtgtataaacataatatatatagatataaataaattttgttgccagaaaataatgggtattcaattgaatacccttgcttctacatgggcccgcccctgccacacgacaccatagattccatgtcgaaatctaacgtgggctactactttgctaaacgtttataatggacctccaattttttttgttccccatacaaatttggacacagatgttgttgggaacatagccaaataactacctagctagagtctggaatataggaatgcacaaatcataccatctttcaccctacatagtactatttgatttaggcacatcgtacatgttcttgtcatattaagtgtcacctatgctcaagagttggtagtgtagataattttctctatgcaaatgcaattgttagagaccgcatttattctatgatggtattttttagtaccaacaatggacaaggaccccatcgaaatggtagagagcacagtgtgagtgatccagggaagccttgatatcattcgcagcctggtcactaatggtgttgtgaatgtaacccacctcagtctatctattcccttaagaccacattgtttcaaataatagatgtgtgtgacatgcttgacaagtgtgtcgtctccatgatttttttgctaaagctaagagggaagaagttattcaagcttaggatacatccaccacaacagatgaagccacagatgaaggtgcgagcagtgaaggtgcgagccgaagttggtaacttcgacaatggagaaaagcttcgagcgcaagccagcgaaggagaagaagtcaaaacttgcgcagcaaaaaagaaagggaaaagacgacaatgtccctgtatcatttgtaaatcatgtgtgtaaaccccatggacatgtatgtaattttctacgatgccattcaactttcttatatataggtgaacagtgccctacttaggcggacctttttgaagggccttagcttcattttgcttagcatccaaaacacctttgtattattttgtgccaaaaagcccaaggtatgtgtacatttgtttaacatgaatgaaaatgaaataaaaatgataaggcat

SEQ ID NO: 1843 - DNA, 2106 bp, Zea Mays
caggatctatcctcaactcgatccctcaagtgattttgtaacagagtcgagttttggaggtaaagaatcatagatctgggtcccgcgatatttctgttattttctgtgatgattttagtgcatctgtacacttttgattcacgcggtttttgaaaaaaattagggttctaaccctagcttcgttctgtacgacttttttctgatctgttcttgaccgtgaattaaaaaaatcacgagtccctgtttacaggtgtaccgattagggttaggtcataaatcctaaccctagacagttatgtgacctctctctggtttgaggccttacagtgaccaaacctaaatctcagggttgaaaaccctaacccgagagcatcgacttctttctgttctattatctctctgatcttggtgatgaacaataataaaaaaatgagctcaatcacattaatcgggacctttctgtgatctcataaaaccgatgtggattaggagttctagggttcttaggatgctccgataccattgttagaatctatactgtctaggatcgattcctaagtccctagaataccaatccgtaactgaaagtaaaatcttgatgacgtgtagatctgatctactgatctactgagaggaacggagaaacacacctttgttgctgttgctatctttatatcgtcgtcctgcagagaagcagcaggcatcgggatccgagccgctgtaggttgtcgcgtttccaaacactccgacgcctaggcgatgggggcctctggggactagggttttggggcgaggtactagcgttagtctttcctgcgaccccttagtcctatatatagcgtcgtgtgtctgggggctccaaccgaggttagcgtgggccctcccgatcaagggcccgattaaaggaacgatagttgggttaagtccaatccagtctctattgaccggctgtagaggacacacccaacattcctctctcttttttttttcctttgaagcttgctgttctgtttttgttccccatgcataaggcactggtgcttcttgcggctatgccgaattgccgatgccaaatgcaatgtccatccatcgtgtcgtatactgttggctgttcatggtcatggcctagcctaatgcaactcttcattctctagcctagcctgatgccatgatgtagctagctgcaagattgaagcaagcaagctgatcgggctaaccagtttatttataactagtacccatgcatactagattaactgaattttagccatacttagagcatctccaacaatgcctcaaactagtgcctcaaattgaaatatggggctctatataggaaaaaccactccaacagtgcctcatttcataaaattttgtcaaaaaaatatagggcaccctctcaagtgcctcaaatatactacaccgtaatgggctgccctataatttagatttggagctttactgttggagcggagtgttttgttggtgccctaaattctataaaatatacttatttttaaattatagggcatttttataggtcacattgttggagatgctcttaagccactttagcattcgctgctgggctatatgtcacgaaacgtgtagttaattaatcaagtagctagatttttcacattaataactaatcagttgtgtgcatcgatctggaggaggctgtccagtttccacgcgaatttacactgcggctgggggaagaacatgaatcttagcggaggcttcgcttcagctggaagaaggtgcggcacgtgaggttcaagttcaacaacctggtcaagaaagggaggctaaggctaaacgacaaaagttatggcgacacggcgaagctggtggctgccacgcgggccctacagggtcgcatgcattcctttgcggccgctcagaccggctccaacaagcaacgctaaatggatctgtactctatatttagagaaagaaacgtccaccgttctctccaacaagggactgtaaacgaatcggtaaaatatagcgtgcgttcgacgaacgctaaatgtggaggatcttcatcacgcacgctaaacgccggctccgtccacttcctcatgtgaacgacgacctcgg

SEQ ID NO: 1844 - DNA, 2108 bp, Zea Mays
gtaaatctttaggttgttcatagtatacgggacaatgtattataaagtgaatgggacataatgggtcagaggacacttgccttcaccaaatagatgctcagggtatccaatctcatagaactcgaggagcttgttcacttggtcgtcgaagtttgaccgtcgattccttgaagcttggagatggatcgcattctcatcgcaacgcgaagacgaacaggcacaagcaagcaaacacatatatgcataagaacattacaccatacaaatacaaacataataaaacatacaaaaagaaatagagcgtgttactatggtcacgcgaggaaaaagaaacgcgacggtcggggctacggtcgagaagtcatcgtatttacactaaataagtgttaatcgacataatcatattaattataactactatttagttttgattaatctgcaacactaacaactatcagttaagtaagtaatttaattaacacgagagactctaagtggggcgaaattaacgacacgtgacaagatgcgcgacgtgcaaaaataatgcgcgaacgatgcacagccacacgcgacttagtgcgtgggcgacgcgcggagatgcgcatgatccgcacgcgcgacacgcacacacaacgtgtgacgacgcgtgcgaaacagcacgacagtgtgcaaacgacgcgtggacacacacgacatagcacgctgacgacacacgaaacagcgtgtgcgaccagcgcgaatgacgcgctaatcagcacgcgaccacgagcacatcacgcacgaacagcgcgcagacagcacctacgacacgtgagaattactaataatcatcgcgtttatactaaataaatattaattcacaaaacacttgaggtggcattaatcattttaatcggtattttcaaagcgccaattataattataagttatgcttaactagatttctattttaataattaccaattaactaaataattaatgaaagcctgtgtcgcgacaagataatgctactaacacgcggggtatacaactgggtttgggggtagacgggcgtcgtctacgggtagacgaacgtcgtctaggggtagacggatgtcgtcgggaccccgacgacacgctgcacgtacgcgaaacaacgtgagtcaactcgactacgtgcgcgaacaacacgatgacgcgcgcgaacaacaacaaataaataattaattaaaagtatttaagctggtattaatcaagttaattaacacttatatttataaaagcacgaattaaaactataaattattgttaactaaattttatcttaatagccaacggacaaactaacaattaattaagtacataaaacatgtgtcatgacgaagtaatatttttaatgtgtgcacgatattattatgaagctaacacgattggaacggaaagaatcagaccactaacacaaaagatattgagtaactaaatttctgtggattcaaagcgatgtggcgcgatcctattggctgaattaaggctacacgaagggtcacatatttttcagccacagatgatccaacgttgagccatgacgtgggggtcaggtggttgcatgcattggtgggacctactagtggttttttcctttcttctacacgcatcctccctagaatctaacaacaccacgcacatggggctcggccagggagaacagcagcctaccagccggcctgctgctgcggcttgcctgcggggagggaggggagcgagataaacgaggggaggagggggtagacgatctcacctcaccagaccatcacaagtcacgacgacgcacggcgaggagaaacgtggacaggtcagtgaagctccggtggggaaggtgctaggcgtcggggtttcttcaaccgctcgccagggcctggccgccgcgctgggcatgcgcaagctaccgcgcgcacccgctggccgccacgaaacgtcgggccaccgcgcagggcgagccgtgcctggccacgctgcgttgccgggggtatgggcgggagctcgagtacgaccgcgttgaggctgccgaggggctgctgtgcatgggtgtcagacaaggcgaggggagtggaggaaccccaagttcccgg

SEQ ID NO: 1845 - DNA, 2123 bp, Zea Mays
tttgagactaaccatgtgcttgagttttcttaatttagtctcaaaggaggtttgaaagggaaaaggtggacttggaccatgcaagacttccactgcactccgatgaaagggtaacttattccaagttcatcttcatgctcttattgcctttttactcttcattgaagattttggtgaggcaatggggttccagggccaaaaatcatctcgttttggtgcttgatgccaaagggggagaaattaagggccaaagcaacaaatggatcagctaccacttgagaatttcgaaaaatagtagaatagagcttttggtttgactaaactctcttattgtctctcttgtcaaaagttggcctcttgtggggagaatggttgaatatgggaaaaaggggagtttttgaaatctttgatcaatttctctcggaacaactctatttatgtctcaacaagtgtgtttgacttagagataggaaattgaggttgatttgcaaaaacaaaaccatgtggtggcaaagaatgatccaaatatgccaaatttgatttaaatcaaatctgtgttcttatttgcattgatgttgcacatctttgtattgcttttattatgttggcataaatcaccaaaaagggggagattgaaagggaaatgtgcctttgggccatttctaagtattttggtgattgagtgccaacacaagtagtcatgtgttaatctatgccaaatgatggacaaagtgaaaatcaacataaaggtatatttctaagacttagtactttggtttaaggactaatgtattgtgtttaagtactggaaacaggataaatcaatttggaaaagagatggctttgttcagccaaagacagttcagtctgggtgcaccggacaatgtccggtggtgcaccggacagtgtccggtgcgccaggctggctctggtgaaaaggccgctctcgggagttcgtcggcggcgtacggctaaaattcaccggactgtccggtgaaccaacagtcggtcgagccaacggtcggccgcgcaatctgcgcgtgacgcgtggcagagacaacggtcagaagggggcaccggacagtgtccggtgcgccaacggctctagatcttcaacggtcggctgcgccaaaacaggaaagaaatccacaccagacagtgtccggtggtgcaccggactgtccggtgcgccagtcgacagaaggcaagatttgccttcctggaatgctctcagttttgctgactggatcaagagatatggagggatgaagttgggtttgtctcactgctgaactccgagagaaaatcccggatttgacatgtctagggcacgaatcaaaatgccatcttcacacatgttgcagaggggttagtttagaaaatttttgtcaatggggacttaaggatttgagctagggataaaggtgaacacgctcaagttctaggtggattctccctagagagcttccacttggatggcctttttgggtttttaataaactattttggccaaacttttataacaattgttgtagcttaatttgtgtatttcaacttttataattggcccaagccatgattccatgtttttcatggtcttttttcccatttcttcctttctacttaaagggcctaattagggttgttctagggttttgacattttccccttttttgcatgatatgatttaggcatgatccttaagataaaaagacttagttgagtttttgctcctaagtttttgatgtcttttgctcaattgtattcacatgtgataatcatcttgagttagcactgagaagtaccctaggtaaccatggggtgctacagccttcccccttaaaggaatctcgtcccgagattcgggtcggagtcctccggggtgaagagaaatttttatggcttgatcccttggagttggtttgtgtagtaaggttctttagtaaactgctcttcaaatgtcatcttctttgcaacttcagaaggaagtcctcttagttttagttttacaattaactccttttgtgttaagatcattttcttatatttagattcaaaggacagggggaggggttgggaatggttacgtaccaaatcccttaggtagacaatcggggaagttc

SEQ ID NO: 1846 - DNA, 2153 bp, Zea Mays
aattcttgtaggcattcctttatctcctccacctccacgtagaaagcctaggattttctaccagccacgtctttcatctcctaggcgttatctgagcacagctcatttgttttcttatgccatttcttctctgttcctgaagtcacggctccctggagatgttcagctcgtctgcgcttggtctttgccggtagccgagctgctccctatgctcgagttcctagcgtcctgcatcagctcgccggcagccaagctctctggcacaagcgcctctaagccctgctccttctccaaccgtgccaatgctcgccagccctcagcccgcgtctctggtacaagtcgtcccgtcagctgccgctcgttcctgaccagttcctaccagcgccattgatgaaggttccaatcattgctttcaacctcggctccctatccttgcctagcctcacgtcgtcttcaatctagacgtcgcccagcaccagacctccgtctcccacatgccgctgtttgtgctcgacctccgttctgcagtcccgccctagcgccagttgtgttccgtccctgttcgtcaccacgtcgtcgacttcagctacctgcctcactgtcgacttactgctcatctcgctgcgctgtctgagttttgcctcgcctcgctgttcctcatccttgctttctggagtttcggcaagccgtcgtcctgttgtgttgtcgtgtggtgctctcgacgtcgacctaagcacactccacacgtcgtgacatctcactcatctcgtcgccatgctgtcgtgatatttggtatggtaatttctatttccttgggtattaaaatatgtgcgttgtgattgtaggtctaatatttattggaatacccgaatcgcttgcagtaatttattgaatgtcgtgtggtaaatcgccagtttgagatataggttatgggaatagagtttccgtgggtatatttgtcgagcatgtttaaactggttctaagtttgcagtgagtggtacatcggtggtgcgtaagttaaatttagtgttttaagaaattatcaataagtctatcgatgttaattatattcagtgtgtttcattatattatgtgattagtggtcaattaaatgccgtgattaaatgttactggctacataagaatttagaagcgagtagcatcgccaattcgatcttatgtgaaacccgagaatttcgtagtggttagtgtacatatgtagtctagatatttaagttgtcgcgaaaatagttttaccgaacgctatattatttgattatattttaaccgttagggtaaatattgtgatatttgattttgttaagtgtgtaattcaagttaagtaaaacacacaatttaaagagctaattaaattattcctaaacttattttaagtcgttggtaatcaataacgacgagtccaagtttatttagatttccgatgatatattttaataaggatgatagtgtgggttaaataatttattcttacttgatttcagaattagatccgattagaaagcaggaacgtgagtgttgcacttagtgtgtatggtttgctgtttcgtgatgtttgcgttagattcggttaatctagagaagcatgattattgcgcttggtcataaggcgatagctagcgtttgattatgaaatgtcatgatgccttcccattaagtgtttaattctttactgtgtaaaatcataatattatcttgcaatattcatcttgatattcatacatgtgcattgtgtatctcatgaggtacgataaataatcgcgtgatgcggaagatgagccaagtcgaccccaagcgcgggctactccgcatggtgatgctgatggacgaacctgcctgatcaagtgctaggacaaggatgatcgtcaagtggacatcgcctaacaaacactaaccttgtgttatccaggcaagccctgatgcatgcaaccccttccttatgtttttaaattatttttacacactttaagtctagtgaatgtgcattagattataagagttgcttggaaaccctttgatgcattggctaccttgaaatccattccttttatagatacttctggcgaagtatcaaaatatgatttacaaaaaatgcttagccctgcatttaagcagatagagtttgtcctttgca

SEQ ID NO: 1847 - DNA, 2166 bp, Zea Mays
tgtgagaggccagcaagctgcacccacaagtccaacctaaccagccggcgacgttagctaccccaacagtggaactcccccctacttcacgggcctacaaatatgcatcaaagcatcctgtctagcagcttggagcttagccgtcttggacgacgtcttgactctctctcttgaggtctcgtgcatacatgtatctttgggtgatgtgtgtgctccgtgctcggttctttgtcaggtaaacagtccttggatctgggcctcgagttcgttgtctgttcgacctcgcattcacctgaacccgctgcaaaatccgattatatggttggttggagccacatgaaacatatcctgaaagaccttcttttgccatgattacctgttcacaataaattacccacaaatctagatacacaatataagaaggatcatctctctctctctctctctctctctctctctctctctctctctctctattgacttatctatttttttatgcaccctcttttacgccatctcttgtgcatcaagagacaattgtgcgtagttactctgctagctttagcaaggttctaaatcttcgattgaaccggttgttagctgttttcagaggtagatcactgaatgctttagttagggatttaaaacactaagctttagtagccttgccatgcctagcgtccatctaatacaatactagtatcacactgcaatgcaagctgtagttagttacgtacactactgtatcttttcctgctactcctgatgatacttaactcccatcttcattgttctcttgtcaacatcaacaaaatggctaggttaagatgtactactatatatagatctcggcgcaacggtattcacaactgatgtagggtattaatgtaggtaggtttctgtattctttatttatttattttttgaacaaagcccataagattatttagtaaccttcatagattttattgcgcatctagatataacatattttgtatgtataacaaaacctattcacctagaaaagacagaacatataataatttggtcgagacaaacaccagattattcaagcatgtaaatgaaagatacgccaaaaaaaataaaatcgagtagcagttttagaactccccgcaatacaatatattgatcatttgtttgtgtgcttgtataaatggatatagatcgatttgcctactttattttgtctgtaaaagagtacaaaaatgcgaaaggtaataaatattgtttttaatttcaaggaaataaaataagaaatcagattaccctgctatatactactagtatacattcctaataataagaggtcgagtaggcagcgaacttgagcgccacaacaaaggactgtctatttgacaaggccaggtatggaacaacatgcatcatatatcactgctcgtcactgtttcatcgattgcctccaggctctctatacgaatactttctctattctgaattataagatgtcttatgttttctaatatattgcttttatcatatatctagacatgtgtctagatatatatctaaacgcataataaaaactacttcatccattctaaactataatacgtcttgattttgtaatatatcacttttgctatgtacttagatacacaatatgtctagatacgtacgtagtaaaagaaatatatctacaagcgttatcatcttatcttataatttaaaacagagaaaatatgcatctaggaaaccgaaaaacgctcttataatttagaatggagaggtattttttaacataaacaacttgaaaccaagttaaacttcttgtttgcattgtacgcaggggtggaggaaggagggacagagggaggtcaagcacctcctatgctaaatgaatttctcttttattcacatgatattttgctatataattcagcaaaaatattgagttaccccctaataatatatcttttagcacttggcccttcttaacagtaatttctgtctccgcacctgattgtataattacatgccttccatgcttttcttagatagctagtctcgttacatacagtttcaaagtgtcactgcaagtagtttttttaccattaaggactttgtgctagtggtttactacctcctaaaacacaatgaagattatctagtttatcctaaggccaa

SEQ ID NO: 1848 - DNA, 2176 bp, Zea Mays
ctgtgcagtgctcactcccaagagctcccacgtatgccactatctacaccagcttttcaaccgctaaccgctgggtctctgcctttgtgcgcgctcggcattctgcgcagtagcgtccttcgctcagccgacgatggctacctcgccgttgtcctccaccactgggcgtcccctcgctgccggtctgttacaccgttccttgcgccctgctctgaccaggctcgcccaagtcgtgacctcgccgaatcgcgcctctgcttgacgccggtgatggccgccgttggtccctgcgtccttccccggtcgtctcacctcccctcgacgcccctattttttccctagctccggcgtccatcgtgtcctactccttccattcgcacagcactgctctggtggtcgtccaccccagcgcccagcgctgctctcgtctcgctgggctttgtctcgccaacgtcggtcgctgctccaactcacgttcgtggacgccgtatctgcgaccccgacaatccctacataatctgtgttttgtgtttgtcgccaaataaaatccctggcatttcggggagaggaagatgaagtcggctcttcgatcgctaggtgttcggtattgtgcacaaaccagaaattgatattttccatgcaaatatctaactggttcaaggtatggtgagctccattgctatccttgctaattaatttgatagatggattagaagggtattaatcgtaatgattattctatttgtagcttagatgcgcaggtgggtgttcgaaatatatattgggaccgacgccgttttagtattcgtgtggtgatttacgttttttctgtgttcatgcgtttgaatcgcaatatgcgattagtgaggaaggctagatggtgtaggcagtgaaggttcatggagcgttcgcttagtgttcgacaaaacgcccaaaccatgattcatcgtcaatttgcgattatcaaatcgttttggtcatggtaagcggatgggttattcgtgataactagatcattaaataaattaattgggtaatgtgatgatccttttatttagtatatgtgcgcttggtagctatggctagatccggtcatgtcaatgtgctgttgtgtggtaaaaatagcttagcgtagcactctcggatgttcggtaaaatggatgacctgtagatcatcgtcgatctcgttaattcgagttctaatgagttgtggtgcgcggactcattgccctggctatctggtttgttgtattgattatatatattaatcgcaatgattttcatattttttttaaaaaagcaagagtttcgtagaactctaggctatataataatattctacctgttagtttaagtctgaacaaggtgttttatttagtaaatgtgatatgcataatgatctaaaatagtaattctaaaagctaactgaaatagttttgttcattgttctaagcttctggtgtcctaagagggagagtctaagtattcttagtccttaagtgtcatgcgttagctaatgatggtataggacttgttcataatattattcttgatgtttaagttagatccgtttaagctagagtagtgtgctggttgtacttagtaatatctcaacatctagtgattgcttttaaatattattatgtgccccaccactaggtatttaattcactatcgtgtagcaacaattaggcttgtgttattcctctttatatttacccatgtgcattatgcacatcatttaggtacgttaattgatcagatgatgcgtagaaccaaggccgaggtgaccacaagatgtcgttaagcgtgagcttcttcgcaacgtgatactgctgaatgaacttgaagattgggtgatcggatcaagtgccaggatgtgagattgtaacgccctgaatttggggtagattttttcttctttttactcaccaaattcaggcgttactctcttttctcttcctgtttcgctccttcttcccaatttcaaagcggtgtagtggtgtccgtattacgtataaacaaaaactaagttgtcatgggtgttgcatcatgccaaatcatatttctttgtttgatgtcgtgcttaatcgcgtgttttgctcagtctcgttccacgatttgaattccgatctgtggttgtgcgtgccatgggattttgacccgcggtgcggcc

SEQ ID NO: 1849 - DNA, 2177 bp, Zea Mays
gggcggggcaagaaatatcatttctacttggcggtttcttctggcgccacttcaaccctctccgtctccctcctcctgacgtcgttatccggacgagcagcgaggaggagaaagatccccctcccccactccctccttttcctcccctcccctgcgtccccgtccccgtccccgtcccgtctcctcccccgccgcggtgcggaatacgggctagattaatcagtcagcgctcatgatccggaggagcgaaggccgcaaccagcgccgcggggacaaagcctcacgtgctcgggtgtcacgacccttggccagcggtagagaccaccgcgacgtgagacgcaagacaagcagagaagaacagagataagtggttgggtggtttcaacagattcgattcctttctgattttgcctgtctggctcaaagcaccgagtacaatatttatacgcacaccaacaactccctggtctattatttacggcccaagatggcactaatacggcttaacagcccacaactccattacagactccattaacaacgaaatagaaatgcctggccgactgacctcggtccaccagtcttcgcgccactccatctcccgcagatccacttcagtccgcgtcttcagtcatgacatctccccgggcctcagataacgcttgtccccaagcgtttgcctctggaaaccgtgccctggccactgcataatcctcccatgttgcagcttccttaggtaccccactccatttcaccagcacttgaacaatagctcgattgccctttctcaccatccttcgatcaaggacctgctctggctccatacccccttgagacaaatccaccgcaggaggtagctctgagaaaactggagaataacagggcaggaatggcttcagttgtgacacatgaaaaaccggatgtacttgtgcatccccaggtaattcgagcttgtatgccacctccccaatccttgatatcaccttgaaaggaccaaagtacttaaatgccaatttaggacaggatcggttcaccacagtcttttgtgcataaggttgtaacttcagcaaaaccagatcgcccacttgaaattccctgggagttctgcccttgtcagcatactgcttcatgcgaagctgagctcgtgctaactgctcctttagcatgactgaaaatgcattcctttcagcaaaccagtcagctatctccctatcttccatgcccagcgtttttggtgcaacaagcaatggtgcttcatagccatacaacaccttgaagggcgtacatcccagcaccgaatgatatgtagtattataccagtactcagctaaagcgagccagctcttccacttgttaggttggtcatgtacagcacacctgagatacatttccaagcactgattcactcgctcactctgaccatccgtttgagggtgatatgcagtggacatcagcaacttcactcccataagttggaatagatttttccaaaaggcactggtgaaaaccttgtctctgtcagacactatagatctgggaaccccatgcaacttcaccacattctcgagaaatacttgggcaactcctttagcagtaaaggggtgctttagaggaaggaaatgactgtatttcgagaatctatccaccactaccagaatggtatcaaacccctcagactttggtaacccttctatgaaatccatagtcacatcttcccaaataccttgcggaactggtaaaggctgtagcagccctgcggggtgcaccctctcagccttggccttttgacagattgcacattgctgcacatactgtgtcacatcattttttaaacccttccaccagaacaccttctttaccctctgatatgttgcttgaattccagagtgccctccaactgcactatcatgcagtgctgcaattagtttagtgcgcagagctgagttgcacccaatccagatccggtttgcttttctgataataccttgctgcaaagaaaacccctgttcatccgggctctgaattaacagttgagtgatcaattgctgtgcatcctcatctgtggcatacgagttcactacttcttgaatccatataggctgaatttcagagagaacagacaaccccatcatatgctccacccttgataatgcatccgccactacattctctgtgcc

SEQ ID NO: 1850 - DNA, 2183 bp, Zea Mays
gttgtagaatagttttcatattaactacctaaattattgatttaggaagtcttttagagaactattggagttgctctaataatttaaacttgtgacacatcagcaactgtagggctatcttctacccgtcgtatgcttttttattccatagggtttttttctttcaatttttctgttgccttcacgtcgctaacaatacacgagtgaagaatcattcataaaaaaagtctatcaaacaaattcctgagccacactacaccggatgagccagctaggaacggtcctctgcagcctttgaaactgcacagatttttctgcagcaacacgggtttacgcaaaactatatctgaaaattgaagtgtttacaaactggaaacatgtatccatgagcaggcagcaacacaaactgaaagtgtacatgaacacaatagtcaagatgacatgtaatcgaactgaaactaaaagtgtacatgcaggtttaatctgaattcaggcataaagttcataatattgtagcgcttaaagtgcactgaaagtatataacaaactagaagtgcttacactaggaaatcaaactgacgatgtcaaattgcactgaactgaagcttacaaactgaaaatgctcactctaggaaatcgaactgacgatgtcaaattgcactgaactgaaggttacaaaccgaaagtgctcactcaagcaaatcgaactgaaagtgtaaatttccctggaaggctatcatccatcatcatgtttgaaaagtacacattccctgcaactatgcattgaagagattcaatgacatatctagaatgtgccatttgtttaaggaacaattggatctataccattaaaagatccaaactttagatatataccatggaccccacatgtcattgactcatgtggacccacatgtaagtgagatagtaatggtatgcatccaaagtggtgatcttttaatggtatggatccaaatttcccgttgtttaaagaaacctcttcctatgacagtttcagatcaaacacaataaggaataagttaatcattcatactgtcgagtttctaactcagagaatcgtattgctttattcaagaagaaggaattcacaaccagagaaacatgacatcttcaactattgagtcaagaactaaccaatcaactgaacaaccaaatctcatccaacacacatattatcaccaccaatcagttcaaggaagatcaagagattcgtagtttcgtaccattttgccgggtggttgaaggacgaatggtcctcactgcatccaaagaaggacgttgcaactacatctgattcgactctcgcaggtgctaccattggaggtctgtcacggcccctagtaaatctgctgctactactacttgtatggtttagtaagtcggttgaagaggaagatttactgttgggctggcccattagggttccaagccgtgtaatagatccaggcgattaggcccagattagcatctataaatacctgtaactgcttctggaagaggacgcgatttgaataaagaacacattccaccaaaatctggaacttatctgagcgtgactgggaagtcgtcttctccagttggtcgacttctcacgctgcgggagctcgccgtcagccacgggacgtcgatccttacacctggtatcaaagctctccttcctcggtgtgggttggtgatcacaagggggctaggttggctgtaggaagaagaggaggtgatcaccacggcgccctctgtcaaaccttcggcgcagtccaggctggtgttggaagccatggcgacagaagctaaacaaggggaagcaaggtgggacaagatgatggtgatgatggagaggttgacagggaaagttgatgctatggagaaggtgcatcaccaactattgggacagtcagaattgactgccgacttggtgaaacaggctgcagatgagaggacaattttatccaggcgcgtggaggagaatgggaaggcgttggccaggatgaggttggaagctatggcgagagagatggaggatgttggcacgggaccagagtcatcggatacaggaggtagaagaggggccataccgaaccaggatcagggaggaagggagttgcaacaacatgtacctaagatgcttttccccaagtttggaggcaaggaaccggcgatttggt

SEQ ID NO: 1851 - DNA, 2189 bp, Zea Mays
cttctctcgcaggaacttgatcatgttgtgcctctgatcagagctttggctcttcttaattctcatacttcttctacctcaagttggtaggctcaagactcttgattcactaaagaatataggtgtaaacccctatcctcataagttcctggttagttttgagcctagaggaatatgaatgctggctacttactgataatgttttcttttgtgtgcaaacatgtcctctgatgcttagggttttcacaagggtaagcatgcttatgtcttcttgtttctatcttaatgaatttatttattggttaccctgtgctgattagcacttcacttcagtttagatatttatatattgtggcatttttctaggacttcggttaacatgtttagacattgttcttgtgtttcctagtgggggtgcttagatccagttgagatctatgtccgtgtattggtcgttatttgttttctctaattactcggtggctctgcataatgctgtaggatttaaaattttcaaagtatgctctctgctttaaacatgtaaaaatacactcatgttttatccacaaatttgtaccagttttgtttgattacttacttcgcttatcttgtcatgcttgtgcttgcttggcctgtgatcgcgttgttgtatattagaataatgcaaaggagatgctatgctataaactttgcctatcaatgtattcattcacaaactcgccatcattgcatacatatttggtttggagaaatcgagtgagatcctcaatccagctctaacaattctccttttattcagtcgatgcactggtcaacagtagcttggcgaaattgggctatgagtatgttattatagttctagatcatgatccatagctgaaaggtttttcatatcttctttcatatgattgttgggcaaagtctgcctgggactaccaggttagaagatcaagtttgcctatagatgcactattctaaccactaaccaccccaataattttcagcgttaatatcagtgcaagaaaaaatactctacttttattttcctcatacaggatgactagactacattttaggattgaaggtctttcactattgataaatttgcatttttattgcacagcgaaactttgttgcaaatagataaaaaccttcccatcttgcaaaagggttgaagcttggcctctacaatgacgcggggacacaaacctgcagccaaaaaatggcagtatcacttgatcatgaagaccaaatgtgaaaattttcatcttgggctaaaaaatgctagtatcacttgatcacaaagagcaagatgtggaaaaaaacatcatgggtaaatctatttatgtttatttcctgacaactgtgacaagtcaacagtgacaaaagtatctgatcgtctcttgttctaagttcctggagtgtgacagagatgtaaacaagaacaatgattccctgagttgtagttggcggggtcagagtcgatgaagaatctatcatcgttaacccatgtccgccagaatgtgacattgaatggagtgactctgtgctagatgacattgatcatgtagtctcaaacatctgagacgatatccagtctatctgagttgtgttgcctgatgtgatgtaggtaatccaacttgctgcagcaggcgaggagcgagtgcccctgctagaagagtgctagctctacgcatacggtcgcttgacaaacatgtgttgttaactgttgtatacaatgttactaattattgtcctttattctcttatgctacttctgtagttgatgctcacattgttctctcatttccgtctaaattttgtatgttatgccaaaagaccatatgttttttgtagttttttttaaaaaaaactagctctctgtttttatgattgtgtcgtcgcaacgccaagccctctgccgcctccactgttcgccctgccaacctaggtatgcgaatctccaatccatgtgaggattcagagctagactagatgtagcttccggcctatatgattagttgtacttgtattgtaatcgatcagtgcaggcaccgcagatgtgctgccgtatgtggggagcagacagtcaatttacgtctaggtctaaataaaatagtagtgattaaatctttgaatctgtagatcaaaccatctcaagtaattttagttttgttatgaaaattttt

SEQ ID NO: 1852 - DNA, 2229 bp, Zea Mays
gcagcattattatgagaatgaaggtggatgtgctgctacttcccactccccttgatgagcaacaagcacctgcattgagtaatgcaagagtgagatgaaacatctcagcaagctaattgttctgacgagatatttaaaccacaaattgaattcatcaacattttaaaagagtcacaattaaaaatcagaaatgcttgtagatatagaactcagtagtcccactataaccaataccatctcatttcctcgaacaaccacaataggttctataacacttccctgcgtcaacaatacctgcaaatatcacttcaatgtatgcataggaatgcaatgtgtaggtactctatcttcatacctctgggggtataaaaccacatcatctgcaaatatcacttcaatgaatgcatatgaatgcaatgcatatgtcctctgccttcatacctctaagggtatgaagccgcatcgtaccccttctcgggcaacgtacgatgctaagttgtaccggtacggtcggaccataggtcacgacaaaacttcatatgcaaatgagtcatgcaatgtatatggcatgctacatttatcaataaacttcacttccttcagatacaacacaaaccttaaataatacttcatttaccttcagatacaataccaacctcaaataatacttcatttaccttcaggggtgtgaattaatctcatgagtcatactcaaatcataatcatcatcaatatatgattgagcatcagtataatgcaagcaagtaaagcatcaccatagagtccaattatgaaagaatttgatacttctgaatattagagtgtaggcgatagaaataacaggtcagaacggaagcaaccaccgctacattcacttgccttcatcgaagaagaagaaatgtactagacatgatctggagtgtagccacctgctagtgggcataaaacttagtacaaatatttcacaaacatttaccatcaatcaacaaaacactcctacacttgaaaccaagacccagtggaaagactcccaccctgaaccacatgccatacagcagcaacgctgtttgttaattttgtatctttaaaattaaaacagcggtgatatcaaacaaatactctaggagtatctacacaaaatactctacaacttcagtattcaatagataattaaattctgccatctacaagttctaaaacatctgacaagataactgactgaatctgttttagacagcagtatggttaactttaaaattcgatatctccaaaactgctaaaccaaaaattatgaaattctgctggaagtaagaacttttatccctgtacaaaagtctccacagttggaagagccaattcggccatttactagatgaaacccaccagtgaacagacccactcatttttgtcaggtaaacaggaacagccacagtaaaacaaacataactggagtttcacaaatcatatgaatgcactctttaacaatctggaaagcttataaaattatctacaacttcttttaccaacccacagtttaattctgttgataaaattgcctaaatcttaagagaacagattctgcacagaattatgagactgaaaaactgctatagtaaaattgcaataactttctggtcggatgtccgattgaggtgttcttcgcggccacggaaagatctacaaattatctacgactcatacatagactttttatttttttgaggccactaagaccacggaaaactggcatgaacagaaactgtcgaatctgccattctgcagaaaactaaattcgagatcaaaacctaaccccacatcaaatccaacctctaatcctttaattcccatgatccacaacctccaaaagcctataattacagggaggaacaaggatctcatccatacctagggtttccccaagaaatcttcaagaggagatggggaagaacatctccttgatcctctcttcctcttcaattcaacatgcccctccttttctcgatccttgctgcgtagggggagatcttgggggaggaagcaatggaggatggctgccataggggaagggagcgtccagccaagggggagaaaaagggggtggcggccaagagggggggtgaagggaaaaaaaggggtggccacctagggtttttgtgggagaaagaaacgacgtctcagatgacttctatctttgcatccaatggcccacaaccctttacctcatccacg

SEQ ID NO: 1853 - DNA, 2283 bp, Zea Mays
tcctctaattaattagctaagggcatcccatttcaccctcatgattgcactgttatcccaggtggtctctcaacgaacaggtccttacggagaggtactcgggaaacagccttagtccccttaaatgccacaagtatatcatcatatccagaataaaatcatagtatcatcattgtatctcatcatgttcattgattaaagtaaagcgctagcatgtagctaaccatactaacccaaaaggtaaatcaaggacaaggtaaatagaaagctagtaaatccttaggttgttcatagtatgcgggacagtgtattataaagtaaatgagacataatgggtcagaggacacttgtcttcaccaaacagatgctcagggtcttgaatctcgtagaactcgaagaaccagatcacttggtcgccaactcttgatctttgatccctcaaagctcagaaacggatcgcaatctattcgcgacgcacaacgaatacaaacaggtacaaacaaacatatatatatatgcataagaacattacaccattaaaataagaacataataaaatatgcaaaacgaaatagagtgcgttactacggtcacgcgaggaaaaaagaattatcgaactcgaagctacggtcgggaagatatcgtgtttacgctaaatcaatatcaattataacatttaattcgatattacccaatataagttatatctaatatttagtttcgcttaacctgctacactagcagctatcaattaaaccaataatttaattaaaacgagagattctaagcgaggcgaatttacgatgagcgaaacatcacggcagcgtgcgaacgacacgcggacacgtgcgccatagcacactgacgacacacgaaacagtgtgtgcgaccagcgcgaacgacgcgcgaatcagcacgacaccacgtgcggaacaactcgtgcaacaggcgagaaagactaaatacgtgacgcgtttatactaaataattatttaataagtagttaagttaatattatccatgttaatgtttattctacaagcacgagttgaacactacatatttaatctaattagaatattaatctaatacatattagtcgagcagactttaagttaattatccaaaatatgtgacctgacgaattaacgttattaacatgagcgtttacaagtgacaacaatttattacgcgcagacgccgcgcgacacacgaactagacgtgcgacacgaacgcgcgaaggaagtgacaacgacgcgcaaacagcgcgcgaatgacacgcgaacactcgcgcggcaacgtgcgagcaaagcgatagtgcgcgaacaatgcgcgacgacgtgcgaacacgcacgatcctcacacgcgatacgtgcggacaacacgtgtgaaacagcacgcacgacacgcgcgaacgacacgcgcgatacgcgagaaaagctaaacagacgttacatttacattaaacaaatattagttgaaaacatctgagtcggcattaaccacattaatttgcatctataaaatcaccatttaaaactataccttaattttaagttcaaataaacctcagtttaactacctaattaacgaaaacatgcgttacgaccaaataatattactaacatgtagttgaggttattacgaagttgctacgactgaaacgagtcgagacggactcgcagcgcaacatatatattgaataactagtgtttcttgaatttagactacgtggcacgattctattggtggaaggctaaccatacgatggaccacatgaaaaacggtcatagaagatgtgggatccattgtgagggctggtttctaggatctcgtggatgcatgtgggtggggccaggcaatttgcaagcacatacggaggtgtcgtttgcatcacatgcaaggggctcatgcatgcggttgttgcacgatgtgtgtacggtggtgggatttgcgtgcatgcggccatgtagagtggaccccacgtcatttctactttcttccttggctgaaaacgcacacggtggtttcttctacgcgaaacgcggagcgcagagactccgagcgatggtggctcgctggccagggtggatctcgcggcggctggccgcgcgcatggttgccgcacccgaaaaacacttgggcaggagcgagctcggccgctgaagaggagaactggcctctagccatggccgcgtcagggcgggtcacagggtgctgtgctgcttgcaggaacgccgggctggccgcgtgccgcgctggctggccgtcaggccgccgcg

SEQ ID NO: 1854 - DNA, 2287 bp, Zea Mays
caaatatcccttttctcctcttaatttcatccccttcatcaccagggcatcgagcaaaaaccacgatgcctctactaaccgaggctacgagctatgtagtcgaggcattgtcgccttaggcgtcaacgcccttaacaacctggtagcgccgagtggcttggtatcacgatccagtcaatcgtcatccactacaccgtcggtctccctgcccacttccgccgtgtcaacgcccccaaacccgtctggatccacaccaatggccaaactgacaacaaccgatatcgtggccctcatcaccaagttgaccacgaccattgagatcatgcagaccaagttcgacatgctcaagtaatgcactatcgactcctccccatcgggcgctagagggctgcatggcagcaagcaccacaacaatcaagagccgcatttccagaagatggattttcccaagtttgatgggaaatccgatctagtagcattcattaatcggtgcaagtcatactttcactaataatgcatcacagaagaggaacaagtatggatggcatcatacaacctagaggcgggtgcctagctatggttcatgtagattcagcgcgatgagggcacacccccgtggaggcgcttcaccgagctgcccaatatccgctttgggctgcctttgttttccaactcactcggtaaaatcatggcatgcagacgcacaggcttagttgttgaatatcagggccgttttgagaccttgctttcccgtgttggcacactcgtggaggccaagaaagtgcagctcttcaccattggcctacaaccacccctccgcctcgacatcacgatccacaactcataggccctcaccgtcgtcatgacttttgctcgcaagctagagttgtgcgatccatgtgtagaggcctccacgccacaacgacgccacccacaccggaggggtatcctatcggtgccccatcgtgactcacattgcttgtgcctagtccgttggctacttcctagcagacaccagtgacagtagaggggctctaggtcaaccgcctatcccaggcggagatggaggagcgatgtcgcctgggcttctgcttcaattgcaatgagaagttcaagcatggccacaaccttgtctggcaacgaatcttcctcctcaacttggcgctcgaggacaacaagggggactccgaggtagacgagtcagccaccgacgagccgtagatcttggtccacgtgatcactaacatccgcactagtgagacaatgcaagtgtgcatccaacttggcgatgtctccatcctcgccctcctcgactctaactccactcaaactttgtcactgaggaggcaacctccagcacctcgctctagctttgactcgagggcaaattgtaggttaaggtggtgaacaatgaccatgtatcgtgcccaggctgggcatgtacagcgacacaatgttctccatcaatgtcgaggcgttgttcacaaatttcttcaccctaccccccaactactatgaagtggtacccataggccttgcgatcctagggtgcaagttccacggaagccatattctagaagactattgtagggtagaagtgacaacattcgttcaaggatccaaggacgacatactagacatccctgggcccgaaggtattgagacacttagacaagctatcaagaatttcatcctttgtcctcgaagggatgtcgaatcggttgatccaccaccgtcgtcatcccctgcccaaccgtctctgcctcctcaaaatgcagttcctattgtacatacattatcacctcaaacttcacatgctactccccatcctctttttgacccatcgtctctgccacaagcatcgccattcagtgctccaccaccttctcctcctcatcctcttggtgacccactatctacgccaccagcaagggatctacattctccacagccatcaagggatccgcagctatcaaagaaatctaaaatttctataccaaaattggtgtccccatatgagaaaaagaagagtgaggctaccactgctgacacaactcagtttttgtcagggattgtaaggagactcatgacacatactattgatttaactgagcacgtgaagtctggaaaaaaggttgaggcaatgatcgtaaagataaaaaagccaactaaggaatattataaaaatgtgcttaaaaacatgtgtcaggcagacctctactcccttttgagaaactaaggaagctcctagctggtattataaggttgcataactggtacatgtggg

SEQ ID NO: 1855 - DNA, 2302 bp, Zea Mays
aatcggcagggttggttcgccaccaatggcgacgtcgtgccttagcgttctgtcgccggtcgggcaccgtggtgagagagagaggattgggggggagaaaaatgaagggcttgggctgttggatcatacacggacggcgccgatctaaccacgcataccccttcgctcaataggatttgggccgtagatctgagatcaagcgatcaggatttgatcatagtcattcttaatctggactgacgatctttaatccggtggtcctcatggcttaccggttcatttttaatgaagtctaatcctggccgtggaatttagatctgacggctgaagtcagcccgtaccccttcggccggggataattgcatgtgagccctcataaaactatcaaataaacccgtcgtccactcacgtggaaaactaattaaatctaggtcctgagtttcacagtttagaccctgtgttttctagaaattgtgttcgcaggccagaattaatagggatattcataattaaatcagaaaatgattttttttataaaaataaatctaggaacttgtttaattcatagttaattcattttagctccagattgagttattccagttgcaataattttgttttaatattatctttcatctagtgcttctgtttagccataaaacttgaattaaaaatgttcatttgaattaatctattctaggtgcttaacaactccagaaattcataacttgttaaccgtaactccgaatttagtaattcttgttcttatgatctcgttacgcagcttagaatattattatgtagtttgatcttatatttggtgtgatgttaattttgcatatacatgtttgtctgtattgctacgtttagcaatgaggacacaagttacctgaagatcatcctggtacctggaatctcatgtcccaggcaagttgtgcccttgatcacttctttttacccagtcatgttctgattaatcataatgatctgcataggttaattttgatgggacccaataggttaccctagtttgattatctttataccttgattaccactggactttttgggtagtacctgctattgctttatgtggttttgggtatgaagattacattattcatgattacacttttgttattagttgttatttactattcatgataagatcattatgttaattggaacatggagaaccacccgggaaaacagtgctaccacaagggtttatggacgcccttggctgattaactaggaaagctagtggaggtctaccttacccgaaaggggcaagggcagtaggggagtggtcagtgtaggaaggtccttagttgattttgctgcgatggcggtcaggcaagaaccctgcattggagcttcctataaactgtagcgggatttctgaagctagtggacctttgtaaaggcctcgtagtgttaccctgcctcgcctcctcggtagaggtgtatgggattggccgtctcttggcagatgggtaacatgacttgtgggtaaagatgcgcaacctctgcagagtgtaaaactggtatactagccgtgctcacggtcatgagcggctcggacactcacatgattaaattatggaacttaaactcaatttgtcatatgcattgcatcgcaggtgaggttgttacttttattctactaaattgggctggtatttacttatacttagtaattgctaataaaattttgaccaactttaaaagcaatgcttagctctaaccatcctctttggtaagccttacacttcacgtgagctcccacctttggcgagttcatgcacattattccccacaacttgttgagcgatgaacgtatgtgagctcactcttgctgtctcacaccccccccacaggtcaagaacaggtaccacaggatgaggcgcttggaggatgctgtgacaagttcgtgagaggtctaggtcgtcgtctcccagtcaactttgggttgctggaccgttgtctccatataatgtatttatttatttattttgtacaaaactccgattatatagtaaagatgtgacattcgatcatgtgccatgattcatcatatgtgtgagacttggtcccagcacacctggtgattatgttcgcgcacgagtcttggtgccccgaaacccgggtgtaacaattacatagacgtggttgaaatgtttcggtggtaggtcgtagtatggttgtgttcatgattttgagttagagattggtggttgacgattcgtataaattggaaataatgtgcatgtgtgattatatgtgtaaaaaaattgtataa

SEQ ID NO: 1856 - DNA, 2338 bp, Zea Mays
ttctgacatctatatataaaattttgacagcacccctttgcaaaattgcataaatgagggggggcaacagtgtataaacatatatcatgataaaaacatactaagtattattaatcggctagcaaagagaagttaaacatacgacatgaactgaattaactagtgcgcacgactagttaaaagaaacaaactctctttgacaataagtttctaattaaatcatggctgcgtctgggcagcgttattgtgagagtgaaagtggacgtgctgctactcccctcattcccaacatgtatcaagtacctgcattgagtaatgcaagagtgagatgacacatctcagcaagtaaaataatatcaaattgtttaaccacataagaacattgttttaccaccacttgattccacaactttcttattacgacggtgcaacacgtatacaacgtacaacacacctagtcaccacacctcgcaggtagaaaccacaatagtaacatagtaatgtcacacttcatatatacctcatgagtgcaaatgtctgcaaatgcaaggatgacttctaccttcatacctctaaggatatgaagccgcatcatacccctcctcgggcaacgtacaattctaaaaatgtactagtacggtcggaccataagatcacgacataacttcaaaatgcaagatggatgatgcgatgtgcatgtcatgcctacaacacttcatataacgtgattcaaaaaagatacttcaacttcatccaagatgggaatcaaccacatatatcataaccaaattatgatcatccacaatattagacaattgagaattaatacttccaaacaaataaacttcatcatagaattcaatgattaacataattaaaacttatgcatactcaatgacagggaataggatgcaaagcaaacggtagcaaccaccactatatttacttgcctttaccggaagttcgggcaaatccctaagtacgatccggaagtccaacacctgttttttgacacacaacttagtgcaccaatttcacataatcaggctcataaacgacgccgcacctatgcacaaactcaaaccccgccgcgggttacatctctccccacacccaccaaactgcagcggcgctgcttaataatttcataactttaaaattatgacagcagtggtaacaaacaaaaactctagagtcatctacataaaattccccacaagttttgtatacaatttataattaaattccaacatctaattagcccaaaatagtccacaagatgaaccctgtaatctgtttttttgtcttttggacagcgacatacccggattcaaacagcgatatcttttaaaatataattccaaatcaagtgcataagtactcattggaaagataagacaaagccctacatgattataatactggttaacactaattacccacgaaaaattcccagaaactgctaatactactgctgttcacccacctgaaaaatctgtttcttttggacagcaacataaccggattcaaacaacgatatctgctaaattataactccgaatcgagcgcataagtactcgttggaaaggtatgacaaagctctacatgattctcccactgatccccactaattgcccacgaaaaattcccagaaactgctaatactactgttgttcacccacctgaaaaatctgtttcttttggacagcaacataaccggattcaaacaaagatatcttctaaattataactccgaatcgagcgcataagtactcgttggaaaggtatgacaaagctctacatgattctcccactgatccccactaattgcccacgaaaaattcccagaaatccctagaactactgctgttcgcccttccacaaaaattctggacagcacctctaccgattcgcatagataaacatataatcaattgaattttagcgcaaaaacatagataacttcaagatcaccttgagttccacctttttcctccttccttcctcccaccaattctccaattgaaacttgcacccacacgaagaagatccgacgaggaagaacgacacttggagaagaggagatgggggtggcggctagggttgaggagatggctgctgcaaaaaacttgagaatggagagggggcggctgcagcacttggggaagagagaagagggaagaggggggagggtgacggccaaaggagggaaggggggtggctgctcacaagggccttaagagagggggcggctagggttttgggggggaaaagtgggcttcccaccgccggatcgcgatcaacggcccaaaaccattcctacgccagagctctcgac

SEQ ID NO: 1857 - DNA, 2364 bp, Zea Mays
cccactaaagctagcaaaaattggttctaaagggcaccctttagtacaggttgttggcaaaaactggtattaagagattttgagtaccaaaatttgccaccaaccggtactgaaggttctttcggagttaaaatgaatgaaaaacaatcttctttttaattacatgtaactctattgcataatggtagcgagtgaacagacgaagtcgagcatatttcgtgtgtggcttaaatagctctatagcatatttctaatcacaaatagccctttagcatctccttccagtcttgcatggtttcgaaatcctagcattgcacacacacatatttcacataaaaatcatgtgatttttgtgactcaacgtgcgcttatgtctcataccatattcttattttttatttatttgacactagcttttaaattctttagtaccgattgaatccaccaaacgatgcaaattggtcctttaattagtattaggccatataaccgggcctgaagaacgaggtcattagtcctcgtagcacaatatcagttgtgaatccggtactttttaaatgaaatttacattttgaatacattaaaaaacgttcttaagaatagataccaaagtgtaactgaagcttagtgcacttcccatagtgaaaaaaaaacatgacagtgtgataccaaaatagcaaaagtagtctaaacataacaaataggcaaaagtctggctaacattgtcaatcgagtggcgcatattttgatatgctgtgtcttagatcatcatcatgcaatgcgacagaagatcaaatgttgcagaggtgataaggtctgctgcttcgcacatacatacagcaagcagtatagcccacaccagaccccacaccaaataatagacactccgaattactcctaccagtctgttgtttctagtagctttccctctctctggatgcatgctgtaaccactttggcgtgtctgcagctgcaatgatgcttccatcttcacgcaccaaagttgaaagcatttgaaagaaaggcttaccacttatagcccaaagcataattgcatgtatggtaccgtggtactgtacgtacggtatgctagctagctggtgaaccagctgtaatgtttctctctctctctataacaccatatgcatttctatgaattgcttatggtgttagggtgtacaatagaatccaaagatcacgctaaatgaataatccccaaacaaaaaaatggcatccccgccctagcttattggtaaacatgtagccacttttagcatgattagcgctagtgtatatgcgagtacttttttcgtacgtttttcagaaaaaaaaagatattcctagacaagatgaaaccaatttaagcttgaaattgcggatgtgcggctctaagagtacacacttgaagcatgcagctcgttatccacttcttcttgaacaagatatatattaaaagatcaagcatatgcatatgtattgatccatggatacctctcatgcttaccatcagaacaagtaaaacatgctagtactgatctttcgtaaagaagaaaggggtagtaacacgctctactaacttattaccctaataataagttagtcatagacaaacgggtaaaaaaatgtcagacaagaagaaaaaaaaaagtcgcacggttgaataatgttgctgtgaaccaccaggccacataacgaagaatatcatcgaaattggtactaatgattatattagcaaaagagatccaacgatgagggaagcaaaacattagactcacatgcgcatgcatgctttactttgcagccggccgccgcttccaagaacctgggggcggcggtccatgcatgcagacttgcagaggctgcaccctgctcgaggtgaaaattaaagtacagacagtctttttgcttacttgcatgcactcacagaagggggtgcgcagcgcaggcgaggcgtgcccgatggagaagaagggcacatgcacgcatcgatcggccggccggccggctggctggctggctgggtttcagaagctagctgctgcacctgcaccagttagccgcgccggcgacgacctgccgtgtctctctctctcgcgcgcgccgctcaggcgacgtacgcgtgactgcgagagccgggccgccggccgctgccaagccggccggcgacggaaagaatgcacgtgccctgcttctccaccgcgcgcacctcgccatcctcagcacacatcgatcgagctgccatgccgcccagcccatatgcatgcatgccggagacggtgcgcgctgagctagcctgagcatatgcaccgcactcaagcgctctctccttccagccactcactccggcctcctgccggctgccgc

SEQ ID NO: 1858 - DNA, 2378 bp, Zea Mays
gaccaaaaccaagatgtgaaagcacttcaataaaaaaagcccaagagaccgaatcaaaggctttggaggtatccaacttcaagaacaaactagagactttcttcttgtggagagatttaattgaatgctgcagcaacatgaagttgtcatgaatcgatcttcctctcacaaaagcactttggttagctgccaccaactcctgtaggtgaggacccaacctattagcaagcattttggtgaccaacttagcaaaactatgaattaatctaattggtctaaaatcccttgctatcaaggcgtcaactttcttaggaagaagagctataaaagcagaattcagcaccccggacttgtgagcatttccttgatgaagcgaattcatggctgccaacaaatctgacttaataatatgccaacaacatttataaaacctccctgtgacccatcaggaccaggacccttatcaaaagggagagctccaatcgtgtctcgacgaacctccttttccgagaaaggagtctccaagagactcagatcaatagcacctctatggcaactaaccagatcaagagtaaaaggcctctggacaatagaacccaaaaggttggaaaagaaatcatccagaacttcctgcatttgctcatggctggtgactatccttccctcatcctccaaatgggagataaaattcctcttcttgcggtagtgagcctgcaagtggaaaaatttagtgttggcatctccttccctcaaataatggacccgggatcttaaacgtgcaactgtcctttccaaagaagcaaggacaatgcaatgctgcttcaatttgcgcagcagccacacttcctcagacgacaacaccctgctatcctgggccatctccatcctgtgcagcaccttacgagccagcccagccgagaactgacattgccgaccgctttatgcccccaagattgtgaccttctcgctaatcttttaaacttcatcgacaccctctcaatagggcaagaagcctgaatcggctggtcccaagaaacaacaacctcttccataaaacccgggagcttaggccaaaagctctcgaaatgaaatccacacttccctttaagatccatactgagcttaaggatcagaggacaattgttagaagtttcagaattcagatgcactgctataaagaaaacaatcagggaaagcctcctcccaacaagtagaacaaacaacatgatccaacataacaagagtgggattctccctctggtttgacagacgaggaaagaaaaagatgggagtttgctggagccaaaggtttatcctttttggcagccagtatataggctattgtagttttgtgtgtgtttatggatccttttgtgtatgcttgtgtgtggcctccgtaagacggacctctagtggctgggcctgacctccaaagagttaatcaaatctctgaaattagcatggtgactcaagggtagtcccagcctcccgggggtccgtcttggcccagtagtagtgggtaccccaatcttgaggtaccgacagagttattcttgtcttttaacttgtaaaactgattaaaatcaccagcaacgatccacgggcctacacatgcatagagcattatattcggagacatttcattttgtaaactgaagaaaaaaatgcataattatattttccttttccccagtgtcttgccaataaaaggcacttgctacatataaaatcgatgaacccattctcctgtgaataaaaaattacacgtttgtgttatgttgtagacaaatttccaaaaaaaaagtggtacaagctctagtcatcagggtcagccactgggctaggacggaccaccattagcatggtgactcaagggtagtcccagcctcccggggggtccgtcttggcccagtagtagtgggtaccccaatcttgaggtaccgacagagttattcttgtcttctaacttgtaaatctgattaaaatcaccagcaacgatccacgggcctacacatgcatagagcattatattcagagacatttcattttgtaaactgaagaaaaaaaatgcataattatattttccttttccccagtgtcttgccaataaaaggcacttgctgcatataaaatcgatgaacccattctcctgtagataaaaaattacacgtttgtgttatgttgtagacaaatttccaaaaaaaaatgtggtacaagctctagtcatcagggtcatagacaaacatggtagcaatcagttaccaacacagtatcatatcggccatctgttttaaattatagtttactttagtttttccaaggtcaaacttctctaattttgatcaagactgtaggaaatatttgaagtatggcttgct

SEQ ID NO: 1859 - DNA, 2458 bp, Zea Mays
ctgctttacattctttgggataacagtaaaagttgtcctcatccagtcgtcctctttttatccaaagccaagcgaacgcgcgttgtggagggaatgcatttggtttggtcttcctttattttcttccatggagaagaaaggaatattttgcagcctttcgctacagcaactctgaatcatttcgtcgagaaagcaggaagcatcagtccgtcgagagtgcagtggtggtgggaaggagatcaatgtcaatcttctccaagcctccgggcagttggaggctgcgtgctacagcggcgtcgagttctagaccgtgccgacgttgatctgggcgatgcttaatgtaccggccgggtgaggcgatatggtgaggggtgaccgcgctggggtacgactacggactacggggaggcggagctccccaccgccggcgggtgcgccttctcgccatgaaatgcactgggaacagctcgcttgggacgcgattagctccccggccaacgcagcgaggccaatcccgcaacgctcctcgatctcaaggacgctggtgaacgcctcagacaactcatgagttatgagataatttgtaacccatttacagttcggatttgactgccacgctaactgtttaagatctgttcaggagccctattaaggaaacttttatatacagatgacctcgaagtctccaacatgctgtaagaagccttgctgtgggcggacagaagaacagagaggaaagaggtaggtgtggcatactgccagtgggatacataaattataaactatgtcagctatatactgcaatacgaggaacaggcccagcagcattcatatgcagttccatgtactccagagctcagctatggtgctacattcatcaggtcagatatgtatcgtactgctatttttgttctgaaaaaacctctggtactacattgctcaggtcagatatgtatggtactgctatttttttccggatacccttggacagctgtatgccttttgagcagctataacaggagtatgtcggattacttacccttggacggcagcttggaacttcaacctgatctgagcagtcagctggctttgcaaaactgagttgattgagtatttataataatggtcatggccaatgccaaggcattaacaactttcggcttataccaaacgtgctgagaactaacttattccgactcaagatagaagctgcagcggttttgtgaagtgaaccaaatgaagaagttacacttccatgggtagatgacagcaacacaaagcttaatgtatatatgttaattaaaatgatatatcctgtgcaatcacttattatttggtgcaatcatgctattaaaccatccaacggtttcatatgaaaggggttaatataaaataggtactaggttttagatgaaagaggttaaatataaaatagcagccactgttgaattttaatcggatgcactaggttgctagattgtatatgcttgcactaatatgattgattgcataggacatgactgctaggcgttgcttgtatcatgatatatagtagaccttctgaatcattgttttttgtttataacatatggcaccgatgatatttcgcttagtgaaagagtgtactaagcactagctagcagctgcttgttttttgtttatgccatatcgttttatccttttagatcttttccactactaacatttgaaagggatcggagtactaataatctactgataaatcatttgtgcttctcaacaacgaaatgaagaaatatacatcttgtgccagcatattattcatgtataggtaataatttgacattgttgtcggtttgtgtaacataaaactatgtatttctccgttcttctgcagattgagttgtttccttcggtggtccgcgctatatatactgcattcaagtgggggtgtgtgcaggcgcagctggtatcacgctcgtgtataggctggctgcagaacgcacagttcttcggcactgtgcgctgctcaatgtacgtattgatattgatgtgtggtacgtacgaatatgccttgttgcatagatacaacttctttggtcgtttttaatttttttttaaaattcaaagtactactacttcagaatgacaagactagatacatgtgcacacactgtttatcctaagccttgcggtacaacatgtgacctttgagatgtttcatggcgtggggtggattttaatcgatgtacaatttacgtgcacaacagttactattactgctagggcctgctgtcgcggtcacacgtcaactgcagttccttgttatggtagcgaagaggtggccaatgaaggactacgacataaagacaataggtgggctttcccacgcatcaccattgtttttttatttgtgaaattgcaggttacattcatatggtttttgagaaatatagatggaggatttgtcgtctgttct

SEQ ID NO: 1860 - DNA, 2522 bp, Zea Mays
cacataatgatttttatatctaacaatgtgtataagtgacaatgttttacaataataacaaatgaagtacgatttaattataatttaaacgggaatggggatctccgacggggatttatccccgtggggaacgaggatggggaagaaatgtcccccgtaagcgttcgtggggatccccgtgggaaaaatttttcgtcgcaaggacgggtttggggagctaaaacccgatggggaattcttcggttgccatccctacgcataacgcacaaacgctagtatggactttggactcgatctccacatcagacacgtccgacaatgattaatcctccgccgtgaggattagagtcactgctcatctcgccctcggagagccccatgttggacatggcggcggtggcctgcatccacacgcgcagccacgacccacagatcctgtacaccggtagctcgtgcgtgtacgtggcgcgacgacgtccaggcctccagggcaccggccgcaatgttctcgaggtcgaataggtcggagctggtgtcgttgccctccttgtcctcggtgcgaggaccgtcagcgagcggaccggcggcgcaagcccgccgccggagcggaggtagttgaggaagagcaccaggtagagcgtgttgtcaagcgttcccgacgtgcagcttccgccgcacatgtgagcgtcagcccactgacgttcgtccccacttccgcacggggaactacttatgcacccttggtcgctatgcagaagccaaggaggagtaccttcttgctcttgaagccgcggaggctgacggctcgtagtccgcgaacatcctcccgcaaatccatgtcaaccttggtattggcatggaggctgaggcctgaggggatggtacttggtgcctgtgagcattacccgagaagtcgccatattgtgcccatctcatgccaggccagtgaggccacgtacccggcgttggtggggaacgtcaaggcgaggtcgcttgtgaccagcgcctccgggagcgaccagaggaccgggagcactgttagcagacaagaaaaaccaagtagatcaaccaataaatctctacctcgaactaccaatgcctcgctcttggaggacgattctttcgagcgagccatctgtctcatcttctctttctacggaagagcctcatatacttcatgtagggttagtttatcacgaccgtatagaatgttatctcaaaaatttacaaaagatataggtagcgagcataacagaattaaacctagatcctcgtcatcatactcaacctccatggactttaatcagtgactatctccttgaaggatgctaggtgaccttcactatatgtggagtgtttacagaacgtcgttcgtagacggcggcttacaaaaggagtaaatgacaacacactgcaaaccctaattaaggtcactaatatataccacggggtgacgttctagatgatgcctgacccaagcctctcgacgacgggcctccgctccgctcgccaacacgacctctatatgtagaatttggatcacaaactcaacaatctacaccttgcgacaaattccatcttatagccataacttgtaatcaattctctcaataatagaaggaacaaactgtcggtgccaacatagccactaggctaagcaattataccaactaagttcgagcaaaacccaaacttagctccaagaacaactttagtcatcatgtcagttggattgaagtgtgtactaatcttgcataccctcaattgtacttctgcaattatttcccagttataatgatacttagtattaatgtgctttgtcctctcatgaaacatcttatctttataaggcaaatagcactctgacggccacagaacaatgtaatacaagatatatctccacaaaactcagcatataaatctttcaaccaaacagtctctttgctagcatcacaagctgcaacatactctgcctctgtagtagataaagcaattgtgggctgcagacaagccctggggctacagacaagccctccaactgactacatatccaccagtgaatacataacctgtcaatgatctttattcttatccaaatctgctccataatcagaatcaatatatccaacaaatccctctttgaccttgccaaactgcaaacaagcattagacgtaccacgcaagtacttgaaaatccacttaacagcttcctattgtgttctaccaggattagccatgtatctgctaaccaaactcatagcatatgacaaatcgggacgtaagcaaaccatagcatacatcaaagaaccaacaacactaggataaggcaccttcgacatatactttaaatcttcatctttggttggacattgagcagatgatgttagaaatgaaaaccaaacaaactcacaagcactggatggactcaagagaatttgtgccgctaattcttgcgacgttttctgatgcaatttatagcaaaaacaaaggaatacaagtagagtccgagcgtctccacgatg

SEQ ID NO: 1861 - DNA, 2558 bp, Zea Mays
tctttctctccccctcacctgccggcctagctaagcatccatgccgatgagcagggcccactcgtcagcctcgctaccgcgtcacccacgcgcacgtctctttattatttccagccagtcttgtgtcaccctggcgtcagcaatgacgtcacctatacgcttacccactcgctgacggctgggtccctcggactacactccgtatcaagcgcgtatgtccccaggaaacggttacgaccgtaacggcctaccgtgatttccgatttccagctgcgtccaccgcctttgttcacctatttaaggcagccggcctccaaagctccgcctccccggtcgtctagagaagccaagcgggagattccccgtcgtgtggcacggctgatgaagggagagggtgagcgcagggagccgagaagggagttcaggttcttcaacgacgaagcacgcaggggcgggccacggtgcttccccataccgcgcgggagtcgtccgcgtccgcgacttcaccgagccggagactggagcatcgctgtcggatcgaagggcaccgtcacgccgagaccttccgtaggcaaccgtatttatgccggtaagaccacgttcctgtaattcgccatcctctccgctatgcgtaggttcgatccgcgctccgatccatactctagggccgcttatccgcctgtccgctggatttgcaccctcccggtgcatggcgccgcaatccggaatgtcgtggggaggaagaagatcctagggccgttgatcgggtaatatgcggtggagattagaccggcgtgtacccgttcgcaggatttgatcggtgccgtaggaggggtgatggagggtgtatatgtagtggtagtcgtggctgctgctcggccgtcgaacacaggatcgacgattccagtcacaccacaattcgtaaaactcctgatctaatctggtccgttggtgggagatcggacggctcgggttgaaagatacccattcgccgtgtaattttgtttgagtccctgagcttctacatattcaacccgccgtcctagcctatatatatatatatatatccttacggtcaggtccagtttttcacaaaaaggaccctgtgctttctagaaatcatacccgtagcccagagtgctgggataattataaaaatgattccggaaaatgatttctgatataaaattaatcaggaaacttagataaatcataacttcatcgttttaactccaaatttagtgatccttgaacctacggtttcgtgtcgatttgtagaataatattatgcagttgttctcatgtttggtctaatgttaaattttgtatatacattgtttgtatgtattgctgcaaatagacgagcaagtgaccgaggaacccgaagtagcccaagttggagattctgagcaggagctcgcagaaggcaagtgtgtccttgatcacattctttgacctaataatgttagttgttatgttctcaccaatgcttgcactgttaagttaaattgatgggacctaataggttacctagttttgtttaccttacaccttgcatacaaatgaattgttgggtagtcttgttatgctctacctggttttgggattaataatatttatgattcatgatcatgtttcaatatgatttattatagttggtttattattgtgcatgacaagataactttgtttaattggaacatggagcttaactcgagaaaacagtgcaaccacaaggactatatggctctggtcttggctgattaattaagaaagctagtgtgagttaatcctttcccgaaaggggcaagcggggtggagaagctgctggtatagggaggttctcgggtcgatctgtctgtgatagctttttggacgagggattcctatatcgtcttcggcccagaaaccgtagcgggttctctcatgctagtggaactttggaaaggcctcgtagtgctaccctgcctcgcctcctcggtagaggtgtatggggtccgtacaaccccgtggcagatgggtatcacgacttgtgggtaaagatgtgcaacctctgcagagtgtaaaactggtatatcagccgtgctcatgatcaagagcggctcgggactctcgcatgattaacttatggaattaaatttaatctgtcatatgcattgcattgtgggaattattattattatgatctgttattttattgggatggtatacacttatacttagtaattgctaataaaattttgaccaacttattaaaagcaatgctcagccttaaccattatttgtttatcagccttacactacacatgagcccccaccataactgagctcatacacattattccccacacttgctgagcgatgaccgtatgggagctcacccttgctataatcacaccaggtcaagaacaggtactgcaagatgaagactactacgacgagtttgatgagatctaggcgtcgtctcctagtcaactagggcttgtggaggatcatcgtcgtcatatggtgtaatatatttagttattttgtaaagaaactccgattatttaataaag

SEQ ID NO: 1862 - DNA, 2601 bp, Zea Mays
gataaattctaaccatcttaagcaacctcatttgaggaaatagagaaaataacctagctatactcttctctctcacacatggtgaaaccctagatccaaaatgtggctaaaattgagcatgaatgaacaaaaaatggcaagagaaacataaaccaaccattcttagcaacctccttccagaaaatgaagatcaaaacattcccccttgtattttttgaaatctggactaccaaaatcgcctccaatggaagatggctgcgagaaacagtactagtcgaggaggaagtaggagtatttatataacaaaggtcacatgcggttggagtatgcaaccgccagtggaaacacatttgcactggtggttttgtttacacaaccgccagtggaaatcatccatttccacttgagtagggggttgcaccatcatcttgaggtacatgttcctcaccttgagtagggggttgcaccatagttgaggaagacgattgatcttctttttgttgttcttgcggtcatacatctccaatcgccatggttcttagtgcggccatcggaacctcattctcatctatatcatcaagatcaacttgctccattggagagccattagtctcatcaaatagaacatcactagtgacttcaactagtctagaggatttgttgaagaccctatatgcttttgtatttgaatcataaccaagtaaaaactcttcaatagctttgagagcaaatttagaatgtctacttctcatgttcaatgcccgagcgaagtcaggcagcaggttccaagggagaagcgtgttctcgcatcagagcctggtgtcctgctcagcttgttcttgttcgcgctcttaggtgtggcgacgattgtgggtcgggagtggcggcgctcacggagcgctctatcgtcaggggtttccccttctttagaggcattatcctaggagacgggttgtgtaggatctcattccccggcctcgtggtgatgcagtatattacgacgcctgtttcgatgttggcatgcatcgcgcttagggggctcctccctagtacggtgggctcatagtcggaggtagacatgttctttattcttccttagatgaagaagatgtctgagaagaaagagcttggtgcgatactttgtgctccgaccatttcctttgagggcggagtggttggagtgattgtctttcgtgccccacgactacactagtgctggggggcacctgcttctgttcatcgagtgatctgagtccatgcccgagtgggtgacgtcgacaagggggtccgccatgacagagcgtagcctcagtcggccgagccacaagtgtcacaatgaccctagtttcacccgatgtaggcgtaattttgcgtggggtggaagcctgccgaagttcttgcgccttggagttcatcggcgtagttcttgctggcgttgggcaaggcaatcctgctgtcgtgtttggcgccatcggggaagatctgttcccggatgggtccgcaatgtggcgcaagatgccttcctgatctgcaatgcagaagagggatccgaagcataagaactctctagcattgaaggtgaccaggatgttgaagacgatagccatggagtcttcatagaccagccgtcagtgtttgtgacctaactgcgcaccatggggttacccacgtgatgcttttgggtaggacgacatcgtttaccgcgactcgatggtacgtgcaggggcacgtcgtacttgcacaagggtttatacaggttcagaccgctttagaatgtgtaacaccctacttcctgttgagggtgtgtactagattttctctagagtatgaagattacaagtgagctttgtgggtgcccaggtgttgttgatgagggcaggtgtaaggtgagatgggatgagatgagattgttttgtaggggtcccccttggccttatatacatgactagagagttatccctttacacgatgcgatcactatctactctactgatctcctccttcacccaagatatcagtgctttggcagcatgtaactcagacattagtctttgtgtctttgtcttcttggatcaagttcgtctgacctgattataacctactggcccatcccatagggcaagccattgggaggcccatcaggcgacccatgataagtttaagtgttcgtaaggacccgggggatatctatcccccacatcgactttctctcacgttacatgcatagaacacgactaaaatcttttgcgcccacgcctacatctccccttgatgtctacagttcccacccgactgaggcccattgggcacctttcaggcaccccatcgggggccttttagatggctcacgggacataaccgggtcatggtgacccaggggtatctatccccccacactcatagccttacaaagtgatcgcaatcacaacttagagtaaaggaaggagatagaatacacatacaagagaaaatcacagcaacacatgcgagaaaagcgaacataagagcacgagtagaagatcacacaagaacaactcaaaattggtgctcgaatctctctaaaatcactaaaaggcgtggtcgcagagtgttagagtgttg

SEQ ID NO: 1863 - DNA, 2684 bp, Zea Mays
actcgccatgcgcatcgcccttccagtgtctctactctcccaccgtctctctcagctctgttctgagagttctgactcctccccatgtgatgtgagcactagcagcagcatggcaaaagtgacgtgcagcggtaaaccctgaaaaaggctgggcgcatctcgaggaggaagaagaggctgctgcctgcctgggaaggctggtgaaaggtgcaaagctacagcgcccggaggatggcgagccttttttcagaggtagtagtatggtggcgatcggcaaaggttggtggttctcgggagataataatctgacagcacggtaacagtaatccagcagccaactctcggcattctccggtctgtactctatctgtctcttcaaagggttgggccttcaaagcccattgaagctcagcccatgaacaacaagtcctggagcatccgcttccaagttccaactgcctagcacttgaagatgaggtattggttgccaggacagtatggatggtaatagatcacgatctaaatgtctcttcacaatttatttaagtccataatcaattatggttcaaaataaatacaaatagagtctaattctaatctgatctttaaattttgttgtgtaaaacttagagcccattaccacccatagagcgaggaggattaacaagtctgttaaaaagaacacatgagaaattctgttagcaataggtattgcactaccgcttaggtgtccgacattacggtgtcacggtgctgtcaagctcagagcgacactgtcgtatataaacggactttttcaagggtaaattaaaaatatttgtcaatgaaaggtagatcgagtaaattactagctttctaggccatgatgatgagatattgtctatatatccgtacttgcttagggatttgactatatccttggtttagtcaattggaatactaatgatttattatctgacatgcttagggatttttttttttgactgagcactccgttttcgtatagggatttgcttatcttcttcactgttgagagaaccgacaattactttaaatgtgtgttccagagttcgaggaaaaaaatgtgtgttccagactatcatgttactgagggcctattagtttccagaagtttgtgaaaagctgctaacagaagcagcatgggatggccaccaaagacgaaatatcttattgaatacgaatacgaaggagatttctcttccatagatcttctttaattctctgtccactaaaccaggctcgagtcaattttaagtgtttctatctatgcttgtcctgtccatgcccatcctagtatcagagattaataactagcgtcatttatatacttgtacctaggacggtgaccttgttggatagtgacatttttttagctgctaatttatgtactagtagcaatggtactagcatgatttacctatataatcgaggttaggaagcgtggctggtttgctgtgatagtgctaccaccttgaacaatttcagttgcataggtatgatcatacatggatacattttttataaattgatccacaatttcagttgcatgatgatcatacatagttatatatcaccatttgattatcatagtagcgttatcacaagcaatatatatataattagtgtcagatagtttttaatctgtttttataataaacttatctagagataaatatattgctatttttatataaatttggctagatttaagaaaaatttaatcggtacgagtacgtagtgataactatttacttttgagagaaagggaatgctacttttctgattgatccttgtgaactgattcaatgcttggaggcccacttagcgagctggtttgatctctctgctggtgaagtggcgatacaaatgatgttctctttgactctggtcactgtcatgggctgctcctgctttgtagtaaaggcacgcaaactttcaggcagaacgagcgttggtctcagcttaaaagagcttttggcctgggaattcacctgctcctcgctcgtggatccgaggggcctctacatccaaagttacacacagtggtctgatgtatcccgtatttaattttgatacagagaaaatcgaaattagttttgaaaattgaaaatctatacgccaaatttccccaagaaacatcgaaaaccgttttaaatttttgaaaaaaaataaaactgatcgagaaattcgaaatcaaccggtttttggacgctttctcgttaccattaatcaccgaaaaacgaaacaaaacaagattgtcaaccctgatcctcattgagaaaagataaaagagggatgtgtcggatttgatgagagagaggaggggtagtgccgcagcgacgagggagtgtcaggaagaaaagaggcgaagaacagggagaaaaagaggtgcactggatatggagtgaggaggggtgacagagatattatgttttgttgcccccaaagcgacgaggaagtgttgggaaccaaattgaggaccggacggtccgcggtctggaccgtccgcgcgtgcagaacagattagggttccgagttttttattgtgtttgttggcgaaattcatgggattaactcgggagatcagtttgtaacgggtccagtccacctcctctataaatatagaggattacggccgattataatcaattaatcgaacattc

SEQ ID NO: 1864 - DNA, 2739 bp, Zea Mays
ataaagttcgggctattcaaccattctcccccctacgatcctagctctgctccaatataaaacccgagctcggcgctgccttggccatctagtactataccgccgagggctatcatagaagttaatagccaccgccgtcgtgagcaattggggatcagagtgagccatcagcggggcgaagagaaaggttgcggccaccgttagtgatccccttccatgcctctatactgcgctcaaaattgtgcccaagttcttcatcgcgctaaattgaagactcctaaagcttgaccggccgataatcccttgtcggccttcacagccacaacgcctcccatcgccgtggctacaggccatcacctcaccaactctggtaagtcccctactatccaaaccgtagtagccttctcgttgttttcttcccaatcgtgtcgatgatggagctgtggggagagtttgggtgctcggcgaccatggcgccgccgtaggggagaatacgctatcgtggggccctgttctgcgccgccgtgggtaagagttgtggtgtggatgaggcacatggccgttgatcgagtaaccgagggttgagattgagcgtccacgtaccccttcatttttttgatctgatccactggatcagagtcggatagaggagattaatcgatggtgtggccaaaccttgaccacgaatctgagatccaattattgagaactcgtattggtccaggtgttatgaagatctaatctaggccactcgggtatgatcgggcagtccataatgaaccgtacccccttcgtcgtaggatatatgcttaagagccctcacatttttaagaaattaacccgccatccaagactgtgtaaagagtcttgcggattggtcctagaatttatatattgaaccatgttcttcttagaaatagtactcgcaatccacagtttattaaattaagtaaaataaatccgatataatgattattagtataaaaataaatccaataaccttagaaaatccataacttttgcgatttaactccaaattggtatgttctagttgcattagctttgtagtaaaattgtctacacattaaaaacattatttgtatcattccacatacctctttaattgggtatttatttaacttatgatagttgataatcattctagtcaaagtcaatctgcctataattataatctgactaagatgtgatctctactcaagttataacctaaattaaagataaattaattatttattcatatcctttctgacttatattaatcaataaagaataaagttttactttttaaagaacctaaaactttagaatactatatttttaaccataactccgattttagtggttctcgaacctacgatctcgtagcggcgcgtagaatattcttacattgtttatttatatgctttggtgtaatgttaccatatccattatttgcttgattgtatgtattgctacgagtagaggcgaggtgacgagtaacttgaagcccaacttttgggtcaacgcctattatcacaagtcacaggcatgttgtgcccttgatcatgcttctttacctaataatgttcctgttaatcactgtgacatgctcaggttaatttgatgggacccaataggtttccctagttttatttaccccacaccttacaaacaaatgaactatcgggtagactcgctattgctctacctggatttgggattaatgttatattgaattatgataatgttccattaatactgttagtttaattattgttcacgataagattattatgttaaatggaacatggatcaaccacccaggaaaacagtgctaccaaaagggtggaatgggacacccttagttgaataattaggaaagctagtgtgagttaatcctttcccaaaaagggcaagtggggtggaggagtgcaggtgtagagaggtcctcgggttggactatatttttagctttccgaaaaaggaattcctacatcaccttcggcgcagaatccgtagcgggttctctcctctagtggaactttgtaaaggcctcgcagtggatccctagccattcaccttagaagtgtccaagggtctagctaaccctggctaaacaggaaagtcttgtgggtaaagatatgcaacctcagcagagtataaaactgatatatcaaccgtgctaacgatcatgagcagctcggaccctcacatgagtaacttatggaactaaacttaatctgtcatttgcattgcattgtgggttttattattaattatgatcttttatttaaatgggttggtatctacttatacttagtaactgctaataaaatttgaccaactctaaaagcaatattcagctttaatcatcttctttggtaagccttacaattcacctgaacccccatcgtaagtgagctcatgcacattattccccaaaacttgttgagcgataaacatatgtgagctcacccttgatgtactcacatccccccaagtcaagaacaggtactgcaatatggggagcaggaaggatgtcgcgatgagttcgtgagaggtctaggtcatcatctcccagtcaactatggttgcggaggatcgttgtcttcatatgatgtaattatttagctattttgtagagaactcctattatatagtaaagatgtgacattcatttttgtaccatgggtcatcatatgtgtgagacttgatcctagcacacatttgattcgcgct

SEQ ID NO: 1865 - DNA, 2784 bp, Zea Mays
ttatcctcctggttggcctcatcttcaagctgccactctaagccgatctctatcttctaacgctctctctctctctctcccttctgatattttgcaccgccgtgcacaggtttctggtgttttctccaatgcgttcatctccctctgcgctcctccctgtcgcgccctccctggtgcacgcgcgcagctccctctgccttccatggccgcgccggtttggagctatcttcacgcgccctggttcctgcacccagtcatcttctcctaccgcaactctctcctccctccatctctcctgcgcgcgcccagccccagtgcccggccgagatccctggccgccgcgccctgctctcggttgctgctcgccggtgctccagcttgtcgggcgcgcccctgctcctcgcccctccccagccgaggcccctccttcccgtttcccatggccaagcgtccggccggagcttcttttgctcagctctctgctgttgagctcctccggctgtgcttccctgctcagcgcgtttctccctactctctccctcctctggacatggatgcttaggagaagtggtagccccagctcggcaacaccaataggctccctggaaccagcctccctttcgagtccctccgcgtgccactggtctctgcttctcccacggccgccgtcgagtcgtcggactcgtccattccccgctcgcccctgcgctcgcccagctccctgtgcctgccattccagcaactctggcgtcaacgctccctgttcttgttgcttagagtgctccagcatctcgccctcgtggccttcgagttagattaagttattggtgagcgccgtgctgtcggactccatcatgcagccggtgttcgacaaagaaaaatctagtctaggattctgactcggcctcgaccctgtcgtccttgaaggtcctactatccctatgttgttcgtcgttatcttggtcatgtggtggccgcaacttcctatgttagtccctagtccacatcgtcgtccagctcagtagccgtataccatcgacagaggagagaaatcactggattgcgtgacaaagaagcgtagtccaatatgacacctgccagccaagcactcgacaaattccctgaatcggagaaccattaccgatctcgtgtattcgagtcagctattggaatggtcgcaagcgctcaatgtggaagaatggaattagatgaagaagaaagagaggttcagcgcgatgctcactaggtgctcaataaattgcgagtcacggaactctcgtcgacttcgaggttcttgcgtttatcgagccagattcagttatagcaagttatttcgctattccagtcaattagctgaattggtggaccgagtagaatattagtaggcctgtgtgatgataaaatattttaatcacttataaagatgtgtatatatttacgataaaaaatcgttgatatatgaactaaaatttgaattactactttcagtgaaaagaatattggtagatatatatatggtatgatggtgttcgcgatggtgaagtagttgtgtcgtgtgaagcttaggattgtttttaatttaggattgttattaaaatatgatgtgtaacacgggatatgggaaattatgaaataaaatgacttgtgatgatgaacccattgtggccatgatggtttcatcattcaagtagggtacctctctcaggtatcaagctctgggaaataatatgtaatgtagaccagacgttgagtaggaaagttcgcccgttagtgtcgattaaggaccgttcgatgtaggcctgttgtggtggagactttgcaactagccacatgcttcggtaagcctgaacctggctattccatacatgaaaagacaatcgcgcactgggcgtgggagatggtgggagtagtgtgtaccctcttggctagaggctggacgaaggagtactgtgctctcgagtagcgcggactggttcacgttgtggaggatctgtgcaaatggttgacatatgcaagggttaagtgctacatatgtcgtgttgttagggatccccagctgggtataatcggttcgaatcgtcgttgctcctcggtcatggagactaccctccgaccactcatcgtagtttataagtaaaataagaatttgggtaaaagaaagctagaccaggacaagtgaatgctctagattaggcaaatctagattcaggaaaagtacttaactggtgaagtaaaattttggcataaaggttcactactagtaagctcttctgcaaatgagtctttgaaatttgataagccttaccttgaatccttttaaaaccagcatacccttgagagtcttttctttagtcgggtaagtcttgctgagtacttgcgtacttagggttttattcccattgttgctgcaggttacgagtcactttgattgtgattgatgttaagtgccggtgggctcggccttcttataagtctaagtacttcttctatacttcttattgaggattgtcattgagctagcatgtatttcaaacttataaataatttataacatttcaaagtttattctttgaaccactattgtaaccactccgataaatataatgtaaatttgttgttacatgtaaaatttggtaataagatttccgctgcaaattgttggtgtgtgatttgtgtttacttaatcctgcggtcctagttgtttgtggtttatccggggtccttgggacaatcagacggatcctgttaagttatctggtgcacatgcatagccgtctgaggtct

SEQ ID NO: 1866 - DNA, 2798 bp, Zea Mays
cgcaaacatcgccacattgttgaaacaggcctcgctcttttagcacatgctgccatgcccctcaaattctgggatgaggcctttaccacagccacatatcttataaacagacttcctactagggtcattgataacttgtcgcctctacaacgtttattccaaacaccacccaattattccttgctcaagatttttggttgtgcctgctggcctcacttacgtccctacaatcgccacaaattatcctttcgttctaaaccatgtgtcttcattgggtatagttcacttcataagggctataaatgtttagatatggattcaggtcgagtctatatttcccgggacgtagtttttgacgaggctctatttcctttttctactccttcatcccccgttgcagaatcatcccacggtagtacccgtgatatttggaacaataatcatttgcataatttgtttcctgctaacactgtggctgcagaccggtgtgctgtcccacctccggtcgaccctgcacaagactccggacaggtgccacttgctgaggaacctgctccagacttctcccatgacgtggtcaccaatatggtggcagctggcatcgaatccatgcctggcgtccaacagcctgtactggctcaggaaatgtcgccaacaacggtggagccttcacaggtccggtccttgcaccatcttccacaggtccgttgcatggcactgtgcatggcgttgtttccatggcacccccaacagaggttgccccggcttctacatcacctgcaggacccaagccacatccatatggtacacgtctgcaacatgcaattcgtaagcctaaacttcgtactgatggaacagtgtcatattcagtggaacaggtgtctactgttgaaccacactcacacattcaagccctcaagcatccactatggcgtcaggccatgaatgatgaatttgcagctctcctcagaaatcggacatggcacttggttcctcctcgttccggtattaatgtgattgattctaaatgggttttcaaactcaagtataaaccggatggctctattgaccgctacaaagctcgactagttgcaaagggttttaagcaacagtacggtcttgattatgatgacacttttagtccggttgtcaagcctactactattcgggttcttctttctttggctgtcacacatgggtggtcactccggcaaattgatatccagaatgccttcttacatggtgttcttaatgaagacgtctatatgaagcaacctcccggttttcaggatacccatcaccctgattatatttgcaaactcgaaaaatctctttatggcctcaaacaggcaccacgggcctggttctcacgattgagtactacattgatccagttgggtttcattccttctaaagaagacgtgtccttattcatcttcaaccgggaaggtattcacatgtatattcttgtatacctggatgatatcattattgtgagctcctcttcatccgctacggagcgtctccttcaccaactacacagggagtttgctatcaaggatcttggtaacctcagctattttcttggcattgaagttcatcagagctcaaatggccttctcttaacacaacataaatatatcaatgatcttttactacgtacaaatatggaagcttctgtgggctcccctacacccatgctgcctgtggagaagctgtctctccatgacggtgatcccctctctccagaagatgctacgcgctatcgtagcgcagttggtgctttgcaatacctatcatttactcgtccagatatttccttttcaatcaatagagtgtgccagttcctctcgacacctactacaacacattgggcagctgtcaagcgtattttacggtatttacgagctactacctctcatgggttatgcttcaccaagtctgggtctatgctgttgagcgccttttctgatgccgattgggcaggtaatccggatgatcgacgaagtactggaggctataccatctttttgggcaataatttggtttcttggagttcacgcaaacatccgactgtgtcttgatcgagtacagaggccgagtacaaagctgttgccaacactacggccgaacttatatggattcaagttttgcttcgagaacttggcatctcattatcacgacctccttctctatggtgtgataatattggcgccacttatctctctgccaatcctatttttcatcgccaaacaaaacatgttgaggttgattaccacttcgtccgtgagcgtgtagcctctcgtcaacttgatgtccggatcatctcatcaaaagaccagattgcagatattatgaccaagccattgcctggacctgcttttcagaagatttgtggcaatctgaacttaatttcatatcgtccagattgaggaggggtgttaaacatagaagtaaattacctgtacatggaatgcatgcatgcactccttccttagatagctagaccgcattcctgtaatctcgtgcatactttatttcctacgatagctagactgcctgccagatatgcagacatgtaattctccttgtacattgcttatataaaggaatagcacagccctgagaagcaaggcattacgcctaaccaaacaataccaaccaccctgtcccatgtaaacagcacaaaattagttttgctgcgagaaacagtttgaagtgcaatctatttgtactgccacattggcgatggagtttctgtttcttcagtagttgtgccagaaggatctctgtttcta

SEQ ID NO: 1867 - DNA, 2856 bp, Zea Mays
ttttagtaccaatagcagtagtaatacaaatttagattacagtaagtagcaagttgcattaaactggtatacttgagtgtccagcaatagtgtatctgtagagtttacatagacaaacatagttctaggaagacttcaactagagccatatgtacataaaagtctattgaccaaaagtgacctagcttttcttgcatacacacagttctaggaaggcttcaacatcagattaatatatatataaaagtcttatgaccaaaagtgatggagcctcttctatgcgtgcaaataaaagtctattgatcaaaagtgaccagtctttcttgcatagacacacagttctaggaaggcttcaacatcaggttaatatatacataaaagtctcatgaccaaaagtgatggagcctcttctatgcttgcaaaaaaagaaacaatacatgtatacaaatgagagtagtatgttagcataaacagcaccaaagagcacaatgtaatattaggatcataaaacaaataacatttttttgaaaagagagaaacaataacatacaatatgtttattttatctttccctctgatcaccgcaagcaggtactaagtctattagcacaacaagctatgttatgtctaagatctcaagttacaaaaacttaattgaaaagttaaagtgtttctcgaataagatatatcaagaggctaacagtctaacacactgttatgatgatatataaggaaaaaaaagagcagcatagaagcaagtttactaagaactgtgttgcaggaacattttttggtagtgtgtattttcagtgcgcactgtgtattttcagcacagaacataatgaacataatagcagtgttcaatgtgcactgtgtattttcagcacagaacattttttgaacatatattttaggaatgagtttgctcaggttattcttgcagcaaaaaagggctatgaagtatgaactacactaattagccaatagctacgagctatgtaatttgtttattttctctactatcttcttgcaccagatgctgtgaatcacttagcaagcaactacaataaaatcagaaactgaaagcaagcatattccaagatgaaagaaagtgcaatttttttctgttgcacaaatggaatgacatcagatagtgagagaatagaataaagaggggagagggacaggagtaaggtctgactttttaaaagaggaaaaaaagccatgaagatataaaatcgaaattagattcaacgaaggcgaactgaattattttttctgttctacaagaagtagacagtagagttcctatgaccattatggacccaaaattgtcctgcagcaacctacgagcacaaaaactgttttgttggccaaatgaaacgtaggctacacacacatcttagaatgaaacagagaaaccagggattaaatccaaaagctaaatttagggaaaaccataaacagtaaattttggggaaaaatttaaagaacatagacgttcagtctattcgcaaagtaaaatagtggcatcttagaacctcaatgtttggtggccaaatgaaatacgtgtgatatacaggtcttagaatggagcacagaaactaaggaataggtcaaaaagctaaaaccatggaaaccctaaacattgaaaaaaagtttgaagaacatagacgcttaatcaattagctaagtaaaatagtggccttttcaaacttcaatgtatcgacaaaaaaggaaaacaaagtctgtgcttcgatgcaaacagtttcacctgaatgaaatcagatgtctataggtgtactaatgtaggacttttctgtgtcgaagagaatccaaatgtaaggccactcatgtcatcaactgtgtttatgttggagaataaagccacattgcttctagcaccaaaggagcatgtttatcttttctccaagaaataatgaaactgaataaacaagaaagtaagaaacatagatggtttcctgaaatatatcatgtaccatacctcatatatggggttttagtcaagtttttccaaacatgctatttgcataggactcacgttttttgctttcagaacatggactttgtgcctaatatttgccttatgcataatatttagtggattttgttattgccatacatgagctaaacaagcacaggtaagaagcaagagcacttcatgttcctatcagtttatttagaaatgatttttctagctataccggtttgttggtacaggatggctgaccctgactttccttggatagctgcgacagtgggaggtatcatcatttagcaagacaatttaatgacgtcagcatcaaagtgtacgggatagaccagactggtgagaatctttttcccttttttagttgtcatgcttgaactcttatattatcacaaatgcatttttacctgtttttcatcatgttgatgattgtgtgtagacgaggatataaaacactacaccaaaatcatacaattcctacggttttttaactttctacaacttttataacaaaccgtaggaaataaataacttccgagcaactggtagctctaggaaataaacataacttcctacggtattttataaaagttataggaagttagctttcggtatataaatatacactgttgcactagcaaaacgaggaacacatgcaatgtttcataatttaaacgaaaaaatagaatcccaattgtacatatgtgcatgaactggtagattaaataacattgatggtgacagaccaaagtgtgtacgaagtacctggttgatgtagtcactgaacttcaggggtattactccacgtggttcggcccaaaaaagcagatctggggagaatctaa

SEQ ID NO: 1868 - DNA, 2857 bp, Zea Mays
gtaacgacacagggaggtgtttactgagggatgaccatttcgcaacaatcacttccaagagaagccatctataatcggtcctctccttggtctataaaaggaggaggatcggcctgacaaaaggggagactgaacccgagaaccaacacttgatacatagatcctttagtagaataagacttggaactcttccccctctctctagcttgtaaccctactacgaacaaccaggtgtcggtaccgcaagccagtaaagactggaagtagggacgttctaccgaccaatataaatcttgcgcacactgagcacaccatctggatccagaacgggcatacacaaatttactcgttggtactagtttaaaacatcgataaactagtttggaaactcaaatcctctccaattctagagggggtatgagtttccaaactagcccttaatgagatgaggactcttggacacgtcaagcatctccttcttctatggtgtccaacctcaaaggccaagaacaacatgagtatctctacaaaataagacgatgcaactgaatgagtaacatagctagaagtaattgaaatgaaaaccatgtactaatgaagcatattcgatagtcgcatgcaacaatagtgaattacaactattatgggacatctacaagaagcacaagtactacataaggaaattgaatggagctaagcctagacaattttgctctagaagtattctggtggaccgttatatgtgctcctagaattttaaaacacagtttgttttggggaggaccgtgggagtatgtttccgcatgattggttgccagatgcatccatgcagttgcatccatggagtattaaagcacactttgtttggttgtgtcattcacgcatgcagtctcgatggatgtaagaataacagctgagccagactccgatcagatgcagccgagcaagtaaaggcacacaaaaacgagacggttcttgaggttcttttttattatatcttccaattaaaagatttaatcatatataatacaccctttctataatacacatttaagtgcaacttataatatataatacacatttttgaacaaaactagaccacttataatatataatatttaaagattcatttatgcacccttctataatacacatttcagtgcaaccaaccaaacaaagtctatgtctagtctgcacgagcctatacaagcaatcaaacaaaaggatccaaatgaactcaccctgtttctaccaatactagctagactcatgcaagcttgtctctacttgtacgagaaccaaacacatgttgttttaaattttttgtatgcaaccaaaatttacatcatcgaacttccaaaaatgtcacgatgaatttggtttacggttacaaagatctattctgtataggccttctttggaatcgtaaaacttaaagagaaaaatacaaagtttttctcaaatacgtaaaatatatgtgcattattataattaagttagaaaggcgagactatggagacttagggggtgtttggttcctttagactctgttagaatgaatggagttaatagttaggaactaaaattagttaaagacatgtaaatagtttagctaatagttcagctattagctacttttagcaaattagcttataggaagctagctatttgttagatagctaattctactagcaattttttagtcaactcactattactctagtgcattcaaacaattccttagtcatcctcctaaactttatgattgcttctcatggtaaatcactgattgttgaattgaatgttcaacttagtcatgaatttgatatcaaagatcttggacgagcaacgaaaattcttaggatggaaatttagcgtgatcgtcgtgttggtactcgttttctatctcagaaaagttatattgagaaagttcttgaaaagtataatctcaataattgcaaatccgttgctacaccattttcttcacattttaaattgtcatcaaggcaatgttctgttactgaagatgagaaagaacacatgtctcacatactgtattctaatgatgttgggaatctcatgtatgctatgatttgtacaagacccgatttggctcatgttgtcagtgttgttagcagatttatgcacaatcctggtaaagaatattagaatgcagtaaagttgattcttcgctacttgaaagatacttctcattttggattattgtttgataagaattcagtgaaggaaattggtgttatgggatttcttgattctgattttgctagagatcttgataagagacgcttcatatctggctatattttttcattatacggttctatagtgagttagagggcttcacttcaatctgttactgctctttccactactgaagtagaatatgtcttagctactgaaggggttaaagaatctatttggatgcgaggttttatttctgaacttggtgttcctcaggatgccattaaggtttattgtgatagtcatagttctatttatctgactaagaatgacatatatcaattcaaggccatgcacattgatatcaagtaccacttcatccgtgatattgttgctgaatgcaagattaaagtggacaagatacatacagatgaaaatcctatagacatgcttacaaagtcattatctaataccaagttcaagcattgtcttgacttggtaggtgtttgtgtagattagcaccctagtggtatttggggaaacaattttatagatttagcttcatacaaacatttataaattttaatgctcctaggatgtccgattttttactaaataaattctacttttaaagataactagattatatgaaaaa

SEQ ID NO: 1869 - DNA, 3140 bp, Zea Mays
caaatcggcagcaaaccagccgatctgcacatgcccggaccgtccgcacgtgagcgcggaccgtccgggccaacagcagttgggcctatttttaatgagttacctagatatgtgcccgagcctccacatatgacacagaacccaaattacccagtcggacggtccgcatacaatgacggacggtccgcatatgaccacggacggtccgggtacatatccggacagcccgcgcatgagtcttttgaggaggattattacctgaatcctcgcccgtcccagcaacacttcccatcacattatgcaatgcaccagcccattaattcaggatccagagcccaggaaagctttccggccccacctaaaaggccggaaagaaacgatcaaacctatgagccatatagggcaaatgggaatgcaccacgtagctcaaaccaatggggggaacgacaacatactaatatgcaaccaaccccacctatgtttgaccagagagccggtggtcttgcaccggctgccattgatatagtgagggaagaaatagccggggcgttccgagataagctcggagtaagcatggtccctggggggcaatcatatcggaaaccttatgacagccgatttgatcaccacccgttcccacagggaactagaatacccgaattcgcaaaattttcgggtgatcaagggaaaaatacgcgcgaacatataggccagttcttagcacaattgggagaattggcagacatagaggcatttcgcgtacgtttattttcattatcgctaacaggaaccgcgtttgcatggtatgccactttacctcctaattccatttcatcatggggggatctagaacaaaaatttcatgatcattttttctccggtgattatgaattggatttggtagatttagtgtcattgcgacagacaaaagacgaatcggttaatgattacatccggagattccgcgatacaagaaaccgatgctttcaaattcatttagcagaaaaacagctagtaggattagcctttaatggtctacgatattatttaaaagagagattagaaggcatccaattttttacactagcacagttacaccagagggctttggcttgcgaaagccggagcaaagaaactgctaaaacaatgcgtcacaacgtacatatagttgaatgcgaccaaagtagctcagatgacgaatcaacagaagtatatgctgctgaaatggtttggccaaaacaggccaaatcttcggcttgttcctccttgcagccggttcaaaagaaacggcaagaggaggttaagtttacatttaatgttggtaaatgtgataaaatatttgatgagttacttaaaaatggcaatattaaaataaatcacactgttccatccgccgacgagctaaaacgtcgtgcgtactgcaagtggcataactcattttctcatgccactaatgattgtaatgtatttcggcgacagattcaatcggccattaacgaaggacgattgaaatttcaggaaatgcaggtggatacggagccctttccgatgaacatgattgacttcgagggcaagaaagtcctggttcggccaaatacagccgataaaggcaaaggcaaggaaacaatcatcggcaatgctaaaaaggccgatggggattgtaaaatttcttgcaggaaagtggtgtccgagaagactcccgatggaggggagaccctgaaggtgaccatcacagcctccagtactggggggcaagcgcagacagggagacagatgcaggagcccgtgctgcgtatcccggacggtccgacacgtaggcgcggacggtccgggaccccaccggacggtccggagagctccagcagacggtccggccatgctcaggactcgcagcgaccacgtaccttcaaaccacgacgaccagagataggtacgtggaaaacaaatacatttaaagcagctggtcggctgatcaagcctggcccgactttcgatcaattgttgtctaaatatgtgaaaaagaaggctggccccagtgaccggccaccgaagcgaccccgctcacccattcatgagcaacgtcaggtcaggccgattggaccacatcaccaatcggaagaaatgaaaggtcctattgtacaattgagacctaacatgccgacatggacccctccacctccatatccacctatgccatatccgtacacatatttacctccgccatatgtcccaaatcaaatgtggggcatgccaccatatccatttgggatgccacagtaccccgcctggggggcaccccaaacatctgttttcaacaggttgacgccaccagtgcaagaccgattgagcgctgctcaatctggtcaccaggcacaaacccaacaggattgccggactactcggccttcaaggccgaccaatccggcaggggggcatatgcctgcagcaactcaaaaaacaacaaaaggggacatcatcaaaataggcaccgcagatgttgtcatacagggagacaataaagggccgatgattctcggcgaatcggccaacgcaaccgaaaaggatacggctaccatcaaaacagccgatccaaaatactccatgcctcgatggtgcccagcgggattgacacgatcccaaaagagaaaattacagcgcctaagagcaaaggagagccaggagaaggaggcggaaaagacatttaatgacacacatccattatacccgccaccgcaaaagaaatggagaccgaaggccgttgagaaaaaacaaacggtcacagaaatagaaagtcaatctgcaccaagcacggaccgtccggcccctacgcacggaccgtccgccgttcaccaggaagtctctggacaacctgcaccaggcgcggaccgttcggccaccgcacgcggaccgtccgccgttcaccaggaagcctccaacgatacgacaacatcaatggaagaggacgacctgctgggagaagacctggtcgactacgaggcttctccagaacacacaggtatggatgtaaatattattacattttctgtcgattgtactattatcggcgacgatgaacctgttgttgcccagtttgattttggtcctaaagaagccgcctttactaaaccaaaagaatcggt

SEQ ID NO: 1870 - DNA, 3345 bp, Zea Mays
gaacaacacatataatgaccaagtgtatagagataaatgtcacaaatattattacatcgcggaagtgtcttataaaaataaatgataacaataaagcgaactaaataattattccctggcgccatcaagttgactgggagacgccaccaagattagctcatactcctcgttgtaggcctcctcctggaccacctgttcttctcctgtggcggggaggtttatatatcgcaagggtgatctcatgaaagatcatagctcaacaagttgtggggaataatgtgcatgaactcatcaaaggtgggagctcatgtgaagtgtaaggttgatcagcaaataatggttaaaactgagcattgcttttaataagttggtcaaattttattagaaatatataccaaaccagagtaataatggatcaaaattaataataaaccacaatgcgatgcaaatgaccagttaaagtgaattccataagttactcgtgtgagggtccgagccgctcatgaccgtgagcacgactaatatactagttttacactctacagaggttgcacatctttacccacaagtcatgttacccatctgccaaggggtcatgaatctcatacacctctaccaaggaagcgaggcagggtaacactacgaggcctttacaaagttctactagcttcagaaaacctgctacagttctagggagcgcatcataggaatccctcgtatgaaaagccatcgcagcaaaatcaacccgagaacctccctataccgaccactcctctacttctcttgcctcgggtaaggtagtcctccactagctttcctaattagttagccaagggcatcccataccacccttgtggtagcactgtttttccgggtggtcgctccatgttctaattaacataataatcttgtcatgaacagtaaataacaaattgataataaaagcatgatcatgaataatgtgtatcttagcacccaaaaccacataaagcaatagcatgtactacccaaaagttcagtggtaaacgaggtataaagattgccaaactggggtgaactattaggacccatcaaaattaacctatgtagatcataatgattaacaggaacattattgggtaaatagaactgatcaagggcacaacttgccttcaacgagctcctgctcagtattttccacctgcaatgtaaggatgtttaagaggtaaaaaatgggcatatttgtctgtctaccactactaatataaatagaacatagagcccttccgatttagtctggccctcaatccatagatatatatttccaagctccatcaggtctatttgtgccggtgccgagctgccatctcatctatgatgaagaatctcttgtcataccaactcgtttactccaaccacggctggcactcaaagaaatgcaattacaaaagaaatggtgattggtgcgttgcttagggggctttctgctttcgatggtacaacccaagtcgactacttaccataataactagtgctaggctctctcacgataacaacccacttcgttgcgccttttttcttgatgggtatgggtgatctttggggcgggttagggttccagatcaggcaaaagtaagaactaaaaacggatacttttgattgattgggttgctttgattgaatcgattgattcacccttggccagagaagaagataggaattccatagagtcttgagagtagaaagcagctaaactggaattcctagatggagaatctgcctcaatacaacgtgagctactatgcccaatggggacttcccctactctatcaaagaggttttccactagcacacgaccaacttttcagactgtatcaccgtttatcttcctccggccatgaaagggatttttgcttttggtaaaaagagtattccttggaagcagtattgtaactgctctattgcgatgacaaagaagagaggtattttggtgtcccgctctacttgactttggataaatatagaagggagaaggttgtgaaggtggccttgttattgacacatctggtcggtggaccgacctggcgagcgtaggcgggtcctggagtgcccgttaagggcgctagcgcataccccggggtgatcatcaccacctgcacctcacatctcggcacagtggaacgtgtaacccgcctgtacgtagactttgcctatttgctcaataaatccttgtgtagtaggagataggaggtcatatcttagctgcttagctcgatatataatattgtcatacatgaatttattaattataaatatggggtgtcccaatcgagtcattgctttcctatataggcttgggaatgttgcgccatacaatggtgttgtgactctaccaggattaccgcctgaacgagaggttgatttatgcatcaaaaccaaacaagcaacagatggagcaactagcgcgaaagccgttgcacattttggtttgctttatacgccatgccattgccactgccatagtagaaagaataagctgcttcttgtttaggacgggctatcttgactcttgagcttgagagggaaaggcttcccgcgtgggcggattagcaatccctagtcttccataacgcgtattggacttatgtttcctcctcctcgaacagaatgtcaaagccagtagtttgaactgccagtggagtgtcgtcgttttgaagttgttgactattgtccacctatcaaattagtgtagacagaagcattgtttgagccttgtcgagaatccgttttggcacttattgtctatagcaaagtgaaggaatagaatgatcatcctgctcctatttaaatagtatagaattccatgaaaagtgtagcaagccgattcaattgactaggtccatagtgaggaaatggtattccaaagagcaaaacaaagccagttggttatcggcagacagaaagcatttatatgtctctttgtaggctcaagcatctgatttcggtgattcgcaaatagcttgtcatagctagttcttacctgaatcgcagtaggttatttgctgctgacaaaggccgctaaggttccactcgagaggatttctattcccctcaccgctgcgcgccttgaagatcatataagtgagtgctcaattgttatactgcgatgggaagaagcggaagatgattcggaacagcaggaagccgctacctagaacggcgcatactcttgaccgctaaccctcagtcaaacgttgatagttgttctttccctactctacttttggatacataacctaatcaatcccttccttttggtttccctggactattgatctagagacgacacctttagaccaatccaat

SEQ ID NO: 1871 - DNA, 3348 bp, Zea Mays
cgcaagatgcaagccatgctccagaaggttgagtaagggctgctgtaaatcaaggcaacagtgcaacatgagcagcacaactggcgttgtccgcacggctccagacgtcagcggctgtgggcatacaagctgctgctcgtggtttccttgcacgacggagagtgcgggggatgcgccggcagatgctcaaggcagccttggtgacggttgacctcggcacacgggggcgcgacctcgccctatcggacagccatcaacagcggcaccgggctgctatctccaagtgcgagcatggtacgtgtctcgcggacgacaaagttcaactctacgacagcggtggtagggacgacacttccctcgtcatcggtaagggcacactatttagcgccaccacattccgctaccggccgccacgagggcgcctccgctggttattgttgcgacctactccaggtgcccgtccatgtgctcccctttcgtccagatggcgtccatgggatccaggtggctacacacgtgcaagtccaatgcgcggagggtgtctgccttatcttatgggataaaaaaattcagattcggaataataagataagtcgagatgtaaaaggcttgtcttctaggtgtctggttttgggtcaagtagactcggtcttagagtacccgtcatgctgcagctcgaggacgagctgcttgttcaggaggggtgtagtgtcagggcctaaggaggcccacagaggggctgcgacagcagcaaccatgggccctccaagggggattagataaggatagttagagataagattagttgagattatttaggagattagttgagattatctaggaaggttatcagttagtagtttgttgagagtttttaggagagtttttaggagatacgaatctctagctagataggggcggtcagccggcttatttatgtaatcaatggattagaaataaagcaggcaagaattagaagggagaaactctcctcttgcttggccgtggacagaggcccccggccgacgttcctgtccatcgatacccctctccaatccctcaccgatctagcgaccataacagaggaagaacaggaggagtcagagtagtttgttcttatggtgaccgaatatgtaggatcttttagtcatagtggagctatggttaacgggaatgccagggaaaaatgacactgctgaaattgctgcatcatggcagttagaagagagaagggtaggcctagtgtggtggtgagagttgtctccctgagtcattaggacacaggttcgaagcagcctctccgtatttgcaggagcaggcttgcctccttttatcccttccctagaccccacttatgtgggagcctcaagcactgagtctgccttttttttatgacaattagaagagagacgtgttcccgttgttcttccatagtaaaatatcatgaatctcatgtcacaaacatttattacttgataaggatgtattgattctaacaataatttgtaaagtgatttagttgtgcttccaaatgatctatgcaaacacaaactgaacttgcatcatatataccttttaggaatgtatgcgctcatgtgctactaaaaaatgatataacattgatgcatattgttattctttgccaaggcgtccaagattatcttctcattttcattttcagtttgttttcccggtgcaaatcaagtttaaggcatggatttagcacttggcggcttaacctcagttaagttaaatgaatgcaggcgccaaatatcaccgttttcctgcaatagagtaataaaccatgcagcgctcgcatgtgtagctggaggggccaatgatgatgtgatagtgcgtttatgaacctttgaggtcatcaacatctatgttcatgagaacattgaaccttgggacccaaggggtagtacagggctacaggcatagtaaaaccgaccacagatgtagcagcttttagttagatctggattatttgtgactcatgaatatgaaaaaattagccctttcattatccatccacttggaatagtatccaccctttctgcgttttaatatttgtaacttgttttttgaaggagcacctgaccacctctcgctagaagaatctatatagaaagaagcatgttacggttaattggtaatttttttcactctcgaatatgcaggagagctgtgtatcatcgcattaagaagaatttaaatatttacaataatctcacatcccacacaccagacaaacttcaggttacatactcggtggagacaaaagataaacccaaccaatgctagcttaacgtccttttagtggcagcaacctcaagttgcattaaacccctagctcctgctaaataccaatggtgtcttcctcagttatctaaggattggctgcatgcttatttgctcacaaattttcaaatgaattgtagcagaaaactgtggattactattacagatttgaatttattgagatctgccatgtgggcacattccttctaaggagccttgttcgggcacgtcataggcctacctagtggctaacagccacagtcaattagaggaaaatctgttcagccttgccttagttggttgattgggttaatttggaaggttggaggaatgatagaaaagaagagaggaattaacttgtatgaggattagacacaagcaggaattagacggaaacacttcctctcttgctcggccatgggcaagtccctcggccggctccggctccctctttctctctcccaaccctagctgccaccataacatctggtattagagatgttaggttccgatgaggatgacaagcaaccaaagaaggtgctgccgctgccaccggatcccattgccaaggtattggccaacctcacccaacagatggcatctctctgggcgtgtctagaggccctgaaatcctgaccgaggcaagaaggaattagaagcaaacaccttctctcatgttcaactgtggacaaagcccggccggtccccctctctcccaaccccatccgccaccataacatctgttatcatagacatcagctttcgatgaaggcgacaagcaaccaaaggtgctatcgccatcgtcgccggattccattgccaaagcattggacaacctcacctagtagatggcatctctctgggcacgcctagaggccatggatatctgaccgtcggtgaccaccaccaccatgccgctagtgttcccttgtggcttgctgggctatgggacgcgggacggcagtcgtctccatgccagattcaaagatgaaggattgtgtcaatgtagctgagtaagaagagtgcccactagttgtcggtgat

SEQ ID NO: 1872 - DNA, 3388 bp, Zea Mays
  misc_feature (3387)..(3388): n is a, c, g, or t
tagatctcttcaagctctacaattttcatataaactttatcttcatccgatttcatatgtaaaagttatgattttataactatattatgcagaaaaagaaaaaacgggtacccgaattccgggtacccgtatccaacccgggattttcgggtactgaccggctattagtgattatgtatcctacccgtatccgaggttcaatatccgggtaatacccgtatccgtcccgacaaacaaaatacccgtatccgtatccgaaattacgtcccgttttggtacccgtatccgatacccgttccgagtacccgtcccgttttcatccctaagaaagggcggtgagtagcgcggcgatgacgctgtagttctgcacgaacttgcagtagtagcctgccaagccgaggaaaccgcgaacagcccgcgcggtccgaggacgtggccagtcccgcacgacctgcaccttggccgggtccatggccactccggctgcggagacaacgtggccgaggtaggcgaccgccggagccgcgaacgcacacttagtgcgcttgaggaagagctggtgctgctggagctcgctgaataccgcacgaaggtgtcgcaggtggtctgcccatgacttgctgtagatcaaaatgtcgtcgaaaaataccagcatgaaacgacggagaaacggccgcaggacgtcattcattagggcctggaacgtggccgacgcattacacaacccgaacgccatgacgaagaactcgtagaggccgtcatgcgttcggaatgcggtcttgtggatgtcagcctgccgcatgcggacctggtggtagccggagcggaggtcgagcttggtggagaagcatgccccattcagctcgtccaacaactcatcgaccaccgggatcggaaaggcgtccttgaccgttagcgcgttgagtgcccggtaatggacgcagaagcgccacgacccatccggtttcttaacgaggaggaccggcgatgagaacgcggagttgctgcgacggacgattccctgctagatcatggcggtgcactgcctctctagctcgtatttgtgcgccgctgggtaacgatagggatgaacgaccaccggcagcgcgcccagcttgaggacgatgttgtggtcgcgagcgcgctgcggtggaaggcccgacggctcggcgaaggtgcccgcgaatgcagacaggagctcctccaggaggcttgcaggcgacgagcagacgacgagtagaggggcctggcgcacccacttccgtccagcagaccacgcggtcgcggcgcgtgaacgccatggtgcgggcagtgaagtcccacacgattggtcccagggtgaccatccactgggtacccagaactagatcgtatcccgccagtggcatgatgtagaggtcaacgcggaactcctccccggcgatggagatgggggcctgacgaagcacgccggggcaagaaatctgctcgtcattggtgaccgtggcggtgaggcgtgggtcggcgtggacggcgagacccgtgcggcgcgcagcatcctcggcgcgatgaaattgtgagttgagtcggtgtcgaggagggcgatgaaagcagcagcgcccacgatgacgcggacctgcattgtgttgcagatgggcataccggctaccgcacggagggagaacaccggtgcgtcctgattggtcgtggccgcgtctccgactgcaggcacgtcgtcagcgatctccatgccgccgatgtagaagatgtgctgacacactcggttgtggccccgtgagtacggctcgttgccgttgtagcataggccaaggcggcggcactccgcctgttcgtcgggagtgaggcatttcgccggtgccagtgccccgcgtacggggggaacgggcagggccagcagctattgccccagcggcgcagggagcgcgggcagcgctggggccgccaggagcgccggggccggtctggggcccggggcagttggtggagcgcgcggtccgacccgtgccgacgcgtgggccatcttgtcgagttccatcagctcgacctggcgcgccaaactcattgttgtcgcgagcgttgccgggttgtggatgcgcacggcgtggcttagtggcggcaagagcccgcctgtgaagagttggacgcgctgcgcctcgtctaaacgacccacgcggggcagcagggtctggaagcgattgtcgtattcttccacagtcccggtgcgccggcattccgtcaattcgaacaagggtgctgctcgcaggggtgggccaaacctcagattgaggagctccctaaagcgcccccatggaggcgtgccctcgtcttcttggagctggatgtaccacagctatgcgacatcttccatgttgtacgacgccatccacacgcgttcctccgccatggtacgctgctgctggaaatacgactcacacttgttgatgaagagcatggcccggtcttgccgtcgtagcgggggaagtcgatcttgtggaacttgggcgggcgatcgaaatcacgatggccctcagtgcggtcgccgccatttgctgaggacgaggcggtcctctccttcatgccctccatgtctaccttcaaggccatcatctcggcggacatgtccaggagctttttcataacatccgcgatagtgggttggtctcccatggccgtcgaggctgtggaagagggcggtgaggatggggtggtggtgttgctggttgacacagatgacaaggatcgccgaactcgtgataccaagttgtcaaggacctccggtccgagggtaactggaccgcggctacagagatcgtagtcgcgttccgtggtcgccggcaaggttattcccccacgccgtcgcccgggttgatgcctgggttattccccctaggcgccgacttgagagagaggagagattagattggtagtaatttctgcttactttcctcatccaaccgaatacaatatataggcccaaatctgaaccgcaaggagctaatcactcctaaattctaggtaaccaacaaggtaactaatctggagctaatcactcctaaattctaggtaaccaaggcaactaatcccaactttctacttatccattgccttgctgttccagctcgcgcgcggtgcgttccgtggcgcggcaaacatcgcgcacacgcctgcagcgcgtatatgtgcgaccgcacatgacataaaccctagactaggagattacattaatcccctcgactattataccttaacaacaatgagctaggtctaccaagtgttgagatgaacacggtcaacatcaacatagccttttagtcccaagcaagttggggtaggctagagttgaaacccaacaagatatcgccaaaaggggaaagagaaagaaagggnn

SEQ ID NO: 1873 - DNA, 3427 bp, Zea Mays
cccgcccagccgcccaggtttagggttagcgctatctggtcgcactccaggccgccgcttctccccgtgcagtctcctccctcccccggccgtgctccaggccaccgccttctcccccatgcagccgcctcctcccgtgcaacctcctccctcccccttgctcagccgctcagctccgcctgtccgccccccgccagccccgcctcctttggcttgctattgctcgcttgttgtccggccgccctgtcccgcactcccgctgtccgcccgtcggcctgtcccactgtccgcttgctgttgctcgcttgttgttgccctgctgtcccgcactcccactgccccgttgttcctcgcttgctgttgcttcagcagttgctcaaacaaacagctttgcgtctgttcctgttcctgttgctcgcttgctgaaggtaatgtggttgtggacatgtcattttgcacaatattattatgtgaacttatgttggttgtttggtatttgacttgatataattgcatgaaattatgatatattgaaatttccctatgttgtttaaaactacgtttaaactttgtttaaaccgtttaaaagttaaaactcacccatgagtgtttcaacgtttcgtcgttttaataaccttgggtgcgacggcgttcactggcggcgagctgtcattcgaacaaaacaaaagcggtagagttagaaggaaaagttcagtgagcatcacttccacctggtgattagggaacacgaacgcaaggaacggggaacaccttgaggtgtgatgaccacggtggggtggagaagatggctgttgcagtcaccagacacagacacaggaagaacactacggtgcactggagcagatcactaaggcgacgaggagggagatacacaaacttgcagacacgagtaccaccatacccacaatgaacccaggccagaactcaagggcagagaggaacttcatagaataaagtctttagggtagctaaacacaagggcgatgaatctcacccaagggtgtgcacaaaaggataggcaggagggaatcaccttgggataaccatgaggtgctgatatttaccgtatggaactcctaggcccacttacatcttatctcccaccacatcagaagaaactagagcccgtagtggcatcaattcttttttcagatcttcattcaaccaatctctgaagtctgaacccttctctgattgactgcaccttcctctgttcagtccctttttttcacacattctagacaaggacaggccgaccacatttaaaagagcttgctcataacccaaagctttaccaacttgccacagcaacccagggttaaaaacatactgataaaaagttataatgacccaaagttctaccgaacttactgagttctcttgtttcagttaactgaaaccatttcaccgacagtgcagacttgggacacctcacactaacttatgtgcaataccaagccccactcacctcaaggaacttgttcacctagtatcggtctttctctttgctataatactccaaggttagaaacacacacatcacaagctgcagtgccctgaagtagagcacaacaccctgatttcagtttcatttaactgaaactgagcctatatcacacagactgacaggtcatgtttgaggacacattactcacatttctttgttgtaccaggcccaacattccataaggactttgttctacttcctatggtctttgactttactataagatcctcaatccaaaaccttatggactgttcacaaaagggctccaaacttggcaccatacaacaatttcagttttcagaaatgaaccaaattcagttaaagcattgtctgtctgtccaactttgagcaagctttacacctagttccatgtaagtctagggtcaaatagcttaaccaagtttgcactactacaatagctctacaatgttgctataatgaccaataactaaagactcatggtttaaaagttacagtatttcaaagttgaaccaacttcactgaaattcagttttagcttctgaactaaactcggtcaccaacatctgacagttcaactttggacatttgtttctccaatttttgcataggatcaagccaagcccacttaagtaaagttgttcatcatcttatggtcttcgcttcctccatagacacccgaacctaaaaccttatagaatagccacaaaagaaccccaaaacagcacacacaatactaaattcagtttcagtactgttcacaatctgaaactctagaaacctgtgagcaccactttgaaccactctttttcctaggttccaaatgcttctagggtaaagtggcttaagtaacctagtacccctattgtagctcttcaactttgttacggtggccataatccataactctatgaatagagcagtagagagctcaaaagttggaccaaaacactaaacttcagttcttgaattggcactaagtctgaaatccagaaaatctgttagctctactttggaccagtttttctctaagttccaaatagctttagggccatttgacttaaacaaaattacactcctaatatagatctataactttgttataatgaccaccttccaaatgtttatagatcagaagttacataacaccaaagttgactagttgctattatttttcaggaattccaatctgaacccaaactgaacttttacaaattactccaaatttctctacacaacttggaaatctctaaatatgaaagttattcactttcccaagctctacaactttggtatatggacttttagaagatccttaatgaatttaggattccactattgggactaatttagggcttcacatgttcttcactttcttcaagtgttataccaatttgatccttcctccaaaaagcaaaggtattctttgacctaagatctaactttggtttatagagctcgtgtccaaagtgtcattagttgagcagttgtttgctttggttatacaatatttcactttgtctcgacttaggttttaaagttgatccaccacctcaagtgtttcttccacttgactaacacttcaaagtaaagttaatctaggttctaaaacttgtctttagtacttaagactccaagccatcttgtcactttcttaagagatgaccatcacctacttagttcaagcaaaactcttaccctaagtcctatgctttagctcaaaaccatcacactttagaaaacatttaccctagtaaatgcactctaagtgtaagcaagttaatacaaatgtttatgatgacatatcagagttttagttaatgtaacaccagtggtgttacatgtgataagataggtgttggagagagactattactcctctgttccacaaaaagtcgtattagactttcaacaaattcg

SEQ ID NO: 1874 - DNA, 3443 bp, Zea Mays
cgtccctgccacctgttggagctggctgacatgtccagagcttctgctatataaatggcaggattggcagcccctgccctctcccttaccctccacgctattgcctgctccagctggccttcttcctcccccacccgatatagccacccatggcacctcctctcttccatggccgcctccctcaagctccagccgagctccctcctccgtgcggcaagacaacaggctaacgctccctgttcctcccttcccacggcgcccagcccaagctcctcttccccaccatggctgagctcaccggatctcctcccctcggcgcagtaggtcgagcagctcctcaactcccccctctgctcgagcaagccgtgtatggagcccccaacctgcagcaagccggagcacgcagcagcagtactactcacgtctagttgtccagggaagaagaagcccctttatctctatgatatgtgggctcaaggccatgggtaagaatgctcaaagtttcagatctttgccctttctttaaaaaatcatatcttgagtttgagagctcttaaaattgtgaaacctatttcattggctttcttataaattatctacatattgaatctataagttggcatgttttagtggaaaatttctgctatagaaattcgtatttaaaactggtttagaaaataaatgaacttgcttctctccatagttttaatttaaaaaatccaaaaatgatgagacttgttttgtttgttagatgatgtcatactctagctaagaaaaatataaaacccatatgttgtttactgttttcttgttgtgttaattaaatcatgttaaataggaaaaatattattgatttgcttgttatttttggatatgcagctctagtgctccaaatagattgcaatttttacagtagaccccctgtgtgattcttggttactggtacaaagtttaagaattatggtgcacgtatcactgagttagtgatttaacttgcttgatgcacattaagtagttttaaatgatttaaatataatatataaatgtaaaaatagaaaatggtattccactgtccttgcatgatattatagtagcctaagaaaatttgatatggtcatgcatccatagaaaataattagttttagatttaacttgctctcacatgctttattgcattaacaatttgttatttttgtaataaatacaatataaaacctgagcatgtgaaatttatacattagtcataatttattattacctatgcctcaccaaacttccagccccaaatttgatagtttcatacggtgctaaaataacaccaattttataattataagaatagttagtgaaaaattagaagtaaacaaaagcatgcacgtttcttgaaaatcttaagtgtctaaatataaatagaaacttgataactaagtcataataatttaaacttgagaaattgctggtagtatctctcgatgattttgtttggtgatttagttaagtgctcatgtgctagcaaactgaaattcatgcgtgtacagttttggttgtgcgtgtaatctagtaaaataaagtatgttttctgtagatatgtgctatataaatgttacagttcacttgtgtatctagctcttcctaaaacttcatgatctaagaattgatggtttagaagttatgcttttcaaaagttcagtgactgaatctgtccaatttctgtacagatttcagggactggaatggttgcttaagttaatgttaaaatcagttcttggtggtcataagaaagttgtagataacttatttatattggttgtgttaaaatttcataaccataggcctgatagtttcagagttatgaattttacaaaatgattgttgtgttctgaccactgtccggatagatttcgaaaactgtactgtttaggttaattaaaattggaaccacttcttggtgattgtaaaagttatgtagtacttttactaagctttacaaaaagtcttgaatcatcatttttggtggtataaaactcaagttatagatgttttaagtatgaagactgaatctgtccaattctggaccgcaaggccttcatagtgtcttttacccttaatacatattaaatcagcccgagttgtttataaatgatttgtagacgatttcattagctttctagaaagctaggaccacttgctttggatgcctaaatctctagttaagaatttttgaagtcgcaagtctgaatctgttcaaatctagacatagctgtcattttagcactatttaaacttgttaagtgtctaatcaccttgagatgacaataccaaagttgtagagtgtttcttaagctttccaaaaagtatctgttcactatttttggatagataccttgtgagttatgactaaaacaagtaactgttgtgctgctgtcctaatcttgttgattgtggtggattgctctactctcttgtctcgcttgagtaggattgatagtgttatctcatgatccccatattagtatattatatgattggatatatatataagtaactagtgcagtagtaaattaagttattgaagtctagtaagtgaattagcttcgatcaacgttaatactgtgaagtagttaatacttgcgtagctaatctaatattactaaataatcaatcacattaaactagtatgataagcagtacgattaggatatcacttcatgtgtgttttcttgggtgtgtgcttgcattaggatattgtgaatattggtagaacccgattaagtgagtatccccttttaactaatgttgggggtcttcgtcttctgaaggtactcaaaatcatgattaacaatgtttcccaagtgtaatatatttacaggaaccttcggactcgggatgaagttgttcacaatatgaaaagcatggtcgggatgaaggtcgaaccagctccggagatacgcgcaaggaagcttcggctcagtagcagaaaagaaccgacttaaagaggaaaaggctatctagtcttcgatagattgtcctaatgtcaatagtaaacatgaagggcatgaatgtaattttacataggctgcgccctgtgcctataaataggtgaaccattaacatttgtgttgccttgttcttaactcatagcatttgagaacaagtccccaacaactaagtttgtctatatagaagccatagcaaattgaagtgtacttaactagtataataataaaggaactaatgaaagattagagcgaatgtgataaatgcttgcacttgcgatgttgtggttgcaatggataataataggtagtaatcttcgtccttccaatgcttgacacagggcgaaggatggaggtctccttcgaagggtattcagtgaaaaacatcccaagaggagacaacgagcaggcagatttactagctaaatcagcggcacaggagctccc

SEQ ID NO: 1875 - DNA, 3466 bp, Zea Mays
cccacatcaacccgccgcgccccccttcacaataggagccagaacaaaaaaaaaaccactactcctctctctccctcacacacagagtgagagagagagagacgcacaagaaatcagtaggtcaatctctcctctcacctttacatcgtctttgtatttacaaagttgttgatgacttgatgtagaggctgtacctgctggtttgctacccctagctagctatatgtcgtccaatcctagttgagctctcgatctggatggccctctgattagtcgtcctttgcttggtggtgcctgctgtgtatatcgccaccccggccgcttgcttccgctagtagctagtcccttcttctcttctcgatcagtttgtttaattggcagagcgtatgtatcacacccaaggcgaaggaatgtcgtcggcggcccagatcgcgccggtgccggagcatgtatgctacgtgcactgcaacttctgcaacacaattctcgcggtaatatatatataaccccgatctgatctctagctagctagcctctcgatctgtttgcccccctcagctcgttttctcccccggctctctcgatcggttttttccctggttgccggcctctgaactgaagcgcagctatatatatacagcagaaagatgcatgaaaaatagttgattggctgcgtgcgcctgcatcgtcgtcgtatagtagttagttttaatttgtacgaattggctgttccgctttctggatttcatcagcttctggatcatttcatcagagcttttggtctaaattgaaaattggggatggttcttgcatcaaattaagtcttgggaacaagatgactaattagctagcagtcttagacgaagctagtcagcaagttctcaaagcattctcgccttctgcaggccctcctgtactttttttctgggaaattatcgtcatcatcgttgatgagtggtggtctttatattaattagatctcaagtatatatagctttgtttgcctgcaggtgtatatgtgtgatatttgtacatatataaagcttcttcagcaccgcgctagctagcttctttcgcataaccagagtccgatccggccggtggttaacttatttcagctaatatttgaaacacaatacatgtatacgacatagggcaatagatttactcgttaccttcttgatcgaactgcaacagagagtgcatgcaataataaccatttttaagacgataaaaaaatttagtgtgtaccgcgtggatctttagcttttatgcttttctatataatatgtagaccatatctcacataaatcgaggtcgtgtcctaataaatatactaagagatatattgactaaaacaaaggccttttttattgactaataataataacatatatactccctccgtttctttttagttgtcgatgaatagtttaattttgcactatccagcgacaagtaaaacgaaacagagggagtattaattattgcccaatatctgtactacgtcgtagcattgctactttttattcatatattggaacaaaaaaaattccgttacgtaaggtttttattcattggaaccaaaaaaatattgttacgtaagtttgagtacggtttgctggaaagagttttaaaatgataaaaaatgttgatgtggaataattaataaacgaagagcgaacatatcattacaaaatatgtatatatagtgtactgccgatgacctggccgcccaaaaaatccaaatcattacttcatgatttttcttttacttgttttgcttttttcatggccctgaggtttttttacattttcttttttggatttcctagtttaccaagtttctgctcggtagattatatatactccatcggtctcaaataagtattcgttttaactcttatttttatgtctatatatttaaataaatgatgatgaatctagacacatatacaaaacacatatattaattattgtatgaacctattaaaaagctaaaacagattttatcatattccacaaaccttagtgacaatgaatacaaggaaaataaaatactccgctatgctaaaacattattcacgtacgtgttctcaaaagaactaattaaggaggtgttcttgcaaattatacagaatttatgcttagtttttcttcaattaatttcctttttctatcgttgttctcttgtgcattaaattagtgttcatagttctttatccacatggtcaacctctcttcatggaatcatggatggggcggtgatagataacccatcatcatcgccatttcagtgtaaacattgcctataggtttgcagttgttaaagaaaacaacatattacatctagcttattcattattcatcatgaagttcttcctttctagctagcttattcattctaacttctcgcgccgtagttacagggaatccatacatcaaagggtacagattccttcttgtactatttatgtttgcgtctagcatgcatactagtagagaaattatgggcttcagtccttgttgggatctggattttctcaaccgggaataattagaacaagtctctcgtatgtgcgattcgtaggactcaaacccaaacctcatgtattgtctcgcgcttagctttattttaactatatggataatatgtttttcttttaaactgacccagaaaagacccttgagtctcgtttgataatgttggactaaagatcctccaacgtccagctcttattagtcctaaaaaagtcaaaccaggactgatatgcttactggagacgtgttctttgtcgagtgcctcagacactcgacaaacgttttaccgagtgccgcactctgcaaagagatctagtaaaaaaatcatcggcgaaagattctttgtcgagtgctttctatcgggcactcggtaaagactttgccgagtgctgaatacatactcggcaaagaaaaggtgtcatgacaatatgtgccatgtatggagtatttgtcgagtatctaggtgtgtcactcggcaaagcaaggtttgaaatggcccacgcaacggatttattgtcgagtgctatggcctgccgcactcggcaaaaggtggcgactttgctgagtgccttggcggcacgggataaagcaagtttctaggtgccaaggcatattcatttttccatatttcatgttattgagtatcatttttccatactcgataagtgtgcaagaaaaattgatatggcctgccgcactcggcaaaggtggtgactttgttgagtgccttggctctggcactcgataaagcaagtttctaggtgtcaaggcatatccatttttccatattcatgttattgagtatcatttttcattcattttttctattattcgaatgacttgtagttcagatttgaattattcgaatacatttaatttaataaaaaaaattactagatatatcaaacacttatagaaatgtgct

SEQ ID NO: 1876 - DNA, 3553 bp, Zea Mays
atttaaggataaatctaaatgcatctcaaatatgtgctagaatcaagtctcaagcatatgatgactcatagtacataaatcaatatcacatttctattactttaatacaagttatgtataaaatagctaaataaatacgtcatatgacgacagcgatcttctgcaaccatagttgactaggagacgatggcctagcctctccgaactcatcgcaacattcttcaagctcctctggcggtacctgttcttgacctggtgtgattatagcaagggtgagctcccatcggtcatcgctcagcaagtgtcgggaatagtgtgtatgagctcacttatggttggggctcatgtgaagtgtaagtcttaccaagaaaaatggttaagacagagcattgcttttaattaagttggtcaaaattttattagcaattaataagtgtaagtaaataccaacccaattaagtacttgatcaatataaaagtaccatatagaaatcccacgatgcaatgcatgacatgttaaattttaattccataaattactcgtgtgagagacctaagtcactcttgaccgtaagcacgactgatataaagttttacactctgcagaggttgcacatctttacccacaaatcgtgatatccatctaccacgaggtcatgaatcacatacacctttaccgaggaggcgaggtagtagcactatgaggcctttctaaagttccactagtttgagacaacctgctatggttttaggcaaaagggagtataggaatccctcgtccgaaaagctatcacagatagttcaacccaagaaccttcatatactctgcagtgattcactcctcgcttgcccctttcgggtaaggtaatatctccctggctttcctaattaattggccaagggtgtctcgttccattcttgtggtagcactgttttctcaggttaagctccatatttcaattaacaaaatgatcttatcatgaacaataaaaaatccagtaacaataataataaagcactgtcataattcaaatatagcattaatacctaaaccaggtagagcaatagcaatactacccaatagtttatttgtatgcaaggtgtagggtaaacaaaactagctaacctatttggtcctgttggtaccctaaatcaggggtaccctctcctacagcgtgaaggcatcgcacccatgcgacgtctcctagccgcgcggaggaccgcgcctgaccccaccagatgggcgggccaaagggcgccacgtggcaaggaaaggcaccacgccccagtaaggccggacccccacagagggtcaccggacccctatatacatacaggtccggagcccccgggtaggtccgaaccccggtagggttccggaacgagaaggaccttggtacgtgcaggggtccggtgctgacatgtgtgcgggccttgctctccactttccgcacaggcggagacctgctgcttgtggcccatgacataagctgtcgggccaaacctgacgaaaagtcgtgcagcccctgcatttattgaggaaaagacgcgccgcctgccactgcgctgacgggcgacgtgccccctcagcatttaatgcgtcccgtcccatccgctggcaggcgacgtcaaggtcatccagcagacagcgcgcctgctgggtctgctggtgaacagtatgcctgtgctgagcggcgtgctatactcatcttctcttccgcaagaagcctcctcggtacgccagggatacgcagatctcgggcagagaagattgtctcgacaacagatattagaggatccaagcactatattctttatgtccctgggcccacatgtcggggcccagtccctttgtgcatgccccccttcagctataaaaggggaggcatgcgatgttacacacacacacgcaatctcagactcgctagctcatacaagctctcaagcaatacatctcacagtggagtagggtattacgctccggcggcccgaaccactctaaacccttgtgtgtccttgtgtattgccccttctctccaacaatcaagcgaaacgcctaagcccctcctcatctcaggacttagggcgggtgcactccgccacccggccggagatctactctccgacaggtcccattagcttaacctaacagtgccactgtgattaagagaataatgaacattattaggtcaaagaatgtgatcaagtacacaacttgccttttacttgcaataaccagttgtccagatgcttccccaaaagttgggcttaagattcttcgtgacctcgcttctattcgtagcaatacatgcaaataggcaaataatggatacaataacatgaccccaaaacatgaaaacaaactgcgcgataatattctatgtgtcgttatgaaaccgtaggttcgaaaactactaaaatcacagttaaaatgaattagttatgaattttctaagttctttatacattttatatttatttttatactaaaaatgattatcataggttttccccataaactcctaatctatttaatcattttaataggggaatggacgacgggtatgaaaatcaagaagtacagggtctaactcgaaagaaacataactcttttgtaacatttttactatatgggtgtgttgctggttgttttcctagaaatccaaggtctcttacgcaaatcttatacggcgaaggtgtatcttcccatgtggaatgctggaccttcagtctacggattagattagattataatcacattgaatcggtatgcaatcttgatcatcggacctccgatcaacgaccgaggacccgcattatctccacaccgtttgatcacaaatcttcgtttcttgattaactcatgaagggatacacgtaggttttaatcacgaccgcatatccaccgatcaacgaccaacctccctcctcctacgcccccattgcctcagaaagttgcacgttcattaccacgacagagggctcgttggtggcacacgatctcacgattacttgatccgaatcaaacaccaatacgctctaaactacaagaagtgcaaggagaagttataagagcagacctttctggcgggtgatgtcgagaccgagccgaccatgatgatctgtggcttggtagcgagctgaaggggcggatctagcccaaaatccgagtggggcccaactattgaggggggcctaaatggaagcttactagcaaatagtatttcataactataataattaagatagaaagttaactgtaatcagaaatttgagtgggggcctgtgcccccactcaccataacgtcggtccgccactggcgagctcctcgctccgacgagcaattcaccgagctcctgtgatattttcgcccataaaggccacggtcatgtgaggggatctctggtggagccctaggatcaccatccgaggttgcggcatggccgaggatcacggttgatggcggcgactatctctcctctctctctctttgcctcttgcggcggcgactccctatattatgcgtggtgctggaggttctcaattgcgttt

SEQ ID NO: 1877 - DNA, 3714 bp, Zea Mays
caaaataccactctcttctttaatctggtttccattgggtctccttaccctaggtggtctgaccatcatcctttaagttggtttattgcactgattgccgtaagaacaacatttgtttataagataggcctctagcttagttggttagattgtctgattagcactcctcaggtcttgggttcgacaaccgtgggagcgaattttaggccggggttaaaaaaatctcctcatatgtcccacgccaaagacaggtgtaaggtccggacttggtcgcggtcgttctcacatggactacagtaccactgtgtatgggtgagacacgagttcagagtttttctcgacctgcgtgagaaggtcttctttttaattgtaatgccgtgagggcggtcttacccacgcaggtcagttttttaagataggcctaaattacggtaaaccccacttgaaggcctctacaagcttttatggactatgggctacacaatacacacaattacacaaagggtagcagcagcgctatgtgaagggcttttagggaagcatacatttttttagtttgagttgttacctacggataaagaataagctagatttaaggttgccacctggtctacaaaggcatcatattgttataggatttgcttcctctgatcctagatataagtccatctggacttgactgcttgagcacagcacatgaatcattgctagggttaagatgggtggcaagtgcattacattcatcagcaagcagttaagtagggacctggaagaatgaatcaaaaaggtgcattgaagttatcataaacttatatgtggtgtatatgtgtaataccatgtccactcccagaccagcggtacttactcctgtcagccctctagtatcatagatcatccctacagaccaacacaagtcttttgtgcgcactttgtcctcactcatgtgcacccgagaaaacttcccgtcggtcaccatctcagacttgttgtgaggttcttttgagatatgcttccaaaaaaggtgcactttgtttgtataagtattctatcaatcctattaaatattaggctaggatatcataattcatactccttaggagaccgacgtcctcgtcggtgaaccccaagacagaaatggatcaaaggaggggctactaagccagccaatcgtgacgctagtggtatgaagacagatgactggtaccttgtggtgggcaacctgtccaattagctattgttgcctgccgatctagaacctgggcatgggtgtctgttgaccatagtcgtgccatggagtagatggagggcaaccaccagtcagacaactacgtgtcaatgactaacggatagcgcagatgccggacatcagataactatggttaggacgcatactaggacgaggccattggcatattgctcgtgtgttggataaggacatttaatcttttgttgtctttacggatgaaactaaataactagtcactaacaactgagtcgtcaacatggtattttatgtgacatccccgtaaaaacaactaaaaaatagattatcatgttagatgcggacatgactgatgtgtggtggcttacagagtgggacatttgagttagtctagagatctactactacctttaacacacggtggccgggcggggctgcagccccgacagccccctacgaatccgcccctgcgtcacatgggccatatggccgaatccctagcccacaaaccggtgaaaccgcgaggctcggctctataacaccccgtccactcccggaccgatgatacttactcttggtagcctatatagtcttttgtgtttactttgtcctcactcatgttcacccgggaaaacttctcgatcggtcacccatcccaaaattgctctaatccaagcacactgcacacttaacctatatgatctttcgagatatgattccgaaaaagaaaatgtaccttactgttatgagtattctatcaaattctattaagccttggactaagatatcacacaatccacacgggccaggatatcacaatatgggagaaggttcaatcgacttatttttgtacgtcaacaacaataagctccataaattggactgggactgaaatgtcaacataagaggctcgctgaattagcacctaatttattcaacttgatctctagtagaagtgtcaagagaaggacggtggctcaggccctaaataattagggttgggtggttgatgtaagactgtgtccaacagatcatgtatatggtcgtgcaaaacactattttgcattgtagatagcaatgtttacagagtgaagtttgaaataggaggtgtgatagagaatgatataggagagctgctagagatagcctaagtgggggtccttacagtgcaattattggctgagtaccatctatagatgcccaagtgggccgatactaagcatgacacgacccgtagtgcttcggcacggcacgagcacgattcatatagtgccagtgccggcacgacacgagtctagtgccgtgcttcggccgtcaccccgacacgatgggctggctagtggtcagcacgattaggcatggcttagaccaaccagtggtctatagatgtgattgtgaattgtgatttgttatgattttaaacataataaattcactttataatggtataaatcttcaagttttaaaattatatatatagatataatcttaaagatctatattttctgagctcttaaagtgaaatagtgctttggctggcacgagcactattagactgtctccagcaacgtcatctatatccatcctctatatccgtactttacagtctactctaaaaaattacatcctctatatctccttcctctccaacaacatcctctaaatcacatcctctatacacataaatacctatattagagacatttttaatttttgtacatacgtatttgtcatactctcaaatgtattgtacatattttagtcttggtaaaccggttgtttaaagtatttaaatggatagagaaccgtttagagaaattctatatatagaggatccaacagcgtcctctaaatttagaggaccgtttagaggacgttgctggatggagtagaggacgacctcatcctctaaatttagggtacaagaccctttagaggtccttgttggagttagtcttaggtgttagtgtcgtatagtaccggcacgacacgattaggcactatagtgtagtgcctaggccgatggttagacactagtgacggcacgacacgattaataatagtgcttaatagtgtcatgtctaatagtgacagtgtcgtgccgtacggcccgtttggccatttatagcaccatcaaattagggacttagggtatctctagcaacctccctatctcactccctatatcactctctatttcaaacttcactctttaaacaatgcaatctacaatgtaaaacagtgttttggacgtccatatccatgctcgctggagacagccttagtagatgtcccagatcaacaccgatggaaactgtcctcttctggttcctacagcagcaagttggcctaccaagttttttttcttgcggactatcaaattttcctcatggaaataatttggaaaggttgggctccacttaagtgctgattattcgtttggttgcccatcaataatcagtgctcgacggctgatcatcttgccaaacctg

SEQ ID NO: 1878 - DNA, 4057 bp, Zea Mays
cttcgctccgataccagctgtcacggaacctcccaaggtattaggcccacatacagttgtccttgtcctaaggacttcggacaatcctgtagatgagcataatcactcgacaagttcggtcctctgtatcttccttacatcacccaagagtgttttacccatcacgcatatattacatcacatcggagaaacgaatgagcagaagcagattacaatacttaatttacattcataaaatatatagagagagtattattacaatactgggtgttaagagtgcatacagtattattacaaaccagggaggcaaaacaccctcccgcacaaaagtttagtgatttcaaactgggaggcaaacatcctctcgcctacgggatcacggattcagctcctcttttggtaccacctttgaacagaaatagcaaaactccgatgtttcctcacctacaacaacatgggttcgaaaaccctgagtacggagtgtactttcacaagtcttacccgacaaaggaaaaagactctcaaggatatgctggcttgagggagtcagggtaaggccattcaagaatcaaagactctgtttgcagaaatgcttactgacagtggatccttaaaattctagttttattatcaggttaagtcattacttgcatctagagttctttctaccctagtcaagcacttggtctacactagccgtcttttatcaccctttaagttcactggaatgctacgtgtaagtcagtgaccaagtcttcatgtccgagaagtaacggcgatctgaatcgattaatacctagctggggatctccatccacatgacatatgtagcacttaacccttgcatatgtcaactcgccaccgggtttctcaagatcagaccgggttcacgccaaccgagagcacagatacaccactgtccagcctcttgccacggagggtacacgctactcttgccatctctccactcccattgcgtgttggcctttctggtattggtctgtctgaggcaaaccttacccatgacgaggcatatggccaattaaaaggtcctcgatcatcaagcctacatcagtacggtccttaatcgactcagacagagacactacactgagacatccttctcgtgcaagtcaccctcccgatctcgcctttatcatttacaatcccaaagtttggtacctaaaagaggtacatcttttccgatgttgcgcccatcacggccatgatggattcaccatcatgttttatttttgaaaacatcccattccatctgaagcatcatcttttgtttaaaacaaaacattttgttttctagagcaagactaagcatcagaatttttttaagtaaaacaggtatcaagcaatgataatcaatttcaaggtaggaaatgcagcaattgtgtagcactcaactcctatcacctaatgcatcgattcaagtgataaagaatttaaaacaacaaggaaaaggataaatgcaccggagcttgccttgtgtcgtaggggactcgagatctgttccacaaatgtcaaagtagaaattgtccccgacaggtggaatttcagtcggtggtgcaacttcctcttcagctactacttcttcttcattttcgaaacataacaataaacatacataaatggccatgtgatgctatgaatatgcagttatgatagaatacattaagttatatattgaatataactttccttcatggtactcctaagtcactagggtttcctgggttagtatcctattagggttagacaagttctaccttaggaagctatggttttggggttttgggatcaaacaatgtccaaaacataccaaactttacccaagggctttgattattatatcaagcttacccagaaagttttattatttttggagctagtaatcaatttctaaaattctaaaagactaggtttaagcacctttaattgctaaataatttatgattgagactaaaaatctaggacctatttttattaaatactagaggaatttaggagtatagtaaaattggtcccatatttttatcgtttttctagaattttcaataaatttcttaagcctaggagaaaaagaaaaaggaaggaatgaatagtaacaggctcaaaccagcccgagccggcccactaacggggggaaatgtgcccgcgcacgcccacgctggcggctttgcacagaggaccctggttgttcaaataactagtaaagaatcccaagccactattcactgtctctctgacattctcacttaagcccctgcacttctgtttcttcgcagacccaggtccccaacgccgaacggtggtgagcacgccctccggtgagcttgtactgtccgtgatacacaacgactgatgccctaactcggtcgacacttatttctacccctggcgactgtaatccggccatcaattgcacaattccggcccggagtctttctgcccacgacgacggcgaaacccgaggggaaatcgaggtgttattggtgatttagggtggtctagctcaatcaaacaggtctacgagcaataggagacttaagggaggctagaacatcaagcgaagaagcttgaactaacctgtagggtgaatgtcgcctagaggggggtgcataggcggaaactgaaatttacaactttaaacacactacaagccggggttagcgttagaataaattccgaatctgggagagagaggaaaacaaatcaaccaagaaaataaagcgggtgacacggtgatttgttttatcgaggttcggttctaaagaacctagtccccgttgaggtggtcacaaagaccgggtctctttcaaccctttccctctctcaaacggtcacttagactgagtgaggcttcttccttaatctcacggtcacttagatcccgctaggatcaccacacaattgttgtctcttgccttgcttacaaagcacttgagagtaagaagtgagaaagaaaagaaagccaagccaagcaaacaagagcaacaaagaaacacaaatcatccactcacaagtcctaatgcactagaattgaattagggactttgatcggatcgatggctttgatttgtgtcttggagtgttgcactttgctcttgtattgaatggagagtgttgaatgcttggattgttggagtggcggtggttggggggtatttatagctctcaaccaccaaaacaaccgttgggggtggctgctgtcgatggtcgcaacgcacagtccggtgcgccaccggacactgtccggtgcgccaaccacgtcacccaaccgttagggtttgacagttggagctttgtcttctagtggcaccgctcagtccggtgccgcaccggacaagtactgttcattgcccggtgcgcctctagtggctgctctgacttctgcacgcactatagcgtttgcaggtgtccgttgcaatctatcgttgcgctggtagttgttgctccgcttggtgcaccggacagtccggtgaattatagcggagtggcactggagaaacccaaaggtgaagagtttgaacttgtacggtcctggtgcaccggacactgtccggtggcacaccggacagtccggtgcaccagacccagggtactcgtcggtttcttttgctcctttcttttgaaccctaactttgatcttttattggtttgtgttgaacctttatgcacctgtggaatatataatctagagcaaactagctagtccaatatttgtgttgggcattcaaccaccaaaattatttataggaaaaggttaaaccctatttccctttcagtgtctccctttttggtgattgatgccaacacaaaccaaagcaaatatataagtgcataattgaactagtttgcataaggtaagtgcataggttacatggaattaaaccaatttatacttttactagatatgcatggtttgctttcttttgtttagcattttggaccacgcttgcaccacttgttttgtttttgcaaatccttttggaaaatactttcaaagtctttttgcaaatagtcaaaggtatatgaataagatttc

SEQ ID NO: 1879 - DNA, 4169 bp, Zea Mays
acgcaaaagcaaatgccaagtcagcgtgtgaacagtacgggggtactgttcatctatttatagacacaggacgcagcctgtgacgaattacaattatgccctttacaaaagtttacaacattatcttagacctctaaggataaaaaggtcattctatctttatgtcggtttgcaacgccgaagctctataaaaaggaaccttcggccatttcctgaggacgatttcagccgaagctgcttcttcacgcaagaccttcggcgcaacgaagcatgggcccaacagaaccaaagtatctgtcgtgttcagattccggactacgtgaatactactactaaccttgacggcaggcacctttggacatggatccttggaaccagaaataatatgagccatgttcagatccttgacgacatcagcattaacctcgaagatacttgctgggacccttacacgaacacgagacatgcttgatctgtatccgtgtagggagacacggcaatatgccctgagcgactgagcaggcattgatgctgcgtccgtgctagaggagaggcagctgcacatggagatggagctcgctgtctatctgccaaagacactgctgtgtgatagtatctatcagttggtagttactgcacagcaccagcagtctggtggtcagtcacatggtgatgcccaggcccagcgagtgaggacagacagggtatccggtgctccaaggggagacccacgttatatgtcatgacctaaatgatcaaatttcaaaagaaacggttcattctgttgtatcctctgatcggtggttctgtcaaccctggaagaagaacgtgaaatgtcaatccatgttacgtttagaataccaaatcagaaactatgagatcagaacacaaccttgaagatacatttggagcttggacttgaacctttaggaccaggaatcaatcaatgctcacattctgggggtgcacaaatacaaaccagaaaggtccctatcgaaaccaatctcagctgttgacaggtgaactggagagatgcacgctatgatcagaggcattggtgctcagttcattcatgttataggctaggcagttgcacatggagatgtaattcactggccatcattcaatctgcagatgacactgtggtcgtatcctggtacttattctccccagtggtctgttgctcagtcacatggttgtacccaataagtcaggacagggtatctggtgacctaaagggaaatccttgtcatatgccatgactcaattgaacaaagtaaagaactgagacgaatgggatgtcagtagatgagtgtttcttttgtgtgcggcccttcctgtgttttatctttgactgcataagtgtttccgttagtcaccacagaaagaacaataaaaaatttgtttgtccaaagggctgtcaaaacaagttaggtggtgccagtgaacactggagtatagtccaacagatggtctaaggtagcctgaaaagaggtgcacaagtggcacaaccaatttgcagcgccgccatagcatcagttctgaaacaatggagcacaagaagggaacctccaccaataaggcaaccgagctagaagagctggaagaataggaaaggaagcaagcaatcaggcagccgaattggaagcaagggaagaggatcaggcgagtcctatctccagtatatcaatcagtagtttcctatttctgctatagcagacagtagagtttcctatttccattatagaaagtaataagttgattgggtgtgttccctgccgcctatactataaaggctggctgctagtttgtaagagggcatcgaagaataatacagttacctcctagaggtgggctgttcttcgacggtggcgccttcagccgccggcgacgacagacctcctcgctacgttctgcgttcttgttctcaagccactctcctcctccactctcccctgcatacccctcgcctaccaccacgcagcagccacaacatcaacaaaaaactgtgtgaagtttgaacagatataaaaaaactcggccgctcccggtattataagtttgaacagatatggtagaaggatacaattaaatggaaacaacagtgcaagtgcttatagatacagttggagaaggtaagataataaactcaagtctgaaccataccatgtgtctaaagatattaaacaggaccgctaaagctagtttggaagtagtttattcttcactttagccagtgcaaatgaaggatcaaaacaaagcaactgctatgcaaaatataccaactaggaaacgaagattcattagaatcactgcatcatcatccatcaagttataagaactaaaacaaaagtgactgcagaaagacaatagtatgtgcacatcaggacttctacaaataaaatcttcataatccaaagatgacatagaaagaacatttataatgtttatttagtgtgtaggtttgaaaatgtagtacttgaagcatgaagccagtgactcaatatcagcagaatatacagctaagctgattaagcgtccagcagtacacatggtgttttagggaaggatgctgcatgtataatgatgtatcaatactacctagcagagcatatggtgtttaataatacaaatcagcacaatatcttgatttgattgaagtagttataggctctgttcttaaggcgtcgcctaggcgtcttgcccgcctacctcgcctaggcgccgcctaggcgtccagacggtgctccaacgccttggaccgccttaccgctttaaaaaccatggttataggcttttttcagatagcaactacaaatccaaatggaacaccttttattttcctttgttcatcaactacaaatccatatggtattataagtatgaacagatatggtagaaggatacaattaaatggaaacaacagtgcaagtgcctatagatactgttggagaaggtaagataataaactcaagtctgatggtaagttttctcctttgttaattaagtactttgtttctttggtatggcggcaggcgaataatcacatgacaaaattaaacaggaaagtgttaaagaattgcactgctaattacatattatttctgactttgccaaccatgcaattaagcctactatgtaaacggacatgcttttatatgatttttacataccaatgactgtattagcacttaaacagatggtaagttttctcctatagatgttattcaatgaatatcatgcatctagtaatttcggtagaaaatacttgttacaagggttttagaaaggcaggcctggtgcagtggtgagagctgtctcacggagtcaccaggccacgggttcgaagcagcctctccgtatttgcggggaaggcttgcctcagtccacccatttcacagactccaatcatgtgggagcctccggcggagaatctgcccctttttatatttatcagaagattttggatggacagtctacgttacaaagtagaagccaccataacctgttttatttcttacccctgtaaagaacaatggtgaacctgagcagtgaacgtgcacatgttataaaagggaaatggaaccatattaattcaaaaaggcacattttctggtatagtactatccaaatatcaaaactaccatttgacacatgtataatataaatgcaatcagttatcaatgaatttgatatgcttctgttatgttttattctagaaacattaaaggtgttccttcaagaggcacctacaggattgagaccacaaatggcgagaacttgtaatcggggacagacaaactggaaaagcagcaatagctatcgatactatattaaaccaaaagcaaatgaactcaaggggcacaaatgaacttgtaatcggggacatattggtcatggatgtcttggacacctatttataaaggcagaagaggcaggtttattgcagcagctagcagcaagaagacagctacacagagtttccatttacgcagatgatgtagccctcttcttacaccctacggtggatgaaatctccatcactcttgatatcttgcagctatttggcagtgcctctggtctgaaaaataatgtgcaaaaatccaatgtctaccccatacagtgttcagaagaaactctcttggaagtccaaagtctgctaccgtgtg

SEQ ID NO: 1880 - DNA, 4207 bp, Zea Mays
aatacctatccctcggtgcgattcctctttactttatgcaaacaagactcctaactgcagaaaaagaacatgctgaataagtcgatcgttttgaattaactcgatccatgtgtaaactgatcgatggcaacttggaataaaatatatagccaaagcccacagcggcattatttaaactatagctacaagaaagataagactgcagctaatactaaaaaaaagtaaaaggaatcatctaggcataaacaaaaaggaaatggagcagctctatattcgttgcacactcacagagcatatgtttatccttttattgctctgaattgatcctgtccactttgtgtgaaccatagccatctagcgaaattggagtctgatttgtcagcttaaaactgattgggctatcaacaacatcctagtaggtggagcaccccttgaatgagtggttagtcgacaaaaagcaatttaggcacacaaaagatatgttaaacatgttatctctggagcattatataaactattgagtgttgtttcctaaaaaaaaagctgaaagcttttttaatatgatgcctacatacacaagctcagccgatagcaaagtcaattacatattgagaactcatttgctggtgtagcatggaacggattgatcacagtcaccaagttcccaggaaggttttgacaggccacacggtggggacgagattgcttctgtgttcttcgaacaggaaaaacatttttggacaaggaatctggcatggtttcacgttcccagggactatggagctaatttgttaatatgatttaacatataaccacagtacccccattaaaaatgaaattgaagaaagcacttttctttagacaagtggacttaatcacttaaaacctatggttgctttgatgaggattaaataacatggtgaagcactttatttcaatttgaatcaatggttgtcacaagtcacaacagttctctgacaaacatatagcctcttatcagtcatgatgcattactcttgatttctagttgtatgctcatgtgcaaagatcaacacaagcatatgaactctgtaaaatgtgaaaaatataaaattgttcctatttcggatatgcacaacgaacgccttgatcgaaccatttgcctagtgcatctacagtgtgaagttgtagacatctatgtgtgagtaatcagtaatatgattgttccaggctacacatagttaagcttatctcaacccatcactttctgctttggaaccttagatctatctagtcactcttaagttacaagcagggtttaataccttatcctaacttagtcagcaggagagatagcattcattcaacaaaacgtgattaaagcaaaccagggaaagaaatataaaggggggagggggcagacctaggccagaggctcccacatgagtaggatctggagaagggataaaccgaggcaagtcttccctctataaaatgtaaatgcaaagatattgcttcgaacccacaacttggtgactcagtgagacaactctcaccactacaccaggtctgtccttcaaaccagagaaataaataaaaacaaaacaaaaggttgactactgatcagtggtgcatccagattacccaatcgggaaaaaaaactcaagaaaaacctacatacatagttacaggaatgcatctggccatttctaccttgcctgcattcttgtgcaacatagccacaaagattaacaaggtgaaaaccaaaacgatgagataaaatgaccttgatatctttgcttacctactaaatgatagagaatataggataagttggtcagtgagggaagaaagagaaaagggcgcatcgataaattcatatgtaaagcttatactacctccgttcacaaatatatgacaccgtcgacttttttccaaaattttgaccactcaccttattcataaaatttcttcaaaaatgtaaaattttaagtcaagcataaactaccttaagtgataaaacaaatcaaaacttgacctgcgaggggtaagacagccccgggtattgtattaagaagaagaccttctcacacaggtcaagaaaacccccgaacccctgccccacccatacacagcggcatcgaagcccatgtgagaacgaccacgaccggggctgagccttagacctgtgctttggcatgggacagacgaggagattttttttaaccacagcctaaaattcgctaccacggggagtcgaacccaggacctgaggagtgctactcagaccacctaaccgactcagctagatgccttttcgcgataaaacaaatcacaaaaaataaatgataagtcattattattttgaataagacgagtagtcaaagtttttttaaaaaagtcaacggtgtcatatatttatgaacggagggagtatttcacaaaaagttaggaaaacctatatagttactacaaaacagagaaaagagttgtcaatttcaatagataatgcagataataagccataaaggttgagtaggtctttatactccattttttttctgaaacattgtgtttttacatccatattaatattcaaaaaggacttctgagttctgacagtaccgaatagaaaaggtcagcaaggccgcactctcttacttgccaattctcatctactgactgtacaaaatcaagtgacccagcaatatattcaggactgctgctgtctccttacagtgagctagtcatataccatacagcaagccaaaaattcagttgaaagtgcatacatgcacagtgttttgtttccctctttcccttaaaatcatgtatatagcggattgagaaaactgaattaaaatgtataggggatatgtgctctagcagattgagaaacactcatccattttatacgtggtgtacacacgtgtatatctcttctccagattccctcttctcctcttgctgcggcctgcggatacagcttacccggtgcagggagcagtgcggcatggggcatgtggtggcaacttgcccaaggctgggtggcgcaggactctgcacggcgtgacagcccgcacgccagcttgcctggtctttgcggagatgcagtgtcagcgtggggcccagatatcagtgagaggagtaagaagaggattgagaaaaattgctgcctgatcccttttatttgagggaaagagaggggagattttgaggagccgagaaattttcggtgaaggggattaggctatccgcagcggttccccctaaatttctcccttatatcacttctacaaccataaaatataatttcatatacctacttttcatccactatcaatttttcttctactaataattggaggcgggcccacagctatagtggaaggggaggagccggacgagcgctacagccggagggagagagaaggggacggccgcgtggggagcgccataggggggcgcgctgcgggctgccgcgcgcccctgtagccgccatgcaaggggagggggcgggcgcgtggcagccgctgcgggtagccttagaaatgggtgcatctgatcctctctattgttggttatagggaaacaggaatggttttaatcaatctggtagagttgccctaacacaagattttatgtgttgatctagaacaactaaggggctgcttggttctcttgccagttcctgttttgcctcgctccactgggatacctgtttcgcagcagagttgaaactggctttgcacgggaaggttttccttggttgcatctgcatgggcgagtcaaattcgctctcccgagctagcaagatttgctttgctctgtttggtggtgttcaaccaaagcaatggaagaggaaaagagagataggacaaaacagaaccaaacaggtagctttgcttgctttgcctattcttgcctggtgaggagagccgagcatgcattcttgtgtgcaataaaaaattaagtaagccacactaatagctgtttgagagagaaccactaaatatcttgtgtgctcgttgcaatgcccggtccattacaccattagctaatcaagtgaaatactcagagttaaatgataacatcttagaagtatggatagcagattagcaagtataaattcgatgaaggacactactggatccttgatgtggaataactattcacaataaaatatatacgctgctggacgaaacaaatgcacaagaaaaaacataat

SEQ ID NO: 1881 - DNA, 4220 bp, Zea Mays
cttcttttaccaactcacagtttaattctgttgataaaattgcctaactcttaagagaacagattctgcacagaattatgagactgaaaaactgctataatgaaactgccataactttctgttctgatgtccgattgagatgttcttcgcggccacggaaagatctacaacttatctacgactcatatataaactttttatttttttgaggccactaagaccacggaaaactggcatgaacagaaactgtcgaatctgccattctgcagaaattaaattcgagatcaaaacctaaccccacatctaatccaacctctaattcttcaatccacatgatccacaacctctaaaaacacataattatatggaggaacaaggatcccatccttacctagagtttccccaagaaaatctacaatagatggggggggtagaacatctccttgatcctctcttcctcttcaatccatcttgctcctcctcttctcgatccttgctgcgtgagggaggggaagatctatggaggaggaagaaatggtgggcggctgccatgggagaagaggggacgcccaaccaagggaaaaatgggggagggtggcggccaagagagggggggtggagggaaaaggggtggcccccctagggttttgtgggagaaaagaaccgacgccccagatgacttttgcctttgcatccaacggatcacaaccctttcccacatccacgcaccgaagatcaacttttagacaacatttttttgggatattacactctaccccccttaaaaagaattcgtcctcgaattcggccactccaagcaaaacacccaaggtaccccatatagcaccaccattcaaaacatgggtccattattggtcttaattaacacaagaacttctaccttggactaattgtctaaggaaactacacaacctgacatcaagcatgaaacaacatgcaatgaagctcaaagcaagtcatagatgcaatcaacactacaatttcacaccatcaaattgggacgcaactatacatcaacatcaatgtcttaagacaacactcttttatgaaggggtaatatgcactaagcacaacccttaccaacttcaataattaattttaattaaattgaaacatccacacccgacgaatgtataagaagatcaaacacctcacctcaaagcaccacgaaacaagtagttctattgaaacaaaactcctaatcttcctaaaccttattcttgccatcatgaaaagataatcatgtaatctaacattctttgcaccccacaaaagggagaaaatctacagaactaatggagcaataaagccaacaagaagcgaataacattctgcgcggcataggtcatcgaagaaatgccaaaagcttcacaaagagcactgacagcacaataacacaatacttggttaaccaataacaactcaactaagaaaaatatccaaaccagtgaggttaacctacacataatataagttttcatctactgtagttcataaacttacatttcattctatcatacgatgcactcaaagtaccagacatacaaagtcaataataacccctaatccttcacacatttgacaaacatattaagctgatgtaaaaaccacatcatctaggagtaggtgactagccacacccaaccaactctaggctaggcaatgacttccttcaaaccaatagataggtggtctaaaaaaaatggctccacaagcatgcatcgaaaagggaaccatcagatcctcaatgtatcaatacataatcaatggatcaagagaatcaaagatttattctacaattagtatgactaacaggcaaccactttaaaccacatctaggctttgtggcaactaaaacacacaatagaagaaagacatgtaagccattctggctatgaaaagacttcccccaaaaatccatataaagtaccaatattcatttctttcagaactggtttctcaacataaacaatcattctttgcaatgatagttggagctatccaccaaccgctcaacaacttaaattcaaattgatgattaccttgtaccccaaaacatgcaattcacactcctcttagaaacatccacaatcaagcatatataacaatattattgtaataaaactcaaccatgaaaaacatggtgaaaacaacataggcatacttgtatatcacaagcataataacaacttcattctcacaaatgaccagcgatatctatcgcattaataaaacaatatcaaaatttcagaaataaattatatcaagcattaagccataaacaacttaccacataaccgtaaaggaatagggaggggtgaggttattgtcatctgcacttcaaagacactaacatatatcaaagatatttaaacccatacccttcctatatgtgcgagtgtgtcaaatttatcttcaaattgccaagaatctaaagcctatgctttgataccaactgtaacaccccaggatccccaaacatcctgaaatgctactaaactacacaactaacattcatatataaaattttgacagcatctcctttgaaaatttgcataaacgtggaagcaacagagtataagcagatatcatgataagaaaacatactagacattaataatcggctagcaatgggaagataaccataacgacatgaattgaattaactagtgtgcatgactagttaaagacaaacatcctttgacaagaagtttctaattaaatcatggttgtgcctgggcagcgttattatgagagtgaaggtggacgtgctgctacttccctcattcccaacatgaatcaagtaccttcatcgaagaagaagaaatgtactaggcatgatctggagtgtagccacctgctagcgggcataaaacttagtacaaatatttcacaaacatttgccatcaatcaacaaaacacccctacacttgaaaccaagacccagtggaaagactcccaccctgaaccacatgccacacagcagcaacactgtttgttaattttgtatctttaaaattaaaacagcggtgatatcaaacaaatactctaggagtatctacataaaatactctacaacttcagtattcaatagataattaaattctgccatctacaagttctaaaacatctgacaagataactgactgaatctgttttagacagcagtatggttaactttaaaattcgatatctcccaaactactgaaccaaaaattatgaaattctgctggaagtaagaacttttatccctctacaaaagtctccatagttggaagagccaattcgaccatttactagatgaaacccaccagtgaacagacccactcatttttgtcaggttaacaggaacagccacagtaaaacaaacataactggagtttcacaaatcatatgaatgcactctttaacaatctggaaagcttatgaaattatctacaacttcttttaccaactcacagtttaattctgttgataaaattgcctaactcttaagagaacagattctgcacagaattatgagactgaaaaactgctataatgaaactgccataactttctgttctgatgtccgattgagatgttcttcgcggccacggaaagatctacaacttatctacgactcatatataaactttttatttttttgaggccactaagaccacggaaaactggcatgaacagaaactgttgaatctgccattctgcagaaattaaattcgagatcaaaacctaaccccacatctaatccaacctctaattcttcaatccacatgatccacaacctccaaaaacacataattatatggaggaacaaggatcccatccttacctagagtttccccaagaaaatctacaatagatgggggggggggtagaacatctccttgatcctctcttcctcttcaatccatcttgctcctcctcttctcgatccttgctgcgtgagggaggggaagatctatggaggaggaagaaatggtgggcggctgccatgggagaagaggggacgcccaaccaagggaaaaatgggggagggtggcggccaagagagggggggtggagggaaaaggggtggccccccctagggttttgtgggagaaaagaaccgacgccccagatgacttttgcctttgcatccaacggatcacaaccctttcccacatccacgcaccgaagatcaacttttagacaacatt

SEQ ID NO: 1882 - DNA, 4757 bp, Zea Mays
aggtccgggatgcctgagacgacgatgccaagtggtggaggaggtggtggagaccagggcagaaggtgaagacgcgccggaggtggatggccggagcgtgtagaggggccccgagctgtcacaacgggcgaggggagtcctggtggccagatccttcacagagaaaccagaggggtcaaattcgatggaacaagagttgtcagtggtaaaacgacgaacagaaaggagattatgagtgatgtggggggctacgagaacgtcgttgaggtagaacggtccagggagaacagaggcaccgacagaggtgacaagcagagtggaaccgttcccatcgacgatcgatgaaggatgataggaatgagggggatgggagcgggagagcgtgcctgtagtgggagtggtgtggtaggaggcaccagaatcgatcacccagtcggaggaagggggggggggtcatcgccatggtgctgaaagcggcagcgagggaggcgttgtcccagcctccagacagtggggaccaagtcgtcgtgggggtccccgggggcaggagtaggggcggagccggatgcgatgcaggcacgccgtagggaggcgtgggtggcacgccgtagggtggcatagtcaggagggccggcgccaggggacgggaggcacgtggggcctggcccggccacatggcaatggtcccgatccaggggttatagagggacggccacgcctggccgccaccccggccgggggccaccacgagaggagccaccacccccacggccgcccttgcgggaacgacgactgccgtcggtggcggacgcctgacgaggggccgcatggacggcaggtgtggtgcgggtaggggccccggtcgacggagggcgagggacctgtccccctgaaggtgcctgaccaccgggaggagcgctgtagagcgccggagccggagcagtggcctcagacgccatggtgagctcctcgaggagaagctcgttcctgacggcacggaatgtgggaaagggaacggtcctcttgatgagagccttcaggtggccatagcgggggctgaggccacgcataaggttcaacaccaaggtccggtcggcgacaggctcgccgaggtcgcggagagagtccgccatgcccttcatctagcggcagtactcgtacacggagaggtccccctgagagaacaggtggaactgggcgtcgaggtgcagggcgcgagcgtcccggttcccgaggaactgttcttcgagggcgagccacgcctgacgacccgtgtccgcctggtcgtggctgatgtcctggagcttgacggtgatggttccgtggagccaggagaggaccacagagtccatcagggaccaggtccgggacggcggggtggcaacgtcgtcgaggacgtggtcgtcaagggcgtagcgccgcaaggtgagaaggacctgccccctccagcgagggtagtgggaggatgccgggtctagaacgacagacacgagggaccggatgttctgtagtccggtcgcctgggcgtggagagcgacgatgtggtcagcatcgagaccagaggcgtggggagcctctaaagtggacgagggtgtctcctggtcgatcggaggaggaccgatgacgagacgctgcgcagtggccatctgggtggtcagagtggcggccagggcgcgctcctgttccagagcgcgggacgcggcgcgctcgcgctcctgcgaggcggccagggcagcctggatggcggcgatggtggatgccagcgtggagtcggtggagggtggcggggaagcccaggtagcatcggcgacgagcggccgagtggtggatgagagcacctagaggggggggggtgaataggtgatcctgtaaaacttgaacttaatgccacaaaaatcttggttaagcgttagcacagtattgccaagtggctagagaagagtcttagcgaaacacaataaccacaagagaatcaacataggtagacacagtggtttatcccgtggttcggccaagtacaacacttgcctacttccacgttgtggcgtcccaccggacgagggttgcaatcaacccctctcaagcggtccaaagacccacttgaataccacagtgtttgcttttcttttctatatcccgttcgcgaggaatctccacaacttggagtctctcgcccttacaaagatgttcacaaagaagcacggagtaagggagggattagcaactcacacaagacacaaagatcacagcaaatacgcacactcaagacccagacttaagctcaaaagactagcacactagaacagagctcaaattactagaatgtcgaacaagtgcgcaagaatggagtgtgagtgatcaagagtgctcaaggaatgcttggtgtacttctccatgcgcctaggggtcccttttatagccccaaggcagctaggagccgttgagtgcattccaggaaggcatttcttgccttctgtcgactggcgcaccggacagtccggtgcaccaccggacactgtccggtgtggatttccttccttatttggcgaagccgaccgttggcagccttggagccgttggcgcaccggacacagtccggtgcacactggacagtccggtgccccctactagccgttggctcggccacgtgtcccgcgcggatcgcgcggccgaccgttggctcaccggacactgtccggtgcacaccggacagtccggtgaattatagccgtacgccgttaattacttcccgagagcggcaagttcgcctgagccagcctggggcaccagacactgtccggtgcaccaccggacagtccggtgcacctagacagagctgactttggctgaacagatccatttcttctccaattcgatttctcctgtttccagcacttagacacaatacattagtctctaaaacaatgtactaagtctgagaaacatacctttatacttgatttgtactttgtccaccatttgacacttaggcacttgtattggacactaaatcaccaaaacacttagaaatggcccaagggcacatttccctttcagtggagaacccagggagtgggagtctggggagacgggtcggcgataggagaccggtgagtacgccggtgcacgccgggtagcctggtaggcccagatcggaggtgatgaggacggcggcggcgctgggcgaggagaggctggcggtgtggggcgcagccaggcgcgcgtcggcaccggcggcggccaggggcgcgactgcgctggtgtccggcaggacggcgtggaggggatccatggccgtcgagggcgagggcacgacgactatgctgttgagacggggagcgtcgcagggcggcggaccagcagcccagcggtcgtcggcgatgaggcggcgatgcgtctgctgcacagcacggggcggcggaggtgcatgtgcatgtgctgctgccggtgcctggagctgcggtgcacggtggccggccacgggaggagcagtgccccgacgtggctggggttggacgcgaccagcagccaaacgcgctcgtgcacgaggaggagaccgtcgacgggagatgagctggggtcggagatgggatgaggcgcagccgccaacgggaggaagccggtcatccgtccgtcagtcaacggatcccaccggccgccagtgggaggaagccgactgtccgaccgacagagtggagatggccggccagaggagcagccgctcggccagagaagccgctcggccaggagccggcggcggcgactggcaggcaggggagagaccaggagccggtggcggcggctggcaaggcagaaacactaagctacctttgataccatgatagaagtgaaaccctaaccctacactagggtggacctgtatattaatagactgagttgggcctggcccattacagacagaagggtgaaatggtaaatgtacaagggagaccccataaaccctaatacagttctaacaatcgccgtggtgacgcctggcctcgggttcaggcgcaacaatggagttgaaaacagcagggaggcaagacttctctttctttgattgatctttcctgcttacagactaaaggcatagagggcttatatattggcctggcctaacaagacttcctccttttaaggggatctaaacaaactacctttatttaaggaaaatctaaacaactctagctatcttatctgagtactatctgctcagtctagcttatcttcccctggctgcttaggccggcgcccatatgcttttccagccataacatctctccctccctcgacgaacaactcgtcctcgagctgaaattgtgggtaggaagttttgaactgctgcaggggctcccatgtggcctgctctggctgctctgcactccactgaaccaggatgagccatttaccacgctgaagtcgggctccgagaactttttgtggtatgggcagaaacctgccgttttccagtactggcagagctggtggtagaacaggaggtgatcctctgaaaggtttgagtagtcctacgtggaaaacatcatggatgcgggttggaggttgacctttgagagatggttggtgcaaagaagttgtctttgcttaccgcccccatttcgggcctccctgctagttagctagtattgtggtagttcttgttagttttttagatatggatggatttatttatgcctgctattggccgctgtaggggcccctagtttgtttcttgtatctgttcctcttctttaata

SEQ ID NO: 1883 - DNA, 5195 bp, Zea Mays
gataggacaagatggtactccagaacacaactgcacaagcacgtattacttccatcttcccgcagcttctttgctacttcgcggcagcgtttcttatcctctcgtttcaccgggcaagtggcgtggttggcccggggcctccggcttgcaaattggcctcctccaactccttatcctccaccatatgttgaagccttgattctgcagcttcccagtccctgacacaggattgtaattgtcgtgcaactccattcctccgtttttcctattcccgtattttaccaatcctgcattctaaaggggacctcagtctctgctgccgttcctcgacgatcctaccaattgtgccgaaggtaaactatgaagaaatggttgaaacaggtatgattaaaatgtatttatcaagtattgaaaggacgggtaagttactttgtgtttatgacactagtccgtgatgttgaactcctcatctaactgggtgactatgtagagctattgtcggatgaaattggttgaatgatataatttattaaatatgatgtcaatggttcatttgggagactcgagagacaaatttatttgggggccccatacagatgggcttttctcagtgcactcaatgtacactcttttaatgaatactcctcctgtaaatcataatttactttagagtctaaagtttcctcttaaaattaaaattttattgtggtatttaggcaagggactctcacaaaagacaacttagctaagcgtggttggaaaggtaggttgaaatgcaacttttgtaatcaaaatgagactattcaacatctgttatttgattgttaccttgctagaaatatttagatattatttactttgtcttaaatttagagaggcccaatagtattaatcatataattgggtcttggaatgctaacaaaggaactgcgcataggaaaaaaactcctaattggagtggcggcaatgttttggtttatttggctatgtcgctatgatgttgtctttaactttaagccaaaaaaccatcaattacgcagattcttttaaggagaacatactggctcagattctagagattgttgcgaaaagaacaatctcaacatgaggtccttgcgatatgttgatctttagaggtggtggatatggagatctttgcaaaccatggatggaggtctaacgctaggctagagggagcttgattcatggatgttttttttctgagaatctttatgatggatgtttgtcattttttgatttgtaggccgtatgcaagagattgcaaaaggcgggaacattttgtttccataataaaaaatgtcacggtctagataggttgcaagtttagaactaccaccactgctagaagcagaacttgttgcctgtagaaggtagcggtaggaaagtaggaacaatccaagaaaaatcaagattaggaggaaaggtcgaacaactacctccaagcataccagtatcatcgtcatcatcaaaaaaatcatcccaagctattctttcttattagaaagggttggagggacaacctttttcaacctgacaaaaccatatactacatcatttttattgtatagtttaaaaaggagagttatagtatctatcaacttattattataatctatatccatgagagaagttaacttcctggctcttggtcatagagtctttgttatggcatggcctacatatgcagtggtttatggagctcatgtggtgagctacatgcagtgtgaatggttggcaagttcacatagctttgagggagttgttgtgttggccgcacacatcggtttataaccatgcatcttggtgcttgtaggaccgtccgatgtttggtgtgtggcttctttatgaggaggaacgtttggcgaaagccctggatggcattaggtggagctaatggtggtgacactttgggtattgttcccttccttgaaagtgtcatccaaatgcatctcctcatccttctagattcttttgagtaaactctacctatggttcctagatagatgacagtgacgatcaacattgtttccttacttaaggtgtcacctagaggccatgcaccatcttattggatgttgtttcgcatgatacattgaatgctaaactacaagcctctagtttttggcaagccatcctttttcgggtttgcgacttgcttgtggtcctacgatgcatctctgactctcataggggtgatatgtagtgatgaagtcggaggtacttatgttctaggtgcaacaaatcttggcaacgatgacacaatgctttcactttattgtgaggtcaaggcttggtgctagtatgtgacgacgtgtcaaggtcgtgtcaaggtcattggctaatggttaccgtgggaaatgtggagttgctttactatgtgtggtaagctcaacaacgatgatgtgtgatgggctcccttgggtgtgtgttttctttgtgtgcatgtgggttgcttaggatttgttgtcttggctgtccttttctgaattttccccaaactttatgccttactaataaatcgtgtgtctataaggtttgtaagcctaatcttttataaatcaggttaattttatcttgttaattgagagactctttgtaccattgtatgaaaaagctaaatctagctcaggatacagacatggacgtattatcacttgaccaactatagagcacaagtacgttactctcttcgttctattctaaattataagttgtttttaatttttttacatgaaatttcccaaatttgatacgcatctacacatgtataatagcaaaatctatgtaaaaagttgtaatgacttataattttgaacaatttgctagacattttttctttcgaaagaaaagaaatcaccgaacattccatggtgactttggccttacatccacaagtttaattcacataattttagctggtagtgaaacactattgagtagagatgtgcatccaaaaaatactgcaacacaacacaatataaccaaacaaaaagcgttcaaataggtacaacagtacaattcaaagggaacatgagaaaagagagaatggaaaatagatgctataattttgagaaaacatactctaaattcttttataggcacacaaaaagttataaaaattaattaataatttctaaatattataatacaaactcgatctaattaatatactatccaactatcatgaatttgtaaatataaacaatatagaacaaaataactaaaatataaaaataaaattaagaaactatggcacatcaagcaacgccttattaaaagaatctaaaaaatattagcctcaaaagtagagaaacaccttattaaaatcccaaaaatgaagatattagttcagaaaacccttgaggaaaaaacaaaatgaagatattagttccaaaagtagagaaaaccctcgaggagctattttatggtgttatgatgattatggaacacaaactaccaaagaagaagtgtatatcatggctgcaggaattgtttgattatgtcatggttatggaacttagaaaccaccaaagtgaagtgcatgccatatctaccagagtgattcaaatattgctgcctcaaacttaaaaattatgataaaagaacaaagagataaagcgcccttaggagaaaagcacaaagagaaggtcgaggaatccacaagtacgggttccaagttataccgatcctataagaggaaggatgaaaaggataagaagatgaagaaggtggtctactacaaaaccggatcatcaacgacaccatagaccttaagtagcgatgaatccacctccaagaaacgccatcaacaaaattcgattaaatcagactttacttgtaccccattcaattattttcacattcctttaaataatactactcccttgctttcggttccactcagaaaactaggacactttgatggtgctcttagtggagtgacaaaacgaaaagtcggagcaaatcatccaccgcaactcacaaggcaccacaatacttcttgcttctttgtgtagggatgagtacaacaaggtgaatgggttggaaagcgtcaaggagatttgggatacactcaaaatggtgtacaaaggtgacaagatcaccaagatcacgaagatggagctcctagaggtggagcttgggaggttcgccatgaacacaggagaatgggccttaataaatgtacaaccgactcatgtccatggtgaacgagatcaggaactacagaagtaagaagtggatggacaacgaagttgttaacctcatgctaaggttgtttacttcttgtaatgctactcttgttaccttaatccatgagaatcctaggtacgagaagatgactctagaggaggtgcttgaaagttccttggccatgagatgatggttaaggactccaagcacattgaggatttggctcaaggaaacgtgaccaccatggagccacaaccgaccgccttgaaggccacaagtaaaaaggaggagccccaagaaacaaggaaactattgaagatttggggctcgacgatgaggagatagccctcatcatcaaaagctttcgacaaatcctatggaaccagaaggacaaggactacaagccatgtgtcaagagagcgtgctacaaatgtggtaagaccgatcatttcatcactaattgtccatatgcaaaggatgatgatgacaaggaagtggacaagagaggaaagaaggttgagaaaaagaaattcttcgtcaacaaaaagaagggaggtgaagaccagatcggcatggaatgggactcggacgaggactcctttgacgacgatgaaggcatcgccacactcgcctttaacaaaagcaccattttccccaaggtcgaccacacatgcctaatggcaaagaagagtaagaaaaaggcacgacctacaacttctcctaaatacacttcctcggatgatgaatctagtgatgagaagatatgaacaaatttttcaagggccttagtagggataaagttgctaaaataaatgaattgattaaggttgtcaatgagaaggatggattcctagaaaagcaggaggatctactcattgatgagacagaaaattgaggaacttgagaaggcactggctcatgagaaagaaaagaataaaattttgacccatgagctaaaagtttgcaatagtttaatttctagt

SEQ ID NO: 1884 - DNA, 5783 bp, Zea Mays
ctactaatacattattctactaatactacttctactactatactaacatctaagccagtggtgcctaaccactggccttgccgttgccgccgccgttgccgccgttgcccttgccgtcgcccttgctgccgtcgccaccgccatcgtcgtcgcccccgtcgctgctgtcgccctcaccgccgtcgtcgctgtcgctcccctccttggacgagtcagaggagtccccctcatccgaggagacctccgactcatccgagccctcgagcccagcacgcttgacggcccggatgtatgtccacacctccgccgcaatcctctgggaattgtctgagtcgtcagacgatgccgggggagaggcatagaccgacgacccctcggactcggaggagaactcctcctccgagtactcggaatcgccgaagtcctccgagggaggagtcggctcgtgcttccgtttgtcgccagagtggtgcgacgaacttccgcccttcttgctcttgcccatggtggagtagaagagaagagagtaagcaacaagcggcagaaagatgtgtgaagacgacagtgaagcaagcacactatttatagaagaagaaggcaaccgctcacctcctaccacggtcaccgaacagtcgcaaatatttaataagcaattcaaaccgtttggaaacaagtcaggcggctggcgccgttccacataacacgacacccattgggactcaagtcaactgcttggacgatatgattacactcgcggtcacgtcaagttactactcaggagcagtttgttaaacgctcagcgcaccaagctgtcccttgcctacacccatcgggggggacgtccaggaattttcaatagattttcccaagcagtcacatccgcacagtatacacaatgaatgtatcaagacagaaggaagatatcaacggagataaaaaaggccaaaaatagccaatgaggtacaactgtacaagtctaatcaacagaagcattgaagcacgaagtgatatgaagactagccaaaggccatctactaaacatccaatctgtcgcagatcaaataaatttcagacctgacaagatatgggcagatcgcatgctcgatctcgaaggcaaaactgtatgctgacctctaaagcataaagttgatgatataatgctgatttctaaggcattcaacgaaaaggaaaggaagatttctaaaaaatagcatgagatgaagaccttcgagtggattattttcagtaatccactcaaagctcgggggctacacccggtgcacctaatgaaccatcaaccccaaaagacagaatgctgatttctaaagcataagatgaaaataaaacaatgctgatttctaaaagcatgagttgaagataaaaatgatttctgagaagacttgaaatgaagaccttcgagtggattattttcaaaaatccattcgaagctcggggactacacccattgggtgcacctttggtgcacccaatgaatcttgaattccaaagacagaatgctgatctccaaagcataaacccgagacaaagcactaatttttgaggaataaagcgaaggccgatgaataatggtgaaagaaaacaacagaagatcgtttttaccgagtcactcagagttcagaagcaacggcttgacagacttattttcaaggcattccttatcaaaataaaaaactgcaagatggacctagaatctttgggccatttatttcaaaatcgacccaaagattgggggcttgtgggggacagatatcccccgggtccacggaaaggctaaaagacctcgcgaaaggcctgcgagcccaataattcgcaaggtcaccccttcgtgggcctggggaggcacgtccgataaagcggattgacacaagattggattgacgcaggcccagacggtccgatgagtttgaacggcaaccgcaacaaggatccgaccttcccgcgcaggggcctcatacatcggaacagagcggagataggtcgacggaattataggaagataggctcagtcggttcactattacttaggctcacattgttatcatatccacatgtaatgccccacggtcgagtatataaggcctaaggggcatcccctcaaaaatatatctcactacttaaccatccacctagttctctaacatcctcgatactagagaacctccttgtaaccgaccacacaaagtattcacgccaggacgtagggtattacgcatcttaaagtggcccgaacctgtacaaaattgtccactgtctctcgtgcatctagcgcgaaccatcgagctacagtcggtaacaccgtcctactccaaaaagcacctcgaggggcaaccctgggtgcgcggtcggacccaaaacaccgacaggcgtgggttatgccaaacgacccacgacctaagcttgacttgacccaaatataaagaacatcttatgccaacctaaggagcaagggggtcttgagatccaagacctaaatataaagaacatctctcttttaagtaaatggttatataagctggtaacatcagagggaacctggcagcaattactcaaaaataaatatttggggtcaaaaccattagtacaagtccagtgaaaacctggtgattcacatttttgggccagcctgatgaaagtgaagcatgacttccttcgcttcgacaatttcaaaattagaaatggctctcaggtgagattttgggaagacaactggcttgggaatgggactttaaaacactagtacccagggttatattgcataacaagaagaaaatttataaccattacaaaagttttatcaaccccacaaccaaatatttcctggcggagatctttgataggaccaaaattagtggcgtggaacgaattgtattcacgtatcacgagagtccagttggaccagggtgaagatgagttcacctggggtctaactaagttaggaaaattctcagttaagtcgctctaccaagccttgatcaaaatcaacatcccaaatcataataaagtcatttggaagctaaagcccccctaaaaatcaaagtattcttgtggtatctaaaaaggggagtcatcctaacaaaggataacttagcgaaatgtaactggaaaggtagtctgaaatactgcttctgtcacaaaaacgagacgatcagacatctcctttttgactgtcatttttgcgagacgggtttgggactttatttttctagcttttggtatttctagaccttctaatatccacaatatgtttggtaactggataggaggcttcggaaatgaccataaagatctagctctacttggggcagcaaccgtatgttagtctatctgactaggtagaaatgagttaatttttgaaaacaaaatttctttatctcctttgcaggttatttttactgtagcccagaggcttcgcacatgggctgtgctatagaggcaggactcatgcaattatttggtaatggctacgcaacatttgactcaagtggccaaggagtttttttcccgggagcatggttggtggtctagtcttcggattgatagccactagtgtgtgtttttagattctgttgggatgtgtgctcttatgggcagaggccggaagtgactttcaaggacttgtatcatctcgacgtactgttcttgaatgaataaaaatccttcccttataaaaaaaagaggtcgggagcatatattaaggtctatattttctaaaatcatgttcggaagcactaactaatttatccacatataccactagtaacggctggtaataaaacttgcaataagtttactgtgaatctatgaaacttaaagtcacacacacgcacgcgagcacacgtacgtatatatactagtaaggtgtttatgtattgctataattttcatttatgcttaagtatagaatataaaacataagaacatatatataggtgggtgcgaatataggttttggagccaacaatcatgattgaaatccctcatttttgtataattttaacttttttaccatttaaatatgagaaaaatggtgacacatagacatgagtatggaccatccgactcgaccaatgtaatgaacaagtacgagccatagtttttgacccgcagcgatccacaagtcgggtatgagccatcattttttatccaaaatccgaccaacccgaaaaaatctgatccaaagccaaaaaaacttgactcaacccgaaaaaaccccgacccaatccgtccaacaaggagacacgagccaacccgacctgacccgatactgtaccatgcatgggtcaggcgtgggttatgccaaacgacccacagacctgagcttgacttgacccgaacccaaccgacccaacgtttaaacaggcttaagtgacacgcgacgatggtgtggaacggtaaaattgtgctttataacagtagagaagagatatgcccgtgcatatgtgcatgcatgctagagaaacctatttgcagcttataaacatgagaaaggtaagtagcaaagctaaattaaaggcgacgtaaagaactaaaggctaagatttcaggcaatatcaaaagggcaaactttatgcttcttttcctactttgatcattgcctggtgtaagtaatcagggataggaagaagactacaaatgaaagaaacttaggacccatttggattccacacgctaaactttagcactctttgtgctaatgggtgctaaaatttagcagtttatttttagtaccttcttctagcacattttagcattcgtgtttggatctccaattggtaaagtttactaaaagtgtagtgttaaactttagcactgtggatccaaacattctcttaaacaactgtaggatcgacaaacatagttcgccaagatatcgctcactagatttcatataatcattccaccttcacctttccatcctccaatttcagttaaatccatgaacatataatttggacacggaaacatacgcatctctctcgtgattcttaggtgcatggtaggctgaaaataaagaagagtgcatttgctattggggcaaaagcatgcatggctttcacattcttgaaagctatagggttatcccaggcatagctagctagagaggaggttgctcaaaggtataaactttaggaaagcacatatctttgtgcaaataaagatgagagaggattaaagcaaaactagcaatgagattcctatgcactaggatccaccaggtgtgctgcatgttctagataatttcttctcgcatgcacggaatcaccaagttaaattgaaatagaggtctttacacatccgtataaaactcaagtgcaagtgaaattgaaacagttcaaacgacctagatggaaactcatcaaggcatcaggtaggggtctatctacgacatgcatggctgtccatgaattgtaaaagaatggttggatgtgcaggatttaaaattgaaataattcacacacccattttaattccgtctttcatgcatatgtgatatgtctggcactctggctagggtaataataatggatcacgatctggatcatgcaaatgtttcttcagattcgtttggtatcttaattaattttagttgaaaaatgaataaaaatagagtcaggtcctaataggatctgatccttaaattttatactataaaatttatagcacatcatcatccctatgctgcatggctagttattacttagttcaatgtccagtagtgtatgttgtgccttttggatcggtattcatggcaatattgggtt

SEQ ID NO: 1885 - DNA, 6486 bp, Zea Mays
ccatttttacaagtgtctatttccaagcaaaatggtttggcaaagttgggtaatgccaagacgagagctgaaataagagcttgtttcaatgtagaaaatgccaactagtggtcttgagtccacacaaagagagctccctttttcaacaaattgtgcaggggttttgcaataatggcaaaatgtttcacaaacttgcgataatatcctgcaagaccgaggaagcttctcaagtctttgacattgtttggtgtgggccaggacaacacaacctcaaccttgaattcatcggtggctaccccttcctcactgataacatgcccgaggtaagaaattttgcgttgtgcaaatttacacttagacattttgacaaaccaagtgtcttgttggagaagagataacacatgttgtaagtggactaagtgatcatccagagtggcactaaagattaaaatgtcatcaaagaacactataacacattttctgagcaatggtgctaatgtagtgttcatagcaccctggaaggtgcccggagctcctcataaaccgaacgccatgaccagaaatttgtactgcccttgatgagtttggaaagttgttttgaattcttcttcaggtttcaaccttacttggtggtatccagacaaaagatccagtgtggaaaaccatgatgcaccagcgagttcatccattaactggtcaaaaacagggatgtgaaacttccatttgacggtcaaggcattgagataacgatagtccacacaaaacctaaaactgccatccttcttcattactaacaacaccggagaagaaaactcggaggagctaggtcttataatacccctttgcagcatctccataatatgtttgtcaatttcatccttcaacgatggtgggtatcgatatggcctgatattaactagagtagcaccaggtaccaaaggaattgcatggtcacaggccctgacaggggaagagaatttggagatgcaaaaacccagtggaactgagctaaaataacagatattgccgggtgcatcgcatcaagtgggttatccagagcagttggctgaacaggtgtaatgtgcaaaagaatttcagcagcgtgtgcagcacaaccgtaaagcaccacttgtctatcctggtagggtatacataaccatttatgttgccagtgtaccttcatggggctataaaactctaaccaatccattcccagaatgagatcaaacgttggtagcggcaacaccctcaagtcttgagaaaaatcatacccttggatgttccaaactgcatgtggcaccaccttgtcacaggatagcaatccaccatttgccacttgaactttgaaaggagttgcagctactgaaacaattgcatgacgctgaacagtcgactggttaatgaaagaatgtgtactaccagaatccaccaatatcagaacttcccttcccagcatgctccccagaaatctcatggacctttttgcagaagaccctatcacagcttcagccgaaatagccattataacgggttctgcaaatgactgttcctgaatagatgaatcctccactgagttttctaataataattcccacaccttctgcaaggcgtgtagctgcaccgttgcgctacaagtatgtccacgatgccacttctcagcacacctgtcacacaaaccacgagcacgtcgataagccttgagcgcagcgagtttaccatccatagatgatggaacgacatcttttttcttctgataagaatctggcttatgaactgaagatgtgggtggaggtggtagtggcatgggtcgagcactcgatgtagcagatttcagccatggctgataagcttccttacgatactcctgtcgtcccgatggcaacaccacctcttcctgcaacaaagccaaggaacatgcggagtccaagtccagaggacgctgaagcataaccactgctctaatgtctgtacgaagaccatctacaaagcgagtagcaaagaacaatggatctggcactgactcataaacggctagctgatcaactaatgtgacaaaacaatcctggtattcagttacactactctgctgatgaatacggaacaattgtcgcaacagagattggtactaatcccgaccaaacctctcgtgcagtaatctacagagtaatggccaagacagactcggttgtttgcgctcgacagattggaaccaacatgctacatgcggcgcaaggtacatataagccaccttcacccatgcctcaggttcaacttcgtacatgtcgaagtaactctcacagcgatatatccataatcgtggattatccccatcgaacacaggaaatggcaattttggtaacttgcccagagaactcatcggcatatctaaattacgagtgcgactacccacatgatcaaaaacagaaccatggtaacgaggagagggcggtagaaggggcacatgatgcatacccttgaccgggccaggggtgatggtcaccgacccatacccctgctccgggtggcgtgattcttcgcggtgcccagtggggccgtcatgagtcggagcctgtagacgaggatcgagtagcggatccagcttgtcgaggatgctagaatctgcacccgccatgtaacgcgctgcgtgatcccactgcttattcatcttgtggagctccaacttgacatcttccatggcggcgtcgaccttgggacgccagctgtcaaacttggtgcgcgagttctccagggccgtcaggcgatcttccttggcgcggttgaagtctccaaaccgctgctcccacttgaggtccatcgccaccaacttcttttcgatctcctcgaggagaagcttggacgaaggatccatggagcccttgcatcgctggagcctcgtgaagtggtcgtggttggcggcagattccagttcggcgatcgcggaggatcgatcctctgataccaattgttacgcgcggcagtttgcgtgaaggggaaggaaaggcaggagagaagaaggaacaagtaggaggaagagctgacagcttggggttttctttcagggaattgttgttcagatccttacaccacgcttgcagcgcgacttaagttcccaacctcaccacacacaccacaccttacatcctccattctaggcctacgacacggacattgggctaccttatgcgacttgacaccctggggattttgctgctgctcgccagacttgctgtcggtccatggacatcaccaatttctgatgtcgtgttgtctccctcctcacattcctggacagtgtctgtaacaccttctctccccacgcgggcgcacgtgcacaccaggccgccaccgctgccgctggccgtgcccacctagcgtcgcctcgcctccctgcctccccgagcgccactgccgccctggcttccatgcccccttcgccaccccatgcgagtaaaacccacccttttccttttccctcccctccactcaccctccaccatgcagtcgcaatcaatggcgtgatggccggccgcggcctctccctccacctgttgcgctccctgctccttcccttgttggaactccaaagcactcaagactagaactcacaccagaaagaaaagtagctaccaagacacaagcaaatacgacgccgaacgcctgacgcacagacgtcgtttttttattgctttgtcgtgactttatctgttaacagtacatcgagtatttatagctggaggacgtgaagcaaccgactgcacgcagccactactcctgctcacgatccgcaccactcggccaacgcgttggacgcggcaaacacgcacgtcctgaccaagccaacaacagatcacggcatctcagcatgcagcttctacacgcgtcgcacgcaccaagctgctgactgtgactgccgcacaacgcatgccttcatgcacgtgcatgctaacaaacttgcactcgcgtcgcacgaacgcaacacacgctaaccacggcaacatgcagacacacgcacacacatcgacctgaccagcgcacacacacctggtgtcgagtttattcctaacaatctccccctaaactcggcactgcttcctgcactcacaagagcgtcgcctcctcttcagcatcggcgaatagtgcatcctccttcctcggcttggggcagtcccgtgcgaagtggccgcggttgccgcagttgaaacacttcccgatcgacaactttttcttttgtcgagccttccacttggcctccgtgagaaggagctggtcgtcgcgccgttcgccgctagcacgagtgcgccgccgggaacgctcgtcgaacgccttcagtctgccgagcgcctcctcgaacaccatcgtctcgatgtcgcagaactgcttatgcccgcgacggcagggaagagccgatccgggacagtgtcgaggagctttttcaccatgacagcgtcgttgagcgtcacgccaagcccggcataacgcgccgccataccgctgattttgccggcgtagtcgtccaatgcctctctgtcctccatgtacagcttgttgaactcccccttgagcgtggcgaggcgtgccgtcttgacccgatccgccccgacgaaacgagtcttgaggctcgtccacacctccgcgccgttttcttggtggagacatgcatcaagatgtcattaggcagagcttggagaagttgtgcccgcgtcgtcttgttcttcaccgcgttcacctcgccattatctggtggagacacggcctcccagagaccttgcgcgtcaaggatcgactccaccttgatcgcccacgccgtgtagctcgccggcgacagcaccgggtatgacatggagaccgaactccccccggcgccgtgcggaaccatcgccatagcttcggactcgaggtagtagcgaggatcttgggcataaaatggcttcgataccaattgttggaactccgaagcactcaagactagaactcacaccagaaagaaaagtagctaccaagacacaagcaaatacggcgccgaacgcctggcgcacagacgtcgttttttattgctttgccgtgactttatctgttaacagtacatcgagtatttatagctgaaggacgtgaagcaaccgactgcacgcagccactactcctgctcacgatccgcaccactcggccaacgcgttggacgcggcaaacgcgcacgtcctgaccaagccaacaacggatcacgacatctcagcatgcagcttctacatgcgtcgcacgcaccaagctgctgactgtgactaccacacaacgcacgccttcatgcacgtgcatgctaacaaacttgcactcgctccgtgcacgcacacgaacgcaacacacgctaaccacgacaacatgaagacacacgcacacacatcgacctaaccagcgcacacacacctagtgtcgagtttattcctaacaatctccccctaaactcggcactgcttcctgcactcacaggagcgtcacctcctcttcggcatcagcgaatagtgcctcctccttcctcggcttggggcagtcccgtgcgaagtggtcgcggttgccgcagttgaaacacttcccgatcgacgactttttcttttgtcgagccttccactcggcctccgtgagaaggagctggtcgtcgcgccgttcgccgccagcacgagtgcgccgccgggaacgcttgtcgaacgccttcagtctgccgagcgcctcctcgaacgccatcgtctcgacgtcgcagaactgctcgatgcccgcgacggcggggaagagccgatccaggacggtgtcgaggagctttttcaccatggcagcgtcgtcgagcgtcacgccaagcccgacgtaacgcgctgccataccgctgattttgctggcgtagtcgtccaatgcctcaccgtcctccatgtacagcttgttaaactcccccttgagcgtggcgaggcgtgccgtcttgacccgatccgccccgacgaaacgagtcttgaggctcgcccacacctccgcgccgttttcttggtggagacatgcatcaagatgtcaccgggtagagcttggagaagctgtgcccgcgtcgtcttgttcttcaccgcgttcacctcgccattatctggtggagacacggcctcccagagaccttgcgcgtcgaggatcgactccaccttgatcgcccacgccgtgtagctcgccgacgacagcaccgggtatgacatggagaccgaactccccccccccccccggcgccgtgcggaaccatcaccatagcttcggactttaggtagtagtgcaggatcttgggcataaaatggctctgataccaattgttggaactccgaagctatcaagactagaactcacaccagaaagaaaagtagctaccaagacacaagcaaatacggcgccgaacgcctgacgcacagacgtcgtttttttattgctttgccgtgactttatctgttaacagtacatggagtatttata

SEQ ID NO: 1886 - DNA, 7318 bp, Zea Mays
ggggttgttaagaagcttttttattcacaaaaatatgtaaaagaaggagttcatcaagcagtttgctgagatttcatcaataaaccaacgaattttgttatccggtccagcaggtacttactttgtctctgtttggagacccgtacttcctttgttgtttaccttttccagttgatttgtaatgctagtggccatacttgtttgataattatccaacttcatgtgcttatgtatttctctaattttttgtggcaatgcatttaggttctgagatttatcaggaaaattggtaaaggcacttgcgaaacattttggtgctagacttcttgtcgtggattcacttttgctaccttgggggaccaagttatggttatcgaggcagagtgaagcactagatctaaggtgtgtttgaatgcactagatctaatatgtagttggctaaaaaattactagtagagttagctagctaacaaatagatatctaactattagctaatttgcaaaaagtagctaatagttgaattaatagttatgttgtttggatgtctttagctaattttaacagctaactattagttctagtgcattcaaacacccctccctaaatgcatttcatcttgcatttgcatacttctctcaggtcaacagacttgacacgaaggagcagtgtgtatgttcataggagctgttgttctggacatggttttggagtctgtagcagctttagaacattcgcacacctgattgcgatgaattcgtagaaatgcttttaaaacttgattactggtctaaactggctaggccccgtccgaatgtcatcacataacaacagtatggtggccaaatcacaagcttttacacgtatagtatagtgtgtttcatctttacaagatcctttcccttttccttttcacccatatcaccccaacccacctacgctacattacatttcctgctataccaacaatctgtatacaattgaaaaactacaggctactacaacccaatgcttcctttcaggcacatatgtaacacatatataatcatctgaggtactctcttccgttccaaattataaaacgttttgggtatatatctaaacacatatcttatatttagtatagcaaaggccatggatttagaaaaaccaaaaaggtacatgcatctgttggcttgcttttgtattgactatcctgtgaaatcagatattcttttcccatatcacattttttgtagcaccatatctgttgatgagttgactaaagaacatgaggagctaaagtgctcccatgttgatttggcccaaaggtatgaaactatttcaattgagcttgataactctttacattgtatcgctcaattagtaaataggaatgccttgcttaaggaccaagtagaaaagctaaaagttgaaaatctagcttttcaagaaaaatatgatatgcttctatgttctcatgaaaatcttatggataatcatatcatgttaaatattgctcatgaggttgtgatagaaaacttaaaatcctaacaacctcactcatgcacatgtattcaaattaaaactattttaccatgtgctaatgcttgttgtccgtcgacaagcaaatcctcctttgagctagaatttctaggaacaaaagatgatacatgtcaagagctcaaagaagaaaatgcgaggctaaaaatgagcttgacacaactaaaagggaagtgcactgctcaaccttctcaagataaccgtgatcacatggtgaagaagcttgagatgggaacaaccgtggcatgcactaaatcccttgaagaaaatgtcaaggacttgaggattgccaagaggaaggaacaaaagaagaaaatcaatacctctgccaaaagcctcaaccgtgcctccatgcaagatcaagccacacttcacactaagagaagtaaaaagtgtagtgaatgatttgaaaagggacactcgattaggtcatgtccctatattaaaaatggcttgattattaacaaggatgataaactttgttttaaatgctcaaagaaaggacacttaataaagtcttgtccctatttgaaacaaaaaggcatagtgttagaaaagaaagtattaactaaccatgtagcaagcaagaaacaaggaaagaagaaatcttcaagacttgaagatcgcctttgctacatatgtcaaaagaagggacatcaatgcaaggattgtcccattggtaactatctcacttctagcttgtcaattatttcacatgtaactaggcaacccaaaattgcaacttgtgatagaaaggtaatgagtttaccacgtgctaacacaaaggacttttgagttcctagatctttgttgactaaccttgatggacccatcaagagatgggtaccaaaatatgcttgacaagctttgcaggagaaggagatgatatgaagctttggggtgcttgagagagtcaattcaatccttattaactcaagctatcaatcttacaaatgatcaatatatccaagattgacccaaagttattttgaattggtatatctaaaactcatatcatctcgaggaagatattaatgttgtaggaaataaagaattatcctgtgcggaaaatcaaggcctacaacatggaggaaagccaaaggatggtaacatttatgcctttaagtgcaagtatcttaaattatcatttcttatgtgtcttgtgtagtcacatagaaaaaggaagcgcttcaaatgttttcaaattatgtcaccattctttgaagaaattcctctcatatggtagattgcatattcatcatttctatactatggcaatctacatgctttaaattattgtaagtacgtcatggcatgtcttacactaattatcatattatagccatgttctagatatagagagatattccaagttcttaaaagaataaggtgtcatgtaaggaatccaaatccttaggacacttataaagggaatctctctttatatctagaatcgtgagactaatgtttttgtctaaataatctaaatagtctcacatgtagagaataagtttctctatgaaaatgtgtaatccaacatgtcaaagaaaatcaatccaatgctttatgttgtatttcttcttgcttaaattggatatgattcttctacattcatcgctccccatgttatgaattagatttgttcccataaccttaaagaattaactatgcttgttttataagttaaaactaagcatacatcatggaataatctagttcatattataaagtttccatgctttagtaatccacttttcattccgtatcaaaatgattacaaaaagagaaactagtgcttgtgttactaatgacatatctcttgagcttacttatggaaatctacaagagagtaagtgcaagccacaagcctcaagggttgctcttcacccaaaggaagaaaggtaaaagcaaaggtatgggaactcatcttcttatcaaatatagttcccatcaatggttatttactctaaattatcatattctacctatgtgaagaataaattctttattggacttaaatcagctagatgtgcattcaatctcgttctcataaatgcacttgcccattagaatctaattcatgcatctgctatatctgttctcatattgatatgctttaaagttatgataataaattcaatatgaaagaagtaaatttcctatgattgatcaaaatgtttaaaaggtgcgtattcctcttttataatgatatgcactaatgctaaggattttacttcatgtctgtgtgacgaatggatgatgaattgtttatatttcttaataaaatcatccttcataatatactcccttgtgctattaacatctttcttgagtattttcaataagtttggaaggaaaaagagacaactacaaagggatgacactcaaatgaaagaagaagacatcaagaacaacaacacctacttggacaataaggtcttcaaaacaatcaatggtgtggttgtaagcattctaaatctttttcattatgagaacactaggcataagttgtttattgcaaattttataagccttgatcaagatgaataatgtttctccctatttgtctttaagaatgcatatctttagggggagcctatttctatatcttgattatgttgagactaacactttatcttagcaatctcatatagtctcaagtatgagaacaagtttctcatgaagtatgctactacatttcaatccaacttggtaaagtaatgtcatctttatcaaaaattgtaactttcactgttaaagtagcatatttactggattctcctggtttaagcttgtttgataaactaatgcatatgttgttcttttgatcgcatatgttatttgcttgatcattgaataacttcaattatcacttatgtttcttagtgcctcatataatttcaatcgatatctctcttgatatgcactaagttaaaaggagaattcatgatacatttatgcaatttgtgatctacttgatatataataacaatgacttagaaaaggatcactagttgtagaaccctctcttgtgcaaaatatttccatacactatcttgaatataggtcttaagtaactaagactaaggacaaagcacaatgaagagagcatctctatgtgaaggtacaaaagggtaaactacttcctctcatttacacatgtacctaaatcttcctcttctatacattccttgcatatcttgtataaaaggaagagaaagcatgtctatgcatatccctgcttcatacctagtttaacctctcaaaaatttcattcctgcatttatgcatttttgttaaaactaggtgaagtgattttattgtcaaagatcttaaagcttaaccttgtaacgaggataagctacctttgtttcaaaggtggagggtccttaagtctctttgaaatcctgaagggtaattgcttaaaatgtttccaacatgctttcataagtgcataatctatcgtgagcatcacacttatgacacactgcacttcacagtttctatgatatagatatgttctcattaacctaattatgtgcacttggcatttaaggccaaaatctgtattcctctcaaggcacatatttagggggagcaatctatattatatagaactatttacgcttaattgacacatcctcttaatcatgtctctttcctttggtacatttgcatatttcctatctatcttgtgccaaggctaagactaatatgcttccatgagtatcttgtgtattaagtcttagattgaatgggaaatggagtattcggcaaagacatcgcttccactctacaccatcggtattatctacctttttgccgatattccgccatctctcaaaattggtataatctctcattcatacttacttgtaccaatgcgggagaaagtaaaaagggctctaaagactccgtttttggcgattaatgccaaagggggagagagtattagcccaaagcacaaggaccgcaccaccacgccaatttccaaattttttgaaacaaagttgttttcaattggtatctttgaaattagtattcctataagaaattctatctcaattgatatctatatcttaaagaggagtttttcaaattttggtatctaagatatttgatcttctttcaatttgtaaaacccctcttgaacctaagagggagttttgtttagtcaaaggaaaagcatttgaaacagggggaattttttttcaaatcttgaaaatgcttctcgaaatcttattcatatacctttgactatttgcaaaaagactttgaaaaagaatttccaaaaacatttgcaaaaacaaaacaagtggtgcaagcgtggtccaaaattttaaagaaagcaattcatgcatatattatgaaagtataaattggtttaattccaagcaacctttgcacttaccttatgcaaactagttcaattctgcacttatatatttgctttggtttgtgttggcaatcaatcaccaaaaagggggagattgaaagggaaatagggtcaaaccttttcctaaatgattttggtggttgaattgcccaacacaaataattgaactaactagtttgctctagattatacattctacaggtgccaaaggttcaacacaaaccaataaaaagaacaagttagggttcaaaagaaatgagcaaaaaggaaactgaagtgttccatggtctggcgcaccgcactgtccggtgcaccaggggtcgtacattccaaactcctcagcttcgggtttcccaggcacagctccgctttaattcaccggactgtctggtgcaccagtggagcaatggctatctgcgcgcaatggtcaactctgatggatgaacagtgcaccacagtaacgcggcagaagtcagagcagaaggtcagaggggcaccggactgtccggtgtggcaccggactatccggtgtggcaccggactgtccggtgtgggcccggactgtctgctgccgcatgaggacaaagcctccaacggtcgaccagctccagaccctaacgacagggtgacatggcggcgcaccagacactatccgatggcgcaccggactgtccggtgtgcccatcgccagcagccttctccaacggctacaatttggttggtggctataaataccaccccaaccggccacttcaaggtgtgggagcccaagcaacattccaagtcatatagttgacatatccaagccctcccaaccacctctattcattgatccatcctatacacgagatttagaccacttcaaccaacacaagtgccacaaaagagagagcaagcaaaagaaagcttctcgtgtgagtttagcaatagtgccttgtgagattcatcgagagaaagtgtgtgctacatcttgtgttcatttctgcgtggagttttgactcccattgaacttcctcaaagttttgggaggcttgtaaagctagcaagagacacctaagagtgtggtgatccttgcggggtcttaagtgacccttgagaaaaagaagagctcgccagtcttggtgatcggtggagagagggaaagggttgaaagagactcatccttagtggactcctcaacggggactaggccttcgagggccgaacctcggtaaaacaaatcacccgtgtcccttgtgtttattgcttgtgatttgtttgttctctccctttctaagttctcttgcgctactctttgctaatattattttgtgttgcttcaagttaaattctcatttagagaagcaactccttgcaagaaagaacttgtgtttatcctcttc

SEQ ID NO: 1887 - DNA, 7573 bp, Zea Mays
cgtcatttcacttgcttttctttctttcagttcatatgactaatacgatacaaatagattgattgaccataatgataaattgtttatatgcatagtgaaaattgaaagtcgcctagaggggggggtgaataggcgtaatctgaaatttacaactttaatcacacactacaagccggggttagtgttagaacaaataacaagtccgggagagagagggggaaagcaaatcaaatgaaaatcaagcggatgaacacaatgatttgttttaccgaggtttggttccaaagaacctagtccccattgaggaggtcacaaagaccgagtctattccaaccctttccctctctcaaacggtcacttagaccgagtgagccttcttccttaatctcacgggtcactaagaccccgcaaggaccaccacacacttggtgtctcttgcctcgcttacaaagctcttgagaataagaatgggaaaagaagaaagccaatccaagcgacaagaactcaaatgaacacaaaaatctctgtcacacaagccaccaagtgtttggagtgaatttgggactcgaagaggatttgacattttgtattgtgtcttggagtgaatgctagagctcttgtattgaatgtgatgttcagacaacttggatgcttggagttgtggtggttgggggtatttataaccctcaacgaccaacgtagctgttggggaggctgctggcgatgggcacaccggacagtccggtgcgccaccggacaagcactgtaggctgtccggtgcgctgccacgtcacccaaccgttagggttcggagctcgggcgaccgttggagctttgtcctcttgcggcaccggacagtccggtgccacacgggacagtccggtgcccctctaacttcgctgctctgacttctgtgtgacactgttgctcattgtagctcctgtcagagtcgactgttgcgtgctggatagtcgtttcccggtggcacaccggacagtccggtgacttatagcggagcgcgcccgcgttttcctgagagtagctggttagaccctatacggtcctggtgcaccgtacactgttcggtggcacaccagacagtcctgtgcgccagaccacagcacactcaagtccttttttgctccttttgaattgggtccctaacttgaatatttattggtttgtgttgaaccttatgcacctgtagaacatgtattctagagaaaactagttagtccatatatttgtgttggacattcaaccaccaaaattaattgtaggaaaaggttaaccctatttccctttcaatctccccctttttggtgattgatgccaacacaaaccaaagcaaatagataaagtgcagaaatgaactagtttgcataaggtaagtgcataggttacttggaattaaaccaattgataatcttactagatatgaatgaattgcttttcttttctttaacattttggaccacatttgcaccacctgttttgtttttgcaaattctttcggaaaatcttttcaaagtctttttgcaaatagtcaaaggtatatgaataagattgcaagaagcattttcaagatttgaaatttctcccctatttcaaatgcttttcctttgactaaacaaaactcccctgaatgaaattctcctcttagctttcaagagggttttaaaatagataccaatttaaagatgaacttctaaagataccaattgaaggggttttcatcatagataccaatgtgaaaaataccaatttaaaactttataccaattgaaattttgctttctcaagataagtgaagcatggataccaattgagaaattgccaaatatcaattaaagctttattttgaaaattttgaaatcatggtggtgcggtccttttgctttgggcttaatatttctccccgtttggtattaatcgccaaaaacggagatgttgagagccttttaatattttctccccattggtacaagtaaataagagtaaaggattatacaaatttgcagtgtgcggagtagcgacgaaggattaatgataccgttagagtggaagccttgtcttcgccaaatactccatttccctttcaatctacgacttagtatagaaatatacttgaaaacacattagtcgtagccttggtacataaataataagaaatatgcatttgtactaaatgaaagagacatgatcaaaggtatataaatgagctatgtgtgcaatgtttcattcaaaattccgagaatcaagtatatttagctcattccaaagtttgctaaaggttttctcatctaatggcttggtaaagatatcagctaattgattcttggtgtttacataagctattttgatatccccctttgttggtgatccctcagaaagtgataccgaatgtctatgtgcttagtgcggctgtgttcaacgggattatccgccatgcggattgcactctcattatcacataggagagggactttgctcaattgtagccatagtccctgagggtttgccttatctaaagtaattgcgcacaacaatggcctgtggcaatatactcagcctcggtggtggaaagagctactgagttttgtttctttgaaccccatgacaccagggatctccttagaaactgacaagtccctaatgtgctcttcctatcaatcttacaccctgcccaatcggcaccggaatatcctattaaatcaaaggtggatcccttggggtaccaaagcccaaacttaggagtgtaaactaagtatctcatgattcttttcacggccctaaggtgaacttccttaggatcggcctaaaatcttgcacacatgcatacagaaagcataatatctggtcgagatgcacataaatagagtaaagatcatatcatcgaccagtataccttttgatctacggatttacctctcgtgtcgaggttgagatgcccattggttcccatgggtgtcttgatgggtttgccatccttcatcccaaacttcttaagcatgtcttgaatgtactttgtttggctgatgaaggtgccctcttggagttgcttgatttgaaatccaaggaaatacttcaactcccccatcatagacatctcaaatttttgtatcatgatcctactaaactcttcacaagttgatttgttagtgaaagtcacctagaggggggtggataggcagaaactgaaatttataactttaaacacactaaaagccggggttagcgttagaacaaatatcaagtccaggagagaggggaaaacaaatcaactaagaaataaaacggatggacacggtgattttttttaccgaggtttgattctaaagaacctagtacccgttgaggtggtcacaaagaccgggtctctttcaaccctttccctatctcaaacggtcacttagactgagtgagctttcttccttgatttctcaggtcacttagaccccgcaaggaccaccacacgattggtgtctcttgcttcgcttacaaggctttgagaataagaatgagagaaagaagaaagccaaccaagcaacaagagcaacaaagaaacacaagaacgatcctctcttaagtcctaaagcactagaattgaattggagactttgattggatcggtggctttgatttgtgtcttggagtgttgcactttgctcttgtattgaatgaagtgtggtgaatgcttggatggttggagtggacgtagttgatgggtatttatagccctcaaccaccaaacaaccgttggggaggggctgctgtcgatgggcgcaccggagaggccggtgcgccaccagacactgtcgggtgcgctagccacgtcacccaaccaaccgttagggttcgggcgcagacgaccgttggaggctttgtcttctagtggcaccggacaggtactgttcattgtccggtgcgcctctgacggctgctctgctctgccgcgcactgtttgcgcactgttcatctcgaattcagcttttgcaggcgaccgttccgcgaagtagccgttgctccgctggtgcaccggacagtccggtgaattatagcggagcacgcccagaaaaacccgagggtggcgagtttggagttgtacggtcctggtgcaccagggcacccttggttcctttgctcctttaattttgaactctaactttgttcttttattggtttgtgttcaacctttatgcacctgtagaatatataatctagagcaaactagttagtccaatatttgtgttgggcatttcaaccaccaaaattaatactgggaaaaggttaaccctatttccctttcaatctccccctttttggtgattgatgccaacacaaactaaagcaaatatatataagtgcagaattgaactagtttgcataaggtgagtgcataggttacttagaattaaaccaaattatactttcactagatatgcatggtttgctttcttttatttaacattttggaccacacttgcaccacttgtttcgtttttgaaaattcttttggaaaatgtttttagtcaaaggtatatgaataagattgtaagaagcattttcaagatttcaaatttccccccctgtttcaaatgcttttcctttgactaaacaaaactccccctaatgaaattctcctcttagctttcaagagagttttaatagatatcaattggaaatatattgagatgttagttttgaaaatataccaattgaaggtaaacataccaatttgaaatatatcaattaaaatttttcgaaaggtggtgatgcggtccttttgcttttgggctaatactttctccccctttggcattaatcgccaaaaacggagacttttgtgagccctgtttactttctccccattggtacaagtagatacgagtgaaagattataccaatttggagagttatgtggagtgatggcgaagggtaagtgatatcagtagagtggagttgaagccttgtcttcgccgaagaactccatttccctttcaatctatgacttattgtaagaatatacttgaaaatacattagtcgtagcaaatcaaaggtatatcaatgagctatgtgtgcaaagtttcaatcaaaaatccgagaatcaagtatatttagctcattcctaagtttgctaaaggttttctcatctaatggcttggtaaagatatcagctaattgttctttggtgctaacataagctatctcgatatccccctttgttggtgatacctcaaaaagtgatatcgaatgtctatgtgcttagtgcggctgtgttcaacgggattatccgccatgcgaattgcactctcattgtcacataggagagggactttgctcaatttgtagccatagtccctgagggtttgcctcatccaaagtaattgcgcacaacaatggcctgcgacaatatactcggcttcggcggtagaaagagctatggagttttgtttctttgaagcccaagacaccagggatcttcgcagaaactgacaagtccctgatgtgctcttcctatcaattttacaacccgcccaatcagcatttgaatatcctattaaatcaaaagtggatcccttggggtaccaaagtacaaacttaggagtgtaaactaaatatctcatgattctttttacgaccctaaggtgaacttccttaggatcggcttggaaccttgcacacatgcatacagaaagcataatatctggtcgagatgcacacaaatagagtaaagatcctatcatcgaccgatatacattttgatatacggatttacctctcgtgtcgaggtcgagatgcccatttgttcccatgggtgtcttgatgggcttggcatccttcattccaaacttggtaagtatgtcttgtatgtattttgtttggctgatgaaggtgccatcttggagttgcttgacttgaaatcctaggaaatacttcaactcccccatcatagacatctcgaatttctgtatcatgatcctactaaactcttcacaagtagatttgttagtagacccaaatatgatatcatcaacataaatttggcatacaaacaaatcttttgcaatagttttagtaaagagtgtaggatcggcttttccgactttgaagccattagtgataagaaaatctcgaaggcattcataccatgctctcggggcttgcttgagcccataaagcgcctttgagagtttataaacatggttagggtactcactatcttcaaagctgggaggttgctcaacatagacctcttccttgattggtccattgaggaaggcacttttcacatccatttgataaagcttgaagccatggtaaagtagcataggcaagtaatatacgaatttgactcaagccctagctacggggtgcataggttttaccgaaatccaaacctacgacttgtgaataacccttggccacaagtcgggctttgttccttgtcaccacaccatgctcatcttgcttgttgcggaatacccatttggtacctacaacattttgattaggacgtggaactaaatgccatacctcattcctcgtgaagttgttgagctcctcttgcattgctaacacccaatccaaatcttttaatgcatcctccaccctgtatggctcaatagaggacacaaaagagtattgttcacaaaaatgagcgactcgagatcgagtagttaccccttatgaatgtcaccgagaattgagttcacggggtgatctctttaaatcccttggtggactcttgggtgtggcggtcgttgaccctgtatctcctgctcatcttccttgtcttcatctcccccttgatcattgtcctcctcttgaggtggctcatcctcctgatcttcattgtcttgagcctgttcctcatcttgagttggtggagatgcttgcatggaagatgacggttgatcttgtgcttgtgtgggctcttcgaattccttaggacacacatccccaatggacatgttccttagcgcgatgcacggagcctcttcatcatctaattcatcaagatcaacttgctccacttgggagccattagtctcatcaaacacaatgtcacaagaaacttcaactaatccagtggatttgttgaagactctatatatgcccttgtgtttgagtcataaccaagtaaaaagccttctacagccttcagagtaaatttagattttctacctcttttaataagaataaaacatttgctaccaaagactctaaaatatgaaacattgggctttttaccagtgaggagttcatatgatgtcttcttgaggattcggtgaagatataacctgttgatggagtagcaggcggtgttaatcgccttagcccaaaaccggtccggagtcttgtactcatcaagcatggtccttgccatgtctagtagagttctattcttcctctccactacaccattgtggtgtggagtgtagggagaagagacatcatgcttgatgccctcgtcctcaagaaagccttcgatttgagagttcttgaactccgttccattatcacttctaatctttttgattctcaatccgaactcattttgagcccatc

SEQ ID NO: 1888 - DNA, 9000 bp, Zea Mays
agtaagtttaacaagtatgaaacccttataaagggttatagactgttatagcttcagtaacatttataaccaaaatgaaacgagcacatctaacatcaactccatcagacaaaacattatcacctttgaactcataatcccataaacaccaaatgctttagccacttgcccagctctagcacagccatcaattaatgcactgtatgtgttaacatttggctctataccagcactgaccatctcataaaatacctgaaatttaaatatagagtgtcttttattaaattgtacaatgaaatcacctatatctaattatgtgatttagttacctcaaacatggcatcaacttttccacactttgcacaagttgatatcagcgttgtgtaaagtttacaatcaggttttagcccagcttcctttaggagctccataacttggagcgctcctatataaaggtaaaaacatttggttatgttccatgcttccatgccaactctggcacatctgacaggaaatgctaaaaacttcaaggttagagcagttaccgtcaaaatctagtgaactagcacacaccgacaaaagcatattgaaggtacttatcttggggttcccaataaatctgcaaaagcgaagagcttccaagacagctctttgcttcttacacatactgaaaaagctggcatggtgtatctaaaaacaaatggaaatcagtagtttaaagatatttataggaaaaagagtaaaccatccctctgaagtgtgtcaatatgaccttgaggcccccccatccctccaccctacacacacaaaaaaggagcctagttttggacgttgtactatcctagtgggcactaaattgctgaacatggcatcttggtagacagtggtcagcaccaaatatctactcctacctccatcatctcttcatcctattcaccatgaaaggcatgtaaaactccaccaccaggatgttccagagtagggcttgttcggttagctctcaatctatgtggattgagtgggattggatgggtttaaatcccaaacaaatcaaacttcttcttaattttttcctatctcatccaatccatgtgtattgggaataaccgaacaaggccttatggagtctgtgaaccaacaaaaatatatacgcaacccaacgaagatccggagctcgtatttccacatagtattgcttgtgtgtttgatgcccccccctgagcatcagcaagatcgtacaagataattaagatgatgttaagctatggggaatggtgggaccaaaggatcttcgacaactgtggcattaaattaagatgttgtaggagctgatgaccccccccccctccctctctttgtctcttcttttcgtttatctttttgtccctactcttcctgccttctagggaagtttgtactttggtctatcttagatatgggtgacaatgggctttaaattttacactataaaatttatggatcaggtcggattaggatcgagctctatttctattcatttttgaactacaaattatttagggccctaacaaattgtgaaggaacatttggatcgtgatccattaccacccctaatcttacacctttcttattcttcttaataccaaacctaatcccccatcccaaatagtatgcattgcacctggtatccccaaggccgaacccttcgctcaacaaaaaacaacacaatagcactcgtcagagcctaataagcggccaccactgagctctgtaggtagtggcaagctggcagcaaccaaataggcagaactgaggcaaggccaatcatgatgacacttagctcaagcaaaaaaaaagggcgtatccagtgtcgtaggctcaaacagagaaaaaagatatgaacgtaaaaagacaagaaagagaaaagagatgaaaaaaatagcctggcatgcagttctaaacatgttcctaattgagtttcttccattggaactgacttgttgccatgtcatgtaatcaagatgatttaggttcaggggattatttgttctagcatcaatagttgaaggatgaatactagacagttccatagtgaaggattagaattagagcaaggttatcaaagcgataaagcgttgaagcgctcatgagtacttcttaagtttaagtgttagacatatatggacattgctgtccatatatggacagacatatatggacattacagccatatatggacagcacagccgtgtgcagccatatatggacagcactgccgtatatagactagtatagactgattatagtcttccttgtataggcatatagctttccctgtttaggagattgtatacttgtactccaagttaccttggctatatatatgagagatcacccccctcattgggtgtggtgtcttcccaattctatctctctacatggtatcacgagtccagggtctccctgattttgtgccctccctcccgcttcctctaccaccaccatatgccgccgcctgacctagggcgcggcacctacctgcgccgcccctccctctgctgcgcagaagccttggatgtccacgatcacccacgtggactcctccgccggtgacagcgattccgactgctccgtcggattttctctcctgttcggcgacgacgttcttgctgcccagatccatctccccatggcgcttccctacgccacgatctctgtgcagtcctacgtccccatgaagctcgacctccacgcggacaacttctccaagtggaaggcctgcttcgaagccctgtgtggcaccttcgagctgctgtcccacatcgacgggacggcgcctcccaatcccctcacgccggtttggctccaggaggactgttgcgttcgtgcctggctctacggcaccgtctccgacgccgtccacgacctcatcatgacgcccgaaccgacggcacgcaagcattgggctatcatcaccgcccgcttcgaggtgaacaaggcgccgcgtgccatcttcttgagccaagccttcatgaccttgactcagggagatttaactgtcgaggcctatggccaggagatgaagagagcggctgatcgcctccgcgatgtcggcaagcccgtcgacgactccaccatggtgctcaacctcctccgcggcgccaatccccgcttcagcaccacctgcgacatcatcgctggtgacgccaccatggacttcgccggcgccctcgacatgctcgccctcaaggaactgcggctggctgaggagggcaagatggtcaagtccactgccctccacgtctcctccacatcctcctcgtcatcctccggctgcacaggcccctgccggtcctgtacgtcgtctccccagcagttttgggtgcagcaccagcagccggggaagcagcagcgcggcggcgggcagccaaagcgcaagaagacccattttcgcaagggcggtggcggcggcaaccaacagcagcagcagcaccgtgcgcccaaccccactggaccatggatttgcatcaatccgtggggccagcagcagggacaagccggcggcagcagcggtcctggaggtggcgggcagacatggcgcgctgcgaacagtggccagcagcgtggtggccccggccttctcgggtcctccccgcaggcccacactgcgatcagcgaccagcagtctgccggtccccactacttcgacacggcgggcctcatggcggcgctgcagcaaatgtcgctgcaaggtgacgcctgggtgatggacactggtgcctctacacatatgcactcctctgaaggtatccttcattctcatctcccagctgctgcttcttcgatcatggtaggcaatggtgcaagtattcctgtcacgacccgcggctcatcgatccttgacatcaactccactaaatttgtgttgaacaacatccttgtcgctccttccatagtccgtaatttattacttgttcgtcaatttacccgagataatggcggttctatcgaatttgacgcttttggtttctctgtcaaggaacccaagacggggcgagtgattcttcgctgcaatagctcaggcgatctctacacactttcaccagccgcccagtccactgccagcgccctcctcgcagcctcctcctcagtgtggcatcgtcgcctaggtcaccctggtccagcagtcttatctagtctcaagcggaaaaatttaatttcatgtaataaagtagaccagactctttgtcatgcctgtcaactaggcaaacatgcccgtctaccttttagtacatctacttcccacactgtttccccttttgagatagttcattgtgatgtctggacatcaccggttcctagtatatctggctgctcatattacttggttttactagatgacttcacacatttttgctggacatttccccttaagcacaagtctgaggtccgtcagcatattgctgattttattccttatgttcgcacacagtttagctacactattaaatgcttccaagctgataatgggacagaatttgttaaccatgccatggatgaactccttgctgcctatggcatcgtttttcacctttcttgtccccacacttcaccacagaatggcaaggctgaacgtattctccgtaccctcaacaactctgtgcgtaccatgctccttcatgcgtccatgccacccaagtattgggttgaggccctcgcagctgccacatacttgcttaaccgcagacctgcctcctccatacgccatgaggttccatacacccgtttgtacaatactcctccttcctatgagcacttgcgcgtctttggttgtctctgttatcctaacttacaggccacgtccccgcataaacttgcgccccgctctgccgcatgtgtcttcttagggtacccttctgctcacaaggggtatcgctgtctggatctttccacgcgccgcattattatttcccgtcatgttgtatttgatgagctcagttttccgttcgcacatgacccgcctactcccgctagctccttcgattttcttcttggtcgcgacttggatactgcgccttgtgttactgatcatgcagctagtgactcctcgtctggtgggcgtggacctgtgcccctacctggcatcttctcttctggtgggcgtggtttcgtacccccatccggcgcttcggatgctcctactccgggcgggtgtggtctcgtgcccccgtcaggatctctcgacgacacaggggtcgttgctcccagcggctctggatcaggggcttcgccgtcaacgccagcacccagtgcagccggcgccccctgctcctcccagccacctccggtccccgtccgcgaccactacatcgtctacagcaggcgaccaccgcctccagcgcctcaggctccagctgggcccccacctgcaccagcactgtcccgtcctgtgacgcgcacacagaccgggacgatccagcgtgtgtcgtacacaaacctgtctgccacgactccttcgccgatcccggcaaattaccgcagtgggctagcggaccccaactggcgtacagctatggccgacgaatacaaggcgctgatcgacaacgacacttggtgccttgtcccgcggccaccaggcgccaatgtggtctccgggaagtggatcttcaagcataagtaccactctgacggtactcttgctcgccacaaggcacgctgggtggtccggggcttctcccaacagcacggcatcgactacgatgagactttcagcccggtggtcaaaccgccgactattcgggctgttctgagcatcgccgcttcccgttcctggccgattcgccagctggacgtgaagaacgccttccttcacggtcaccttgaggagacagtctactgtcagcagccgcctggcttcgtcgatccagcggctcctgaccatgtttgtcttcttcagcgctccctctacggcctgaagcaggcaccgcgagcttggtaccagcggttcgcctcgtacattcgtcaactcgggttcactgcttccgtctccgacgtctcactctttgtgtacaaagagggtggggacatggcctacttgctgttgtacgtcgacgacatcatcctcaccgcctcttcgtcaactcttctccagcgcatcatcgacaggctccactccgagttcgccatgacagatcttggggatctccaccacttcctcaacatctccgtcgagcgcctccccaccgggatcttcctgtcccagcgacagtacgccgtcgaccttcttcagcgtgcaggcatggccgagtgtcactccacgacgacccctgtcgacactcatgccaagctctccgcgactgctggtgctccagtcgccgacccttccatgtacaggagcatcgtcggtgctctccagtacatcacgctgactcgacctgatttggcatacgcggttcagcaggtgtgccttttcatgcatgacccgcgcgagccacatctggccttgctcaaacggatcttgcgctacttgaagggcacgctttcctccggtcttcacctgggcgtcggccacatccagtctctcaccgcttactcggatgcggactgggctgggtgtcctgactcccgtcgctccacttcgggctactgcgtctacctcggcgataacctcatctcttggtcctccaagagacagactaccgtctcccggtccagcgcggaggctgagtaccgggcagtggcccacgctgttgctgagtgctgctggctgcggcagcttcttgcggaactccatgtgtcgattacttctgcgacggtcgtctactgcgacaacgtgagtgctgtctacatggcagccaatcccgttcaccaccgccgcaccaaacacatcgagatcgatattcacttcgtccgtgagaaggttgcccttggacaagtacgcgtgcttcatgtcccatcttctcatcagttcgcggacatcatgacgaaaggcttgcctgtacagctcttcaacgagttcaaatccagtctttgcgtccgggaccctcccgctgcgactgcgggcgggtgttagacatatatggacattacagccatatatggacagcacagccgtgtgcagccatatatggacagcactgccgtatatagactagtatagactgattatagtcttccttgtataggcatatagctttccctgtttaggagattgtatacttgtactccaagttaccttggctatatatatgagagatcacccccctcattgggtgtggtgtcttcccaattctatctctctacattaaggctagtttgggactgtctattttcccaaggggtttccattttcctaaggaaaattaatacattttcccttgggaaaatagaaatctcttgggaaaatggagttctcaaactagcctaaaatgtttaagcgagctttaaaacgtccttttaaacaacatgtacaaaatatgaatataacacaatttcacataacaatataacatgtccacaactgcttgccattttcagtctgcaaataaccaaaattagagcacatcaggggaggatgagagcagggacaaggaagaggctatagcagccaagcaggcagtgcaagcgcaacaagcggcgtcgagcagggactcggggccgagcgcgagcagggaggtagggcctggcgagttgacagagcagggaggcaaggaccggcaaactgacagagcagggagtcgaggaccggcgagctgacagagcaggtagcagcggcgccgagcgcgagcagggaggcagcggcgcgcagccgcgggggagaagggaattcgagcagcaacgcaaggaggggagggaggcggcgagctcaggcaaggttcttaccggccggcggcaaagcccagggatgccgaaggcgacgaatggacgaaggcaccgcgagtccatgacggctagctcaaggttgaacgaggttgcgggcgtgacaaaagaaggatgtttgttttaggttaggggaactgggctaggctggaagtctagaaaagtgacaaaaagtggccttttacggtccagagcgttttaacgctaaaaagtggcgctttagcgcttaaaatgggcgctatacgttatttcatgaaacgttaccatgctttacgttctgagtagcgctttagcacttaaaaggcacttaagcgcctttttaataaccatgaattagataaccttagaattggataatattgttgggacgaaggccgaaccaaacctcgatcacattctacattggccccacactgaccttgtctacgtatgcaggacaccaatacaatgcggacaagtcccaagaatgaggactacaccacgtatgtgaagtccccacttgcgtggtacggagggttcgcagaccccaatcgggttctgtggacaataggggcttgactcacaacggaggccccgggtaggaggggccaaaggcctgtaggacttcgctcttgtccgcccgtttgccctggaacagtcgatccaggccaaggaatggtcttgggcggggcgacgggtaactgctccccctcggtatcgcatcaggagacggacaactttgaaggcttcagggtgaaggtctccgagtcttgggaccgaaatactgtgtgcagctggcagaggcccaatggaccctctacatgcaaaatacccatgttcagtctgtgtacgagacacgcttaacaagacattcgagccacccagcttcccgttttgacgggacacgcttaacaagacattcgagccaccctgcttctcgttttgtcgtgcgttgtcgctctcacctgctcccgagtgattgggcccacgagtcaggacccaacaaatatatacttaatctgttataaaaggcctattgtaaaactcatgtagtcatgcccacaaaaaaatataaaaatgtcaaacactcagaaaaggtaatttaccttcctcatatcaagcagtccattttgttccatgctttctaacaaatccacgcagtcc

SEQ ID NO: 1889 - DNA, 11821 bp, Zea Mays
aataaataagacactcactgtcggggaccataattaggggtaccaccaagactcctaatctcagctggtaacccccatcagcacaaagctgcaaaggcctgatgggcgcgattccggtcaaggctccgtccacacgagggacacgatctcgtctcgcccgagcccagcctcgggcaggaacagtagaccaaggcagattcacgcctcgcccgagggtctcctcaagcaacggacgcaccttcgactcgcccgaagcccagctcgggcaggcttcgcggagaagcaaccttggccggatcgctacgccaaccgaccgtatcgcaggagcattcaatgcgaggatcgcctgacaccttatcctaacgtgcgctcttcagtcgacagagccgaagtgaccgcagtcacttcgccgctccactggccgacctgacaggaaaacagcgccgcctgcgctgctccgactgctgtgccactcgtcagggtgaggctgacagccgccaagatcgtcctcaggcgccataggaagctccacctcgcccgaccccagggctcggactcagcctcgacctcggaagacggactccgcctcgcccgaccccagggctcggactcagcctcgacctcggaagacggactccgcctcgcccgacccccggggctcggactctacctcgacctcggacgacggtctccgcctcgcccgacccccggggctcggactcaaccttgacctcggacgacagtctccgcctcgcccgacccctggggctcggactcaacctcgacctcggacgacagtctccgcctcgcccgacccctggggctcggactcaacctcgacctcggaggagcctccgcctcgcccgacctcgggctcggaccgaccacgtcacaaggggcgccatcattaccctacccctagctagctcaggctacggggaacaagaccggcgtcccatctggctcgccccggtaaacaagtgatgatggcaccccgcgtgctccatgacgacggcggctctcagccccttacggaagcaaggagacgtcagcaaggatccgacagccccgatagctgtacttccacagggctcaagcgctcctccggcggccacgacaccacatgaacagggcaccaaaacctctccgacagccacgacggcatgtacatagggctctggctcgcctttgctagacacgttagcacattgctacaccccccgttgtacacctgggccctctccttacatatataaaaggaaggtccagggctctcgtatgagaaggtggtcgcgcgggagaacgggctggcgcacaaggccctcgctctctctctctctcccacgcgaacgcttgtaaccccctactgctagcgcatccgccctgggcgcaggacaacacgaaggccgcggtttccccttactgttttccccccttgtgttccgtctcgcgccgacccatctgggctgggacacgcaacgacaatttactcgtcggtccagggaccccccggggtcgaaacgccgacagttggcgcgccaggtaggggcctgctgcgtgttgacgaacatcttcccgtcaagctccagatgggtagtctccaacaacctctccaacccgggacggtgctccatttcgggagtcttgagttcatgtccctcgacggcagctacgacatgatactccttcatccgccgcgcgacaacgacaatggcggccgtcagcccgcccgtcggcggcggaatcaacgacgtcttccccacgtggcggaagagcgacatccgggtctgtcccgtcaccttccccgctgacggaggaggaggcagggcaaccatggccatgcaggaggtggcacctcgtcggctgtcgagcgagtcgacggcgccgacgccccaacgggggacacgtcgggcgttgacctcgcgtctgagacgaagacgagcgtcgtttccccgcaacacgccaaccccaagcagacggatggcgccagcacgctcgcgaaggacttgctgggcgttagtctcgtacccgagataacggtgcagtccgtccccgacgcgacttcgtcaccatccgtcgatcaagaggtaccgtccgtttcccgtcctatgccttttagattcagcctcgacccaccaagcgaccccgctttggtggatgctttcataaaggcatatccaaaccctccggggtatcatatgcggtcaacctgggaccgactgacgactgtctcaacctacgggcccccgggttccaaggaagatgacgagcccgactctggttgggatttctccgggctcgataaccccagtgccatgcgggacttcatgaccgcatgtgactactgcctctctgattgctccgatagtagccacagcctcggcgacgaggactgtggcccaagtcgcgaatgtttccacgtcgatctagggggtctcgacgaaggcaaccatcttggtatgccggaggacggcgatcccctaggcctgcgcctcgcgttgacatccttcgggagctagctgtggtcccagtccctgcggggggtcaggacgcacagctcgagcaaatccgcgagatgcaggccaggctcgacgaggaagcaggacaacttgtgcagcttcggcaaaatatcgggcaggagtgggcaggccgagcaccggccggagaagcgtgtcatctggcccaagacgtctagcaccgcatcgccgacgatgccagggcaagactgcccccagcttccagtggggtcagccagaacctggctgcagcagcaatactactccgagcgatgccggaaccatccaccaccgaggggcggcgaatccagggagagctcaagaatctcctggaggatgccgcggtccgacgggccgaaagctctgcctcccgaaggcaagggtaccccccggagcgtcccaccacgacttcccgattcatgcgggaagcctcggtccacaccgggcgcacgcgggacacagcgcctgtggccccgggacgcctcggcaacgagcaccaccgccacgaccgtcgagcccacctcaacaaaaaggtgcgccgaggctaccaccccaggcgtgggggacgctacgacagcggggaggatcggagcccctcgcccaaaccaccggtccgcaagctttcagccgggccatacgacgggcgccgttcccgacccggttctgaaccccgactaccattaccaagtactcgggggagacaaggctggaactgtggctcgcggactaccggctggcctgccagctgggtggaatggacgatgacaacctcatcattcgcaacctccctctattcctctccgacgccgcctgagcctggctggagcatctgcctcctgtgcagatctcgaactgggacgacctggtcaaagctttcgccggcaacttccagggcacatacgtacaccctgggaactcctgggatctccgaagctgccgccagcagccgggagaatccctccgggactacatccggcgattttcgaagcagcgcaccgagctgcccaacatcaccgactcagatgtcatcggcgtgttcctcgccggcaccacttgccgtgacctggtgagcaagctgggttgcaagactcccaccagggcgagcgagctgatggacatcgccaccaagttcgcctcttgccaggaggcggtcgaggccatcttccggaagggcaagcagcctcaggggcgccaaccggaagaagtccccgaggcgtccgctcagcacggcaccaagaagaagggcaagaagaagtcgcaagcgaaacgtgacgccgccgacgcagatcttgtcgcccccgccgagcacaggaaccctcagaagccctctggaggcgccaacctgttcgacaagatgctcaaggagtcgtgcccctatcatcagggtcccatcaagcacacccttgaggagtgcgtcatgcttcggcgctacttccacaaggccgggccactggcggaagaaggcagagcccccaacaacgacaagaaggagggccacaaggcagaggagttccccgaggtccatgactacttcatgatctacggtgggcaagtggcgaacgcctcggctcgacaccgcaagcaagagcgctgggaggtctgctcggtgaaggtggcggcgccagtctacctagactggtccgacaagcccatcactttcgaccaaggcgaccatctcgaccgcgtgccgagcctgggaaagtacccgctcgttgtcgatcccgtcatcggcaacgtcaggcttaccaaggtcctcatggacggaggcagcagcctcaacatcatctatgccaagaccctcgggctcctgcagatcgatatgtcctcgatccgggtcggcgcggcgcctttccacgggatcatccccgggaaacgcgtccaaccccttgggcaactcgatctccccatctgcttcgggactccctccaacttccgaaaggaaaccctcacattcgaggtggtcgggttccgaggaacctatcacgcagtgctggggagaccatgctatgcccaagttcatggctgtccccaactacacctacctaaagctcaagatgccgggccccaacagggtcatcaccgtcggctccacgtaccgacacgcgtacgaatgcgacgtggagtgcgtggagtacgtcgatgccctcgccgaatctgaggccctcatcgccgacctggaaagcctctccatggaggcaccggatgcgaagcgccacgccggcaacttcgagccagcagaggcggttaagtccgtccctctcgaccccagcaacgacacctccaagcaagtccggatcggctccgagctcgatcccaaataggaagcagtgctcgtcgactttctccgcgcgaacgccgaggtttttgcgtggagtccctcggacatgcctggcataccgagggatgtcgccgagcactcgctggatatccgagctggagcccgacccatgaagcagcctctgcactgattcgacgaagaaaagcgcagagccataggcgaggagatccacaagctgatggctgcagggttcatcaaagaggtattccatcccgaatggctagccaaccctgtgcttgtgagaaagaaaggcaggaaatggcggatgtgtgtagactacactggtctaaacaaagcttgtccgaaggttccctacccgctgcctcgcatcgatcaaatcgtggattccactgctgggtgcgaaaccctatcgttcctcgatgcctactcagggtatcaccaaatcaggatgaaagagtccgaccagctcgcgacttctttcatcacaccctttggcatgtactgctacgttactatgccattcggtttgaggaatgcgggtgcgacataccaaaggtgcatgaaccacgtgttcggagagcatattggtcgaacggtcgaggcttacgtcgatgacatcatagtcaagacaaggaaagcctccgacctcctctccgaccttgaaacgacattcaagtgtctcaaggcgaaaggcgtaaaactcaatcccgagaagtgtgtcttcggagtcccccgaggcatgctcctggggttcatcgtctccgagcggggcatcgaggccaatccggagaaaatcgcggccatcaccaacatggggcctatcaaggacttgaaaggcatacagagggtcatgggatgccttgcggctctaagccgtttcatctcgcgcctcggcgaaagaggcctacctctgtaccgcctcttaaggaagaccgagcacttcacttggacccccgaggccgaggaagcccacgggaacctaaaggcgctccttacaagcgcgcccatcttggtgccccccgctgccggagaagccctcttgatctacgtcgccgctaccactcaggtggtcagcgccgcgatcgtggtcgagagacgagaagaagggcacgcattgcccgtctagaggccggtctacttcatcagtgaggtactgtccgagaccaaaatccgctacctgcaaattcagaagctactgtgcgcagtaattctgacgtggcgaaggttgcgacactacttcgggtctcatccggtgactgtggtgtcatccttccccctgggggagatcatccagtgccgagaggcctcgggtaggattgcaaagtgggcggtggagatcatgggcgagacaatctcgttcgcccctcggaaggcgatcaagtcccaagtccttgcagactttgtggctgaatgggtcgacacccagcttccagcagctccgatccaaccggaactctggaccatgtttttcgacgggtcgttgatgaaaacaggagcgggcgcgggcctgctcttcatctcacccctcgggaagcacctccgctatgtgctgcgccttcatttcccggcgtccaacaacgtggccgagtatgaggctctggttaacgggttgcgcatcgccatcgagctaggggtccgacgcctcgacgctcgtggcgactcgcagcttgtcatcgaccaagtcatgaagaactcccattgccgcgacccaaagatggaagcctactgcgatgaggttcggcgcctggaggacaagttctatgggctcgagctcaaccacatcgcccgacaatacaacgagactgcggacgagctgactaagatagcctcggggcgaacaacggttcccgcggacgtcttctcccgagacctacatcaaccctcagtcaagaccgacgacacgcccgagcacgagaaggcctcagctcagcccgaggcgccctcggctcggcctgaggcaccctcggcccccgagggtgaggcactgcgcgtcgaggaagagcggaatggggtcacgcctaatcgaaactggcagaccccgtacctgcaatatctccaccgaggagagctacccctcgacagaaccgaagctcggcgactggcgcggcgcgccaagtcgttcgtcttgctgggtgacggaaaggagctctaccaccgcagcacctcaggcatcctccagcgatgcatatccatcgccgaaggtcaggaactattgcaagaaatacactcagggcttgcggtcatcacgcagcacctcgggccctcgttggaaacgccttccgacagggtttctactggccaaccgcggtggccgacgccactaggattgtacgcaccttccaagggtgtcaattctacgcaaagcagactcacctgcccgctcaggctctacaaacaatacccatcacctggccgtttgctgtatggggtctggacctcgtcggtcccttgcagaaagcacccgggggctacacgcacctgctggtcgccatcgacaagttctccaagtggattgaggtccgacccctaaacagcatcaggtccgatcaggcggtggcgttcttcaccaacatcatccatcgcttcggggtcccgaactccatcatcaccgacaacggcacccagttcactggcagaaagttcctggacttctgtgaggaccaccacatccgggtggactgggccgccgtagctcaccccatgacgaatgggcaggtagagcgtgccaacgacatgattctgcaaggactcaagccacggatctacaacgacctcaacaaattcggcaggcaatggatgaaggaactccccacggtggtctggagtctaagaacgacgccaagccgagccacgggtttcacgccgttttttctagtctatggggtcgaggctatcttgcccactgacttataacacggatccccgaggacgagggcgtacaacgaccgaggcaactggaccaaccgagaagactcactggaccagctgaagaggctcgggacatggccttactacactcggcaaggtatcagcagtccctacgacgctaccacgcccgaggggttcggtcccgagacctccaagtgggggacttggtgcttcggctatgacaagacgcccgaggacgccacaagctcacgcctccctaggaagggccattcatcattgccaagattttgaagcccggaacatataagctggccaacagtcaaggcgaggtctacgacaacacttggaacatccgacagctacgtcgcttctacccttaagatgttttcaagtcgttcatatacctcgtttatatacgcaaataaagtctaaccatcaaggaagggtcagccttgactcagcaaagcccgaccctccctcgggggctagaaggggggaaccccctccgcgtcaaaattttcctcggaaaaagtctttctgccataacatctttcgtgctttttcgactgcttcgatagtgggatcctgaaaacgacagagtacacgtaagcggcaaggccgaccgagccgagggactcctacgcctccgggatacggatacctcactcatcaccttctgcgataagtaactcacgctcggataagcgattccgctggccgaacaagtcttaacgctcgaaagcttttctgccgaaacgatttttcgtgccttctcgactatatcgataacagaatctaacgaacgagtaagagtacacgtaagcggcaaggccgaccgagccgaggaactcccacgcctccgggatacggatacctcactcatcaccttccgtgaaaagtaactctcgctcggacaaacgattctgttaccgacaaataagtcctgatactcgaaacaaagggaaaagaaacacagctttacaacacgacgacggtatgtttgggcctcgacggccgcaaaaaacatacgcacactacagataagctgttcctgcaggttcatacatcggtagggggagcagcagcaccctcgacgtcgactccaccttcggcggaatccgacccagcctcggatggcaacacggtcgaaggatctccgcctcgaaggaagacgtcggcaccgcgcctaggccatcgccgctagggcctcctccaggaacccagcccgagcagatggccggatcagccgctccgtagcctcagccagctgtcccccgaggacatcagcccggctcatggcctcggcaacccgactccagcgttggtctcgccagtggacggcccggccaggctccggtcgacgaagcttcttttcgagccaactccgccttcgtccatgctgataccactgcctccggctctggctcatcgcagagcggccgagggttcctttaactaagtaagagaagcctcgggcggcaaggccgaccgagccgagggactcctatgcctccgggatacggatacctcactcgtcaccttccgcacagggcaactcacacttggttaagcgattcagctagccgacatgcgagtcctagtgctcgaaatgaggaaaaacacggctttacgccaagatacattgatgttcaggccccgacagccacaatgaacaaacaccggcactcaaggtgccattacagatggaactccggttccacccccgcaggtacgaacaaccccccacattggagggcctgcgggacgacaaaatcccaggtggctcgccgccgcccactccggctcagctcgccctccgccccagcaaggatgatgaagatccttgaagctgtgggcggggcagaggccgcagctcggcttgcttctccccactatcaaactggtggtcaccgtcttgggtgaccacatgtaaggggatgcagccaggctgcctgatgaaaatccttgaagccgagcgatggctgaaaggtaccaacttccgcgaagttgtgttcctccaacgacagcaagacgaaaacgacgtgggcgctccccatctgggggctcggaaggtggaaggacgcgatgcatgaggggagtgcgaaggcatggctgccatccaagggggtcgccctctttttaaaggcgactctccccgctagcgtcctcaggcatcgcggactgagccttcaccaacacgctccaaggtcttccccctacgacacgggggctgggtcccacgtgtcatgcaaactggcccaggacagaagaggccaaactgccgcgcccggtgcgcgtaactgcccagcggttacaagcactcctccactttcgcccagaccagcggtgaaagggcggatcgccatgcaggcggcatgcaactgcaccaagggggcgcacactttcgactccgacacgtccagcatggaggcccaggcccacacgtcatgtaaccggcgcgccggttactacgtgcgagaaactgcaccgccacttgcgccagtaccacgccttctcgactgtggaaccggtgccgcgactcgaggcaaccctgcgcatggcgcaacagtgccaaccgagcacatcggtcacgggtcagtcagccgcgagagaaggcgtgacggtcgatatggccaaaagtggaccggcagtaatggcggcggcaggcggacggaagcagcagtcaaatcgtctgcaagctcacgtcccctcctggagcagcaggagagccctctcccacggcgtgaagacgacgcgctcgtgttccgttcctcgaacggcccgcgcacgcacaacggctgccccgtgaaccactcgtcccgtcgcattaactctgcagcagggcaggcgacacctttggcaggtaaagagggcgacgcttcacatccgccataatgaccgcgtcaaaaaaggtgcgccacgtcgttcaatttcgtatccttttcctcttcccctttctctctcttgctacagggactaggaaaggggatactccgaaagggatccttctccgtgaaggaagcgggcccctcggaagggttcgacagccgcctcagagcactcgggctccgctcccactactggtcagaggtttgaaggctggcccctcagaagggttcgacagccgcctcaggccactcgggctccgcgcccactactgatcaggggttcgtaggctggcccccaaagggttcgatagccgcctcagagcacacagagcgagggatgactctggtacgtccgatacatggccgaggctcgggctacgctcccggggtaccctaggacatttccgagaccagcaggagcgattctgtaacggaatcccaccagagggaggcatcgagccctcggaccctatcaaacgggaccggtgtggcggaaccgcccgaattattctagcttaagtgcccaagtcgcactcttaagggcagcgacacacttaaacaggaataacccgtcagtccctcggatctagtccgataaagccacttaccaggatcgaataccactagctcacacgaaggtgaggcacagagaaatacaataaaacataataccacaaatttaataagtatcattagtgattacattatcggagtttcagaaataataaacataaattttaatgcagcggaaataactaacgaagaagaaccgagtaacatggcgaagcctggccacactactcctcctggtcctctcccgcggaagcaaaacccactcgaccatctatcccggtggcagggatgaaggctaagtcacaccagcaaccaatcatcctaaggagtacctgcaaaaaattgtgccacaagcaaggctgagtatactaatactcagctagacttacccggtgtgaggagtctactcctctacctctagacatgcagctgtttggctgtggggtttggttgccaaaagcactagccgagtctaaaaatcaagttttagcttttcaagttttagtatgatccttttaactagatgtgtacctagctagtcatacatggtatcaaacattttatcaatccacatcttttgccagtcacctcatttccacttattactcaatgcagtacaatggatcaagcagtctcattagctgcgagaagcagac

SEQ ID NO: 1890 - DNA, 17325 bp, Zea Mays
gccacgagcactctgggtgcaggcactatcgtcatcatgtgaaggccctcatcctcgtcaccctcgatcaggatgtgatcaactacactaagtggcatggcatgttccttattgctctaggaaaatatgccctaactcgccacattttttaggatgaggctttcccctcgtgtccaacatgggtacaggcggacaactacatagtgacatggatctacgacactgtctcaagcgacctccagaagttcatgatgatgtggcaacgtcctgctcacggggttggtgctacccaaatgagtcccatgcactcctcctaaagaagtagttctggaacctttgacaagattctctaagcatcatcgactactaccgccgtctcaaattgatggttgcctccctcgccgaattcagagaccccatcaaggatcaatagatggtgctcatgctccttcgtggcctcagccacatggtgtccatcctcaagctacaccagcctttgctgacattcgtgcatgcctagacacacctcatcgatgcccgtccaccatccatgtcgtccgcactcgttgttgtggcaccttgtctagttgattcctcgctagtgcctcctactacacgccctcttgctcctagtggtggccagctcaccaaccgtcatcatggccatgacagtgctatccccagcgtccggccatccttctagcaccagtggtatggcatagtgcgaatgcggccctatggccagtttggggtcctccatcgcctccacctgcattcagctgtgcccatgcatggtaattttggtggtgttcctgcacatatggcagcacctaaaaccctcaacctccttagtacatcgtgtatgacgagggaggtacatctttgggcttctaggcaccctcactaggctaccagatccttccagctgcgccctagaaccctactcacggtggatcatggcattaggagtccctcatgcactctttcaacaccatgactctaaactcgctagcttcttcctccgagtggtatgctgattccggtgcaagttcctacatgacaacaaacactggtaaaatctccactatttcgccaccatcttgattcactcctccatctatcaatgtggtcaatggtgtttgtcttcctatcactactactagatcacacacttttactttaccacatcacaatcttgttcttaacaatgttttggtgtctcccaacattactaagaatctgatttcaattcatcgtttcgccatcgatagtaattgcttcattgagtttgatactattggccattctgtgaaggacttgcatactaggcatgtgatcgtcaggtgtaatagcctgggtgacctctacccattctatctaccacccactagcgcctccgcattcatctctgcactcacctccctttggcatcatcgtctcgggcatcttggtcgtgaagctttgtccaagctcctaagtttcagtgtcatttcttgtcataaatatgatatcaaccatatatgtcatgcatgccaactcggtcgccatatatgtttacctttcggttcatctagcttttgaggtattcataagttcgatttaatccaccgtgatccttggacatctcccattgttagtgtatctagataaaaatattacctttttattgttgatgattgttcacacaacatttggacgtttccactccgtttagaatcagagacattttccactctttctatttttttatattcgcacacaattgggcaccacgataaagagcgtctagtgcgataatggtcatgaatttgataattgttaggcccacacaaattttctctcccatggtattacactccacatattgtgtccatatacttctcaacaaaatggcaaagcagaatgttcccttcgcaccatcaataacattttgtgtcccctcttgttttaggcaagtctccctccggtctaatgggttgatgcccttcacactgtgacatatcttgtgaatcggctccccactaaaacacacgccttctcgacaccacatacctccctctacaacacccaaccctcctatggtcatcttcgagtttttgggtgcacttgttatcccaacatatcctccacaacgcctcagaaactcgccccgcctatgcgtctttctcggctattcctctcaacacaaatgctatcggtgtctcgagcttcagtcgatctacatcatcgtttctatacatgttgttttttatgaatctttctttcctttatctgacatgtctaccacactcatggctccttttgccctaaattttttaaccaaagctaaatatcgagttgtggttagtggcattggtgaagctacatggctgcgccaattgctcatagagcttcgtcacccgcctcgttgtgcctgatggaataagtcttgagcatctagaggacaacataagctttttgactatcctctttagtctctttagcatctagaggatagcaggagctttttgactgtcctctttagtctctttagcatctagagaacagcaggagctttttgattgtcctctttagtctcttttagcttttagcatctagaggacaatcttgttgtgtagtgtgttgtgtagtgtggtagtgcagcctctagggctataaatatgtgtctccaacccttagatgggtatgacatttgagtagagtgtgagaaataaacgaaaattgccccaactcgtagtgtcatcctctgaatgagagttagagtccctctacttacaattggtatcaaagtcaaactatcttgcagcctaaacacctcttgctcatctccttcccgcgcctctctccacactcagtctgcagcaagagctccaattgttccttcctctcctgctcagacgagcagcctttcatctcagacaggcttttccacatgcagcgacccctcactagcccaccatgtccctacgcttggtcgcttcgagtgcgcggcgccagcaggaggccgaggtcgccgcggcacaagaacgcgacctcattgctgcagtcccgcccgagctagatgccctcattgctgcagtcccgcccgagatgcaattttcgctttcccagaagcggactgccaaggaagcctgggacgccatcgctgcgacccgcatcgctagcgaccgtgcccgcaagaccacgctgcagacacttcgcaaggagtgggagaacctggccttcaagccaggtgaggatgttgatgactttgctcttcgcctcaacactctgttgcagaagatggtgaagttcggcgacgacacctacgatgaggagagagtcgtcgaatgatagaataagtcatgtggtctctgttttgtggtgaacaggacagcagcacagcagtacaggactgcagcacaacaacaccttttgactgctgcagcacagcagcagtgcagttggagacagtcaccttttgactgctgcagcacagcagcagtgcggttgagtgcagttggagacagtcagtcaccttttgactgctgcagcacagcagcaccttttgactgttgtagcagtagatggcagttgcagtttttgactgcactttagcagtagctggcagttgcagtttttgactgcacactttagcactttagtatctagaggacagcatctgtgtgctgcggtgtgtagtgtgtagtgcagcccctagggctataaatatgtgtccccaacccctctaagggtatggcattgtgtagtgtttgaggaaataaacagaaaattgccccaactcatagtgtcatcctcttgatgagagttagagtccctctacttacaattggtatcaaagccaaactatcctgtagcctaaacatctcttgcttatctccttcccgcgcctctccccacactcagtcagcagcaagagctccaactgttccttcctctcctgttcagacgagcaacctttcgtctgagacagcctcttccacacgcagcgacccctcactagctcaccatgtccctacgctcggtcacttcgagtgcgcggcgccagcaggaagccgaggtcgccgcggcacaagaacgagagcgagcagcagcagtggcgagggcagcacggctagcggcagcggaactggcagcagcgagagcggaagtagaagcagcggaggcggcggatgctgcacgtgcggcggcagcagagctcgaggttctgcgcggcagtagagctggcagctctgcttctgttgacggcaacaccgatgaagagctcaggctggcgagggaagcagcgcgagagcaggctgcacagtgggcagccgcgcacccccatgggggcgcgcgtggcggcagcccagataggcgctgacgcgctgacggcgctctgggcgagggcgcacgcggcggcagcccagacgggcgtagacgcgccggcagtgctcccggcggtggcgaccgggtcgacggagatcgcggcctctacaggcggcgcgactctccctccccggatcggtaccatggtcgccgcatggcccaggccattgtcagggacatcggtcccggcggtgggtggcctaccctcaccaagaccaactacgtcgagtgggccgcggtgatgagggtacggcttcaggttcgccaaatgtgggaagcagtttggtacgacgacgtcgactaccacgaggatcggcgggcgttggatgccctcattgctgcagtcccgtccgagatgcagttttcgctttcccagaagcggactgccaaggaggcctgggacgccatcgctgcgacccgcatcggcagcgaccgtacccgcaagaccacactgcaggcacttcgcaaggagtgggagaacctggccttcaagccaggtgaggatgttgatgactttgctctccgcctcaacactctgttgcagaagatggtgcagttcggcgacgacacctgcgatgaggagagagctgttgagaagctcttccgttgcatccccgagaagtacaagcagatcgctcgctcgatcgagtctctgctagacctctccacgatgacgatcgaagaggcgataggtcgtctcaaggtggtcgacggcgacgaaccacaggctccctctggccctatcactattggcgggaagctacatctcactcgggagcagtgggaggcctgccagggtgaccagaagaagggggagtcctcctcgacacgaggccgcaaacgcggcaagccgcgcaaggcgcgtggaggcgcccaggccggggcgcgaggacatgctgagggcggtgctcgtggaggtgcccaaggcggcgccgtcggcaacaagaagccggcacgagacgacggctgtcacaactgcggcaagcttggccactgggccagggactgtcggcagccacgacgtggtcaggccaacgtcgcacaggcggaggcggaggaggagtccctgctcctggcacatgcaagcatcgagatatctccagcggcaccggccgcagcggcactccaccttgatgagtcgaaagcacgcgctttcctcggcgacggctccaacaaggacatgatcgaagggtggtgcctcgacaccggcgccactcatcacatgaccggccgacaggagttcttcaccgagcttgactctagcgtccgaggctccgtcaagtttggggacgcctccggcgtagagatcaagggcgccggctcagtcgtcttcaccgccgcatctggtgagcacaggctgctcaccggagtctactacatccccgcgttgaggaactctatcatcagcttgggacagctggatgagaatggttcgcgcgtggaggtcgagcacggagtcatgaggatctgggacccctctcgtcgccttcttgccaaggtacgcaggagtccaaatcggctatacatcctcaatgtgaaggtggcacaaccttgctgccttgctgctcgtcgagacgacggggcatggcagtggcacgagcgcttcgggcaccttaacttcgaggccccgaagcggctcagtgccaaggagatggtacgaggtctgccgtgccttgacaatgtggagcaattatgcgatgtctgcgtgttgacaaagcagagacggctcccctttccccagcagtcgagcttccgagccaaggagaggctcgagctcgtgcatggggacttgtgtggcccggtgacaccagccacaccaggaggacgacactacttcttgctgctcgtcgacaatctctcccgctacatgtgggtgatgatccttggcagcaagggagaggctgcgaacgccatcaggcgtgtgcaggtcgctgcggaggcggagtgcgggcgcaagctgcgcgtgctgcgcaccgacaacggcggcgaattcacggcggctgagttcgcgtcgtactgcgcggatgagggcgttcagcgccactactctgcgccgtacagcccgcagcagaacagcgtcgtcgagcggcacaaccagacggttgtggggatgactcgggctctcctcaagcagagaggaatgccagctgtcttctggggagaggcggtggtgacagcggtctacatcctcaaccgctcgcccaccaaggcactcaacgggatgacaccgtacgaggcttggcatgggcgcaagccggcggtctctcacctacgggtcttcggctgcctcgcgttcaccaaggagcttggccacatcggcaagctcgacgacaggagcaccccgggggtgttcattggctacgcggagggctcgaaggcctaccgcatccttgacccaggaacacagcgtgtgcgcatggcgcgcgacgtagtgttcgacgaagggcgaggatgggcgtgggacaaggcggtggacgacggcacgactccgacgtacgacgacttcaccatcgagtacgtccactttgagggagctgggggagtaggcaactcttctcctagcaggtctaccccagcccccaagtctccaccgactccaacgccacgctctccagctccggctacaacgagctcttcaccaccacgcactccagccacgactccggctacaccgagctcttcgccaccaggtactccagcaccgacggtaccctctccgggaacgtcctctccgacaccagctcgtgtcgagcacgacccagtggagctcgtgaccccgctctcccgcgacgaggagcgcgttgacgcgtgctacgacggcgagccgttgcggtatcgaagggtggagggccttctcatcgacccgtcggtgccgggccctgcgtctcgcattctggcaggagagttgcatcttgcatgcgacgacggtgagcctcggtctttcgcggaggccgagaaacatgcggcttggcgtgccgcgatgcagtcggagatggacgcggttgagacgaaacgcacttgggagctcgctgatctccctcatggtcatcgcgcgatcacccttaagtgggtgttcaaactgaagagggatgaagccggcgccatcgtcaagcataaggctcgcttggtggcacgcggtttcttgcagcaggaggggatcgacttcgacgatgccttcgcccctgtagcacggatggaatccgtgcgactcctcctcgcgctggcagccctggagggctggaatgttcatcacatggatgtcaagtcggcgtttcttaacggcgacttaaaggaggaggtctatgtacaccagccgccaggttttgcgatccctggcaaggagggcaaggtgttgcgcctgcgcaaggccctctacggcttgcgacaggcaccaagggcgtggaatgccaagctggattccacgctcaagaggatgggcttcatgccaagcccgcacgaggcgaccatctatcggcggggcaatggagaaaatgccctgctggtgggtgtctacgttgacgacttggtgatcaccggcgccaaggatgcagagatggcagcgttcaaggaagagatgaaggccaccttccaaatgagtgacctggggcatctctccttctacctggggattgaggtgcaccagggagactccgggatcacacttcgccagaccgcctacgccaagcgcattgttgagctggctgggctcaccgactgcaacccagctctcactccgatggaggagaggctgaagctgagtcgcgacagcacgacggaggaggtggacgctacacagtaccggcgtcttatggggagccttcgctacctcgtccacacacggcctgacttggcatactctgtcggctacgttagtcggtttctgcagcgaccgacgacagagcatgagcaggctgtgaagaggatcatccgctatgttgcggggactctcgaccacggtctctactacccgaggtgccctggggggcacaccttgtcgggtacagcgacagcgaccacgccggagacatcgacactagcaagagcacaagcgggatcctcttcttcctcggcaagtgcctcattagttggcagtcggtcaagcagcaggtggtggccatgtccagctgcgaggccgagtacatagcggcgtccactgcttcgactcaggcgctctggctagctcgactgctcggtgatctcctcgggagagacactggagcggtggaactcagggtggacagccagtccgctctgacattggccaagaaccccgtgttccatgaacggagcaagcacatccggatgagataccacttcatccgtgactgtttggcagaagggagcatccatgcgcgctacatcaacaccaaggatcagcttgcagacctgctcaccaagccccttgggaggatcaagttccttgagctttgttccaggtccgggatggctcaactttcccacaagacaacgcacaagacttagggggagaatgatagaataagtcatgtggtctctgttttgtggtgaacaggacagtagcacagcagtacaggactgcagcacaacagcaccttttgactgctgcagcacagcagcagtgcagttgagtgcagttggagacagtcaccttttgactgctgcagcacagcagcagtgcggttgagtgcagttggagacagtcagtcaccttttgactgctgcagcacagcagcaccttttgactgctgcagcagcaggacagtagcagtagatggcagttgcagtttttgactgcactttagcagtagctggcagttgcagtttttgactgcacactttagcactttagtatctagaggacagcatctgtgtgctgcggtgtgtagtgcagtgtagtgcagcccctagggctataaatatgtgtccccaacccctctaagggtatgacattgtgtagtgtttgaggaaataaacagaaaattgccccaactcatagtgtcaacctcttgatgagagttagagtccctctacttacatcgagaagctctttcgttcatccccgagaagtacaagcagatcgctcgctcaatcgagtctctgctagacctctccacgatgacgatcgaagaagcgattggtcgtctcaaggttgtcgacagcgacgaaccacaggccctctctgggcctatcaccatcgaagggaagctacatctcactcgggagcagtgggaggcctgccagggtgataagaagaagggggagtcctcgacacgaggccgcaaacgcggcaagccatgcaaggcgcgtggaggcgcccaggctggggcgcgaggacatgttgagggtggtgcccgtggaggtgcccaaggcggcgccgttggcaacaagaagccggcacgagacgacggctatcacaactgtggcaagcttggccactgggccagggactgtcgacagccacgacgtggccaggccaacgtcgcacaggcggaggcggaggaggaggctctgctcctagcacatgcaagcatcgagctatctccagcagcaccggccgcagcggcactcctccaccttgatgagtcgaaagcacgcgctttcctcagcgacggctgatcgaaggatggtgcctcgacaccggcgccactcatcacatgaccggccgacgggagttcttcaccgagcttgactctagcgtccgaggctccgtcaagtttggggacgcctccggcgtagagatcaagggcgtcggctcagtcgtcttcaccatcgcgtctggtgagcacaggctgctcaccggagtctactacatccccgcgttgaggaactctatcatcagcttgggacaactggaagagaacgattcgtgcgtggaggtcgagcacggagtcatgaggatctaggacccctctcgtcgccttcttgccaaggtacgcaggagtccaaatcagctatacatcctcaatgtgaaggtggcacaaccttgctgccttgttgctcgtcgagacgacggggcatggcagtggtacgagcgcttcgggcaccttaacttcgaggccctgaagcggctcagtgtcaaggagatggtacaaggcctgtcgtgccttgaccatgtggagcaattctgcgatgtctgcgtgttgacaaagcagagacggctcccctttccccagcagtcgagcttccgagccaaggagaggctcgagctcatgcatggggacttgtgtggcccggtgacaccaaccacaccaggaggacgacgctacttcttgctgctcgtcgacgatctatcccactacatgtgggtgatgatccttggtagcaaatgagaggtagcgaacgccatcgggcgtgtgcaggtcgctgcgaaggcagagtgcggccgcaagctgcgcgtgctgcgcaccgacaacggcggcgaattcacgacggctgagttcgcgtcatactgcgcggatgagggcgttcagcgccactacttcgcgtcgtacagcccgcagcagaatggcgtcgtcgagctgcgcaaccagacggttgtggggatggctcgggctctcctcaaacagaggggaatgtcggctgtcttctggggagaggcagtggtgacagcggtctacatcctcaaccgctcgcccaccaaggcactcaacgggatgacaccgcacgaggcttggcatggacgcaagccggcggtctctcacctacgggtcttcagctgcctcgcgttcaccaaggagcttggccacatcggcaagctcgacgacaggagcaccccaggggtgttcattggctacacggagggctcgaaggcctaccgcatccttgacccaggaacactgcgtgtgcgcacgacacgcgacgtagtgttcgatgaagggcgaggatgggcctgggacaaggcggtggacgacggcacgactccgacgtacgacgacttcaccatcgagtacgtccactttgagggagccgggagagtaggcaacctttcttcgagtaggcctactccagcccccaagtctccaccgactacaacgccatgctctccagctccggctactacgagctcttcgccaccacgccatccagccacgactccggctccagcgagctctgcgtcaccacgtactccagcaccgacggtaccctccccaggaacatcctctccgacgccagctcgtgtcgaacatgacccagtggagctcgtgaccccgctctcccacgacgaggagcgcgtcgacgcgtgctacgacggcgagccgttgcggtatcgaaaggtggagggccttctcatcgacccgtcggtgtcgggcccagcgtctcgcattttggcaggagagttgcatcttgcatgcgacgatggtgagcctcggtctttcgcggaggccgagaaacacgcagcttggcacgccgcgatgcagtcggagatggacgcggttgagacgaaccgcacctgggagctcgctgatctccctcatggtcatcgcgcgatcacccttaaatgggtgttcaaactgaagagggatgaagccggcgccatcgttaagcacaaggctcgcttggtggcacgtggtttcttacagcaggaggggatcgacttcgacgatgctttcgcccctgtggcacggatggaatccgtgcgactcctccttgcattgccagcccaggagggctggcacgttcatcacatggacgtcaagtcagtatttcttaacggcgacttaaaggaggaggtctacgaacaccagccgccaggttttgcgatccctggcaaggagggcaaggtgttgcgcctgcgcaaggctctctatggcctgcgataggcaccgagggtgtggaatgccaagctggattccatgctcaaaggaatgggcttcacgccaagcccgcacgaggcggccatctatcggcggggcaatggaggaagtgccctgctagtgggtgtctacgtcgacgacttggtgatcaccggcgccaaggatgcagaggtggcagcgttcaaggaagagatgaaggccaccttccaaatgagtgacctggggcatctctcctacctggggattgaggtgcaccagggagactccaggatcacacttcgccagaccacctacgtcaagcgcattgttgagctggctgggctcatcgactgcaacccagctctcactccgatggaggagaggctgaagctgagtcgcgatagcacgacggaggaggtggacgctacacagtaccggcgtcttgtggggagccttcgctacctcgtccacacacgacctgacttggcatactccgtcggctacgttagtcggtttctgcagcgaccgacgacggagcatgagcaggctgtgaagaggatcatccgctatgttgcggggactctcgaccacggtctctactacccgaggtgccctggggaggcacaccttgttgggtacagcgacagcgaccacgccggtggcatcgacactagcaagagcacaagcgagatcctcttcttcctcagcaagtgcctcattagctggcagtcggtcaagcagcaggtggtggcaatgtccagctgcgaggccaagtacatagcggtctccactgcttcgactcaggcgctctggctggctcgattgctcggtgatctcctcgggagagacactggagcggtggaactcagggtggacagccagtccgctctagcattggccaagaaccctgtgttcaatgaacggagcaagcacatctgggtgagataccacttcatccgagactgcttggcagaagggagcatcaagacgcgctacatcagcaccaaggatcagcttgcagacctgctcaccaagccccttgggaggatcaagtttcttgagctttgctccaggtccgggatggcccaactttcccacaagacgacgcccaagacttagggggggaatgatggaataagtcttgagcatctagaggacaacataagatttttgactgtcctctttagtctctttagcatctagaggatagcaggagctttttgactgccctctttagtctctttagcatctagaggacagcaggagctttttgactgtcctctttagtctcttttagcttttagcatctagagaacaatcctgttgtgtagtatgttgtgtagtgtgttgtgtagcctctagggctataaatatgtgtctccaacccttagatgggtatgacatttgagtagagtgtgagaaataaacgaaaattgccccaactcgtagtgtcatcctctgaataagagttagagtccctctacttacagtgtcaccctagtctactgtgataacattgatgttgtgtatctctctagcaacccagtgcagcattagcacacaaagcgtgttgagatagatcttcactttgtccaggagagggttgtcgtcggccacatttgcatacttcatgttcctacaacatcccagtacgctgatgtctttaccaaggctcttcctacctcattgttttaggagtttcgttctagcctgaacgttcgtcgtgctcctagtcatactatgggagagtgttagcacatattgtatttattgtagtcacccattaattgtggttgtaatcttgcttgtgtgattgggtgcatgtcatcccaacgcctatatgtgcctttgtacaacatatggaatacaatcaattattccctcaactcccacaaaaatgatttctactatcaaaattgatgaaaacgcagaagagagaagggtgatggttatgtagagatgatgacgcattgacgtaccggcttctactagttctacagtgttttgtcgctacggattacagctgcagcagtccaaatagtcggctttaatctgaagtgtgagcagcagctcccattaatttcgtggggttgactgcccttatccgaccccaggggtcggctgtgtccagccacctgggggggtcagcagggggtcttctacaaaaaggccaaaccagcccatttatgtgccagtggctgctctgtattccggggaaaacttctccagaatgcactagctcatttggggaaaaccaaagaagagagagctaggcttagagaggggagaggggagattgagaggcaccaatccacaaatttgagagagtggtttggggatctggagcctcccctcacttgttggctcccacctcgtgtaatcttcatcttcatagtggagttcttgctcgtccctgtccgtgggttttctctcgcaaggagtttcccacgtaaatctctgtgtcttcacttgcttgggtattttacttgtcatatgtgctgattgctcatcatcttgcttgctattggagccatatctcaagttcctgttgtatggtcatgttggcatgggggcatatatgtgttcttggatatattggtgatctgttgatggggttgatgttgtggtgagctgattgcggcacatgtattgttgttgtactgctggacagcatgtggttgcttgatttgaagcttaggtacggtgcttcttttggttcattgtcacaaggtgttcggtgaaatatttgtgacagctgctgttctgtgcccgcttccgctgcgcgtagggatgacaatgggctctaaattttacactacaagatttaagaatcggatcagattaggatcgtgtcctatttctattcatttttgaactaaaaattatttagggtcctaccattttgtgaagaagcatttggatcacgatccattaccgcccctagctgcgcgccgaccctcacatgaagcgaacaactcctggctcttttttaatgcaggtgagttgttgccatttagctgggtataactacttgctttgcagaggttgggtttcgattcagttagatcttctgctggtccttgctgatatgtaaggtttttttgttctctcttggtactctctttcgatgtcctttagatactagctgctctgcgtgacaattaatcatccggagtgagagaaaggatcagggactataatttcggaccaaaatttctgattttttaaaaaattcttttctttcgatgggggtccgaaaaaacatttcagccaaatttgcctcccgctcaaatatgtaccaaaatggcaaaaaatcaatcaaaatgagttataaattgtgaattgtagtttaatttatagttttttatgtaattgtgatgttggatagcttagaaatagattacaggaagactgagtgggatgggttctttggccaacctcctcttctttgatgtttaatttgctctacgtcagaaaagaagattctagagaaaacttgacagcagcaaataaaaaaagtaaaatgcatcgaacttggcatattgtattacttaattcctcgtaatctaaaaaaaaagaaaacggatctatgaacttggttggccatccaaaaccggatttactcaaacttgtctagtgtcgtaagtcacggtggtatccggtttaagcaaatctagttttagataatcgactacgtacgaggaccggttttgctggtttaagagtttggagaacctaaacgctaagtttgagtacgactgatgcattttaagtcacggtggtatcctctttggttgtggagccgttttatggtctatctggagggctcggaatgactggtgctttggtaatagaactctttatgatccatctaatgtgcttttcatgtgctgcttttggctggactcttgggcaattcgacagaaaaagaaggaaaaaaggaaggtggagcaaggaagcagactcatcagaaagatggcaagtgaagtgatgtgtcgtgccttcgtctggtgtccgatggatcaccgaattgctggaagatgatctccatatctcattgtgatgttggcgcttcgctgattgcgtgttcttaagtcttttgctccttctggagttatgcgtcttgctgggatacttgttttgcctccacacgagtgctatcttgtaataagtggctccttgactttgtcgtgtatgtctgtttgcgctttaggtcgtttctttctctatcgagcgcgctcggtattgtttaggacaccttgttgccttgatcattcaggccagtggtttcttgtaaggtgacttttgttcctatttcctaatgaaatagggggttataccctattgtaaaaaaaactctaaagactagtttggaaaccccatttttctaagagatttctattttttatgggaaaataaattattttttcttgggaaatgaaaatctaatggagtttccaaactagctctaaacgatgatataccactcatagaatactagatgggaacggcgatggatatgatagggacggacgaaggagagaaatcaagttaattaagcttacttgactgcaaatgacgtactaatggcagccagacaccaaaagtcgatgagcttgagcgcggagacgaaaccaccaaggaggacaacggtggaccacgtcagcaacagatacgcgaggccggtggcgaccttccgtgcggcggactcaagcagcaggtaatcgttgatcagcctctcttccggcctccttgcgcgataactctcagcatcactatagttcttctccattaatctcgcccaccaccatctgctatcgcttcttctaggcccccctgctgcaatgggaggccgccgccgccctaggcctacgccggaggcggacgaggacgacggcatctgatccggtcgatcccgtgaacaagtgtgtgctatccgcccaacttgtggctgctctctgctctctgctctgagccctatattattcacaacagaggaactttcggcatctttggttggctggctggctaccatcctagacatattgagtttatttggttacctaaatgcttaaaccctagcgaggcctcagtaatgcataaaggagtgttagccggctcagttagcacattagactatcccctccagcaatttactcatggcaacgacggctatgcaagtagt

SEQ ID NO: 1891 - DNA, 4982 bp, Zea Mays
ccgcttcccgtcgccggctcccaaaaccctagcgcccacgccgcctcgatgtcgcctccgccggcggtggcgacgggcggttccggagaacccacggtgccggcgtggctccgcggcctcccgcgcgccccggagtaccgccccacggagtcggagttcgccgaccccatcgccttcctctcccgcgtggagcgcgaggccgccgcctacggcatctgcaaggtcatcccgccctacccgcgcccctcccgccgcttcgtcttcgcgcacctcaatcgctccctcgtctcctcctctgaagccgccaaccccaccactgcctccggctcctccgccactgccccctcgctgccggaatccgccgctgtgttcacgacccgtcaccaggagcttggcacgccgcggcgtgggcgaccgcctccgcaggtgctcaagcaggtgtggcagagcggcgagcggtacacgctcgaccagtttgaggccaagtcccgcgccttctccaagatccacctcgctgggcttcgcgagcctactccactagagtcccagcggcacaagaaacggagacgagagagcgatcaggtggaagagggggagaaaggctctgggtggcggctctcaggaagcccatggaacctccaggcgattgcgcgggctcctggttcgcttacgcgattcatgccagatgatgtgcctggggttacctcgccaatggtgtacatcgggatgctctttagttggtttgcatggcatgtagaagatcatgaattgcacagtctcaacttccttcacaccggtgcacccaagacatggtatgcagtccctggggaccgagcctcagagctcgaggaagttattcgtgtacatggatatggaggaaaccctgaccgccttggtatttgtcctttctcatgctcgccgtctgaatgtttcggttgtggtctagcaggtacaagctctgaaatggccagcgtttccattgggtcaaatgttcatgatattattcagacatcagattcttatgaattctttgctgatatgtactgtttcagctttattgaattgattgtgatgtgctatttgttaactatgtttattccagctttgctagattttcaccttcatggatttaattgtggtgaagctgccaactttgcaactccacaatggttaaaatttgctaaagaggctgccgtacgaagggctgtgatgaattatcttccgatgctctctcatcagcagcttctgtacttgctagcagtttcttttataaccagaaccccaaatgtattgtctggaattcgttctcgcttgagagatcggaaaaaagaagaaagagaactgctggtgaagcaggaattcttgcaggacatgattagtgaaaacaagcttttgtgttctttcctggaaaagaaatcaattcgtcatgttgtgctctgggagcctgacttgttaccatcttcgactgctctacattcctgttcttctggctcaaaagctcctgagaagaagtctgaggatggttgcagaattgaatctagtgaacgtggcaccaaagataacagctctgatggcagtgcacatatgattggcgcacaaactaaatttatgtccgggaatagcaaatcatctggaactgcatctgcttccatggatgaggtcaatgctgatactgatgatgaggatgacctaccttttgatttgagcattgattctgggtcattgacctgtgttgcttgtggaattcttggttatccattcatggcaattctgcaaccttcaagagaagtattggaagggatttcccttgctcacacgagtagatacaagatgagttctgaaaaagataattgttcaaacacaattccatgctgtcccactgacagtaagtttggatgttcatttgttcccagtagaccttcttggcctgcggaacagcaatgtctggctactcctttggggcaagctaacatcagtcatcagaataagtgaaaatactcttcattcatgtagtgacaggggaaaatccgagaataagatttctgaggacagtcttggcccagaagtaggtgaacaaacaggcaaatatgtcatcaatgcgcaagctgcagaaagttctgatggtactattaactggaatacttattgtacatttgcacggccccggatcttttgcctgcagcatgcccttgagattgaaaagttgcttgagggcaaaggcggtgtccatggtctcattatttgccactcagactttgtcaaactaaaagcacttgcaatatcagtagctgaggaaattgagtttcaatttgattgtacagacatttcacttgcaaaagcatcaaagtctgatttacatctgatcaatatttcaattgacgacgagggacatgaggaagatggaagagactggacgtcacagatgggtctaaacctgaaatattctgccaaactcaggaaagagaaatcagaaaatcaagaacagtctcctttgccatttgggggactgctttcctgcccttcgcctgtttcggttgttcctaatcttaagtggctttgcaaaagagcgcggacaccatacacagttattggtactatgaggggttctagtgcaacagcaactgctgcggaacttaagcctggagtgaaaacagaaatattcactaatggaaatgtttgcgaggatgacaatagacatcattcttttcgacaaactggcctcgagcaaccaggtggactgcaagattgtgataagccttcatgttccgaggagaatggccatggaagacattgtcttgttaacattcctatcgctgttgctgaatatcctatgatgcatcaagtccgtgagggtccagtgagtgttagcacgtgcaatgactccatttgtttgtcaggttccctggatttacctccacacgcctctccagttgaagtaactagatacctaggatgtatacagtcaactgagctgagcagtttaccagccttttctgttcaacatttctttaatgatgaaagtacctctgtggaaggaagcatagactgtgtaagcaatggctgcttagaatctcaggatgatattttagggagcagagatgaacgtttgcaagttcaacaatatcaagagaagatggggcttcgcaataaccccaatatgaagtcagttgattcacacctgatagaaggtttggctgtatcagaaggaaagcatggggaaactgtggcagcattccttgaaaacaaggagcgttgtgctaagacatcctactgttctaatactgaaacaaaaactactaaatctgcaatagacaatcgattggagactcatcatctgggtactggtccagtgaaactaaattcaagctttaatgagatgcacagtgctgatagacaatgcagtttagtctttggctgccttgactcagctgatgttcctgcttcaactcaggctctgtcagtttcacctgttttgatgagtgacgagcagcaggtcgatgacgcccattctgctgtcaaggccattgagcacctgggcaataatctggctaacataaagcacaaatccctgcatatggatgtcctcatgttagaggacgcccaagttgcttccatggctgcagtccctgggcatgagggagaatctgtcgaggctggatcaaattcttttgatattttacttggagctctggctgaagagtccaaggcagcagatgctcctgggaaagatgaagttggcaaagcttccttgacattaataacactggctagcaacgagccctctgttacagaaggcagagttgtagacgtggtggaaacagacacaattttgggagcaggaaaagatgataaacaacttgaccagccacatggcttccatttgtcagatctggtgtctagatgcatcgggagctcaaatagatccgatatcatatgctatgtcagacgcaaacacaaaaggaagagggattactcgtgtttcgtccgctctccctgtgagagcttgaggccaaggtccaagcctgcagtagtcgaggagtcggaatggagcagaacagccgaggcttcttttgctaaaaggggtaagaggacacaagcagtgggatcatttcagtgtgatattgatctgtgtgacatggcatttgagactagggccgaactcaatgcccacaagcgcaatatttgcactgacgagtcatgtggcaagcgtttcagctcacacaaatacttgaagcgacatcagtgtgtccacagcgagatgaggccatttaaatgcccctgggaaggttgtaaaatgaccttcaagtggttgtgggctcagactgagcatgtcagagtgcacactggagagcggccatacaagtgctcggctcctgactgcgggcagacattcagatacgtatcggattacagccggcacagaaagaaatttaaccattactgacagcttctagttttccgagttattggccgcagctcggggcaaatctccagctgcttgtgtcggtgggccttgtttgttgtagtagctcagctcacgtatttattaacaacctgacagctgataggcctagtgaatgttccccgttaacaatgggctagtaatttagtcggtgtaggagttagaaattgttggggggtgaagtgcaacccccttctgttggtgtaggtttgcataagctgatcaccccccactgacacgtggccattcattatttgtttctcagatcagtgatgatgtatttaatccctgatgacaaacttcatgaacactgaaaccatatgatgtcggatgtcaaaatgatcaggggttgccaccgtcctcatgtaattcctgtcttcgacacattgtccaggtcctcattattctgtcatactgtttcagcagattacttgtatgcctttgtctacgcgaaatctaatcatttttaaattcagcgagatgctgccatctatatgccactgtttcgcttagatttaac

SEQ ID NO: 1892 - DNA, 5021 bp, Zea Mays
atgtcgcctccgccggcggtggcgacgggcggttccggagaacccacggtgccggcgtggctccgcggcctcccgcgcgccccggagtaccgccccacggagtcggagttcgccgaccccatcgccttcctctcccgcgtggagcgcgaggccgccgcctacggcatctgcaaggtcatcccgccctacccgcgcccctcccgccgcttcgtcttcgcgcacctcaatcgctccctcgtctcctcctctgaagccgccaaccccaccactgcctccggctcctccgccactgccccctcgctgccggaatccgccgctgtgttcacgacccgtcaccaggagcttggcacgccgcggcgtgggcgaccgcctccgcaggtgctcaagcaggtgtggcagagcggcgagcggtacacgctcgaccagtttgaggccaagtcccgcgccttctccaagatccacctcgctgggcttcgcgagcctactccactagaggtggaatcccttttctggaaggcgtccgctgacaggcctatctatatcgagtatgcgaatgacgttccggggtctggctttgccgccccaaaacagtcccagcggcacaagaaacggagacgagagagcgatcaggtggaagagggggagaaaggctctgggtggcggctctcaggaagcccatggaacctccaggcgattgcgcgggctcctggttcgcttacgcgattcatgccagatgatgtgcctggggttacctcgccaatggtgtacatcgggatgctctttagttggtttgcatggcatgtagaagatcatgaattgcacagtctcaacttccttcacaccggtgcacccaagacatggtatgcagtccctggggaccgagcctcagagctcgaggaagttattcgtgtacatggatatggaggaaaccctgaccgccttggtatttgtcctttctcatgctcgccgtctgaatgtttcggttgtggtctagcaggtacaagctctgaaatggccagcgtttccattgggtcaaatgttcatgatattattcagacatcagattcttatgaattctttgctgatatgtactgtttcagctttattgaattgattgtgatgtgctatttgttaactatgtttattccagctttgctagattttcaccttcatggatttaattgtggtgaagctgccaactttgcaactccacaatggttaaaatttgctaaagaggctgccgtacgaagggctgtgatgaattatcttccgatgctctctcatcagcagcttctgtacttgctagcagtttcttttataaccagaaccccaaatgtattgtctggaattcgttctcgcttgagagatcggaaaaaagaagaaagagaactgctggtgaagcaggaattcttgcaggacatgattagtgaaaacaagcttttgtgttctttcctggaaaagaaatcaattcgtcatgttgtgctctgggagcctgacttgttaccatcttcgactgctctacattcctgttcttctggctcaaaagctcctgagaagaagtctgaggatggttgcagaattgaatctagtgaacgtggcaccaaagataacagctctgatggcagtgcacatatgattggcgcacaaactaaatttatgtccgggaatagcaaatcatctggaactgcatctgcttccatggatgaggtcaatgctgatactgatgatgaggatgacctaccttttgatttgagcattgattctgggtcattgacctgtgttgcttgtggaattcttggttatccattcatggcaattctgcaaccttcaagagaagtattggaagggatttcccttgctcacacgagtagatacaagatgagttctgaaaaagataattgttcaaacacaattccatgctgtcccactgacagatgttcatttgttcccagtagaccttcttggcctgcggaacagcaatgtctggctactcctttggggcaagctaacatcagtcatcagaataagtgaaaatactcttcattcatgtagtgacaggggaaaatccgagaataagatttctgaggacagtcttggcccagaagtaggtgaacaaacaggcaaatatgtcatcaatgcgcaagctgcagaaagttctgatggtactattaactggaatacttattgtacatttgcacggccccggatcttttgcctgcagcatgcccttgagattgaaaagttgcttgagggcaaaggcggtgtccatggtctcattatttgccactcagactttgtcaaactaaaagcacttgcaatatcagtagctgaggaaattgagtttcaatttgattgtacagacatttcacttgcaaaagcatcaaagtctgatttacatctgatcaatatttcaattgacgacgagggacatgaggaagatggaagagactggacgtcacagatgggtctaaacctgaaatattctgccaaactcaggaaagagaaatcagaaaatcaagaacagtctcctttgccatttgggggactgctttcctgcccttcgcctgtttcggttgttcctaatcttaagtggctttgcaaaagagcgcggacaccatacacagttattggtactatgaggggttctagtgcaacagcaactgctgcggaacttaagcctggagtgaaaacagaaatattcactaatggaaatgtttgcgaggatgacaatagacatcattcttttcgacaaactggcctcgagcaaccaggtggactgcaagattgtgataagccttcatgttccgaggagaatggccatggaagacattgtcttgttaacattcctatcgctgttgctgaatatcctatgatgcatcaagtccgtgagggtccagtgagtgttagcacgtgcaatgactccatttgtttgtcaggttccctggatttacctccacacgcctctccagttgaagtaactagatacctaggatgtatacagtcaactgagctgagcagtttaccagccttttctgttcaacatttctttaatgatgaaagtacctctgtggaaggaagcatagactgtgtaagcaatggctgcttagaatctcaggatgatattttagggagcagagatgaacgtttgcaagttcaacaatatcaagagaagatggggcttcgcaataaccccaatatgaagtcagttgattcacacctgatagaaggtttggctgtatcagaaggaaagcatggggaaactgtggcagcattccttgaaaacaaggagcgttgtgctaagacatcctactgttctaatactgaaacaaaaactactaaatctgcaatagacaatcgattggagactcatcatctgggtactggtccagtgaaactaaattcaagctttaatgagatgcacagtgctgatagacaatgcagtttagtctttggctgccttgactcagctgatgttcctgcttcaactcaggctctgtcagtttcacctgttttgatgagtgacgagcagcaggtcgatgacgcccattctgctgtcaaggccattgagcacctgggcaataatctggctaacataaagcacaaatccctgcatatggatgtcctcatgttagaggacgcccaagttgcttccatggctgcagtccctgggcatgagggagaatctgtcgaggctggatcaaattcttttgatattttacttggagctctggctgaagagtccaaggcagcagatgctcctgggaaagatgaagttggcaaagcttccttgacattaataacactggctagcaacgagccctctgttacagaaggcagagttgtagacgtggtggaaacagacacaattttgggagcaggaaaagatgataaacaacttgaccagccacatggcttccatttgtcagatctggtgtctagatgcatcgggagctcaaatagatccgatatcatatgctatgtcagacgcaaacacaaaaggaagagggattactcgtgtttcgtccgctctccctgtgagagcttgaggccaaggtccaagcctgcagtagtcgaggagtcggaatggagcagaacagccgaggcttcttttgctaaaaggggtaagaggacacaagcagtgggatcatttcagtgtgatattgatctgtgtgacatggcatttgagactagggccgaactcaatgcccacaagcgcaatatttgcactgacgagtcatgtggcaagcgtttcagctcacacaaatacttgaagcgacatcagtgtgtccacagcgagatgaggccatttaaatgcccctgggaaggttgtaaaatgaccttcaagtggttgtgggctcagactgagcatgtcagagtgcacactggagagcggccatacaagtgctcggctcctgactgcgggcagacattcagatacgtatcggattacagccggcacagaaagaaatttaaccattactgacagcttctagttttccgagttattggccgcagctcggggcaaatctccagctgcttgtgtcggtgggccttgtttgttgtagtagctcagctcacgtatttattaacaacctgacagctgataggcctagtgaatgttccccgttaacaatgggctagtaatttagtcggtgtaggagttagaaattgttggggggtgaagtgcaacccccttctgttggtgtaggtttgcataagctgatcaccccccactgacacgtggccattcattatttgtttctcagatcagtgatgatgtatttaatccctgatgacaaacttcatgaacactgaaaccatatgatgtcggatgtcaaaatgatcaggggttgccaccgtcctcatgtaattcctgtcttcgacacattgtccaggtcctcattattctgtcatactgtttcagcagattacttgtatgcctttgtctacgcgaaatctaatcatttttaaattcagcgagatgctgccatctatatgccactgtttcgcttagatttaac

SEQ ID NO: 1893 - DNA, 1091 bp, Zea Mays
ccttattatactttctcggactcaacgtcttatctatactatctatatcaccttgttatactttctcggactcgcgtctttccttcgtgatttactcactcatgccaccctctcaaacgcatcccaagaggcggaaagggaggagcgtggagcggcgaattattgtttgtttccccaagatgtcttctccaagcaagcgccgggagatggacctcatgaagctgatgatgagcgactacaaggtggagatggtgaacgatgggatgcaggagttctttgttgaatttcgtgggcctaacgaaatgatttaggaggactggctgcactatctgaaggatactttgctgaattcaataggcatttatcaaggaggtgtatggaagattagagtagaattgccagacgcatatccttacaaatccccatcgatcggtttcatcaataagatatatcacccaaatgtcgacgaaatgtctggttcagtctgtttggatgtcatcaaccagacatggagcccaatgtttgatcttgtcaatgtgttcgaggtcttccttccacaacttctgttatatcctaatccttctgatccattaaatggagatgcagctgcgttgatgatgcgtgatcgccctgcttacgaacaaaaagtgaaagagtactgtgaaaaatacgccaaaccaggggatgctggtgtcaccccagaagagcagtccagtgacgaagagctgagtgaagatgaagacgactcgggtgatgaggagataatgggcaaaccagacccatagtcaagttggcacctactatacctgtaatctgcacacgatgtttactgcagcaactgcaattaaacaccccatgaacatccgcgtgcagtctgagtgccatgtaaataaactgcaatttcaccaattggatttccagcataactatgtcttcgaatcatgagtgtagtgtaggttcgtgcgtttgaattggctgaaggtttcaatatttgtgcaatcattagcagaactgcagaagcaagttcctcaatacagtaattcagatgatgttggcgtagacctttttaagctagtgcatagctaatgcgc

SEQ ID NO: 1894 - DNA, 5184 bp, Zea Mays
catttcaggaccagagcagaattcctcgtttctttcaaaccgcaagaaaactaagcagcacataattaccatttctgccctccgtcccctctcaactccgtcgtcgcgacctgccgcgccgtcatcgccggcggcgaccagcacgtgcagtggaccagtcgcgaagcaaccgcgcagaagagaagggtaaaaacaggactgttggaagtcgagtcgagaagcaacagcaagcagcagcttggggggtaggtggggcaacgcagcagagatagtccaattcgccgccttgccggccactgacctcgccggcggcggggtcccctctgttggagccgacggatccgttgccccctcctatccgaacctgatccacccatgggaactccagttaatatcatcgttggttctcatgtttgggtggaagacccaaatctagcttggatagatggagaagttattagcataaaaaacaatgaagtacatgtgcagacatcgaatgggaaaaaggttaccacagacaggtcaaaagtatttcccaaggatatggaagctccaccaggaggagttgatgatatgacaagactttcatacttacatgaacctggtgttctacagaatcttgctacccgctatgaactgaatgaaatatatacttacacaggcagcattttgattgctgtaaatccatttcaaagattgccacatctttatgatacccacatgatggaacagtacaagggtgcagattttggggaattgagtccccatgtctttgctatcgcggatgttgcttacagggcaatgataaatgaagggaaaagcaactctatattggtcagtggtgaaagtggtgctgggaagactgagacaacgaagatgcttatgagatatttagcacatttaggtgggcgatctggagtagaaggacgtacagtggaacaacaagttttagagtccaacccagttcttgaagcttttggtaatgctaaaactgtgcgaaataacaactcaagtcgctttggcaagtttgttgagatccaatttgacaagactggacggatctcaggagctgctatcagaacttacttgctggaaagatcacgtgtgtgccaaattaattctccagaaagaaattaccattgcttttattttctttgtgccgcaccacctgagtacactcagaggtacaagctgtctgatcctagatctttccattacctcaatcagtcgagctgtattgaggtggatggaatcaatgatgctgaagagtatttagcaacacgaagagctatggatatagttggaatcaatgaggaagagcaggaaggtatattccgggttgtagctgctgtacttcatcttggaaatataaattttgccaagggaacagaaatcgattcttctgtaatcaaggatgataaatccaggttccaccttaatatcgcagcagaacttttgaaatgtgattgccagaatttagagaaggcgctgataacacgagttatagtcacgcctgaagaagttatcactagaacacttgatcctgcttctgcagttgctagcagagacgcattagctaaaataatatactcccgattgtttgattggattgtggaaaaaattaatgtctcaattggacaggacccaaactcaaaacagttaattggagttcttgatatctatggttttgagagcttcaaagttaacagttttgaacagctatgtatcaattatacaaatgaaaagctgcaacaacattttaaccaggtatatcatgactttattctcgatgatatgactttattcttgacctaatgtaaatatgtggcatttgttatgcagcacgtgttcaaaatggaacaagaagagtataccagagaagagataaactggagttacatcgagtttgttgataatcaagatgtgctagacttgatagagaagaaaggtggattgattgcacttctggatgaagcatgtatgtttcctagatctacacatgagacgtttgcgcagaagctatatacaacatttaagaataacaagcggtttgccaagccaaagctttcacgcactgattttacagtagtccattatgctggcgatgtgacataccaggctgattatttcttagacaagaacaaagattatgtagtggctgaacatcaggatctgctgaatgcttcttcatgcctattcgtagctggtttattccctcctctcccacaggagacagcaaagtcttcaaaattttcatccattggatcacgttttaagattggaaaaacaaaggtgtttctaagagctggacagatggctgatttggatgctcgtagagctgaagtattaggaagagcagcaagaatcatacagaggcaaatacgtacatatattgcaaggaaacagtttgctgagcttaaaagatcagcaacacagctgcaatcttttgtcagaggaaccttggctcgtaagttgtatgagtgcatgaggcaggaagcagcagcagtgaaaatacaaaagaatatgcgacgccacaaagcacgggaatcttatttacaattgcaagcagctgcaatcacattgcagacaggtttaagggcaatgtctgctcgcaaagaattcaggttcagaaaggaaacaaaagctgctgtccacatccaagctcaatggcgccgccacagagactactcacattacaagaatctgcaaggagcagctcttacttaccagtgtgcctggaggcaaaggcttgccagaagggagctcaggaagctcaagatggcggcaagagaaacaggagccctaaaagaggccaaggataaacttgagaagcgtgttgaagaactcacctggcgcttaggattggagaagcgattaaggactgaccttgaggaagcaaaagcccaggaaattgctaagctgcaagagacgttgcatgatatgcagcttcaagttgaagagtcaaaggccatggtagttaaggagagggaagctgctagaaaggcaattgaagaagcacctccagtaattaaagagactcctgtgctagtcgaagacacagaaaagattaactcactgacgaccgaagttgaacaactgaaggctttgctgctaactgaaagacaagcaacagaagctgcaaaaagagaacacgctgaatctgaactgagaaatgaagaactaattaagaaatttgagagcgcagagaaaaagattgagcaacttcaggaaactgtccataggctggaggagaaagcaaccaacatggagtctgagaacaaagtgctccgtcaacaagctgttgcaatttctcctacgtcaaaatcattagctgcatatcctaagtctcctttccagctgaaaactccggagaatgggaatgctctaaatggagaagtgaagtcatcaccagatatcacccctatcttaccaaaccccaaggagcttgaggctgaagagaagccacaaaaatcacttaatgaaaagcagcaggaaaatcaagacctactgatcaagtgtgtatcacaagatctgggattctccagtggcaaacctattgcagcttgccttatctacaggtgtcttctacactggagatcattcgaagttgaaagaactggtgtttttgaccgtattattcaaacaattggctctgctattgagtcccaggacaacaatgacaagttggcatattggctctcgaattcatccacactgctgctgctgctgcaacgaacactgaaaacaactggagcagctggattcactcctcaaaggcgcaggtcatctgctgcatcttttgggagggtgttttcggggatgcgagcctcaccacaaagtgctgggcgtgcttttatgggaagtcgcttgattggaggtctaggtgaccttcgtcaagttgaagccaagtaccctgccctgcttttcaagcaacagctcacagctttccttgagaagatctatggaatgataagagacaatttgaaaaaggagatatctcctttgcttggcctttgcatccaggcaccaagaacatcccgtgcaagcctaattaaagggtcacgttcccaagcaaatgccttagctcagcaaactctgattgcacattggcagagcattgtgaaaatattgacaaattacttgaatgttttaaaagcaaattatgtcccttcagtcttaatcagcaaagtgttcactcaaatcttttcatttattaatgttcagttatttaatagtcttcttcttcgacgggagtgctgttcatttagcaacggagaatatgtgaaagctggattggcagaattagagcagtggtgcatttatgcaacagaagagtatgcaggttcttcctgggaagaattaaaacatattaggcaggctgttggattccttgtgattcatcaaaagccaaagaaaacattgaaagaaattaccaacgatctgtgccctgtccttagcatacaacagctatatcgaatcagtacaatgtactgggatgataagtacggtacccacactgtttcatcagatgtcatctcaagtatgagagtaatgatgacagaagattctaataacgcggtcagcagttcgttcctgttggatgatgattccagcattccgttttcggtggacgacatctcgaagtcgatgacagaaatcgaggtaacagatgtcgacatgccacctctgatccgggagaattctggcttcaccttcctacaccaaagaaaggactaacagggtggtccttccagctgcatgtccctttttgcacattctttttctccgctcaacctgtgcataactcatgtacatacgctcgtgccttttgctctctggtcagggcttgttagatgtattgtctttggtttgattggttggttggttctttcctcgatcctctcccaattttgttgggcgaagggtccacaatctatgtttctccatactgtagtgaaaaggggccggatgcccctggtctccccgagctgcttttggaaaagctcgtggtcattaagcagttaagcttgtggaaaaggttctccacatctaccgagtcgttcgttgtgtcgccttcttcatatggatcatcgccatattgtaaattgcaaatacgattatagttgaaaaaagagatattacagtgatagcagtgttctggagtttggatctcatgaatattct

SEQ ID NO: 1895 - DNA, 678 bp, Zea Mays
cggagggtggcgcgcaggtcgtaacccagaagcgggcggggcacaacgaggggattttttaaccaaggcagaaattcgtccccgagagtgtagatgatggattcccgaccatcaccttccattttgaggatgatcttgcactgcatgtgtatccacatgagtactttttcccaaatgggaatgacatatactgtgtgggattccaaaatggtgcattacaatcaaaagatgggaaggacattgtgcttatgggagatcttgtgctttcaaacaagttggttgtctatgacttggaaaatcaagtcatcgggtggactgactataactgttcgtcgagcattaaaattaaggacgacaagacaggcacaacctatactgtcgaatcacatgacatatcctccggatggaaattccactggcacaagtccctggttctgttgttggtaacaatggtgtggagctatttatagtacactaactctattgtacaacacgaacacgcacttaccgaaattcatttgattcgtattcttttcacaaaaaagaatatctagggttttaacttgcgttctctgaccacggaaaacgatgaaaacaaaaacgttgtgtgccatacaatgagcctgtgtgtcactagtgttatgctgagacaagtgttgatcccacttttgggcaggc

SEQ ID NO: 1896 - DNA, 1940 bp, Zea Mays
catgctttgagttttttttttctactagtggaagaacgctagctcgctatctagaacgtttctgaagacagtcagagtagaaagttctttccgaccgacgagacgtacgagggaaacacaccgacaacccggcatgcaaggcagtggcacaacaagacgcgaagcaagcaagaccccgtcagcgaaggcaggttgcctttggctcccggtcccggcgtttgcttgcggcttccgtcgtccgcgcacaccgacgacgtggagcaacggccagcgcacgtaagtgcccgctcttccagccccacatttgcatccgcttgccttctggcaccacgccaccacctaccatgccgacgttcccgcgcgccggccggtggtccacctccagcacatggccacggaaaaccgccggcgcggcgtccacggcgctggccgccgtcgtcttcgcggtcctggacgtcgccgacgtgatcctctgcttcgcgtacgccctcctcgacggcgtgctcgaggacagccccgtgcgctgctactgccacaggagctacgacgacggcatccgcgaggcggccgcgggggcatcagtggatggcggcggccacgaggaggtctccgacacgctgtacgcgtgcggccggaggagcaccgtcagggacgcgctgctggggctcgtgcgacgcgtcgtgccgaggactaggaggacacgggcgccgccagatgagacggtggcgccgtgcaagtggcgcagccccaggtggtctgactgcgcgtgtaagtcgtgcgtcgcgtggcggtgcggcgaagaaggcggcggccggctgcacgtcgtcgtcaaagagccgggcccgaaagatgcagcggcagcaggaacaacaacacgcgcccctgatcccgagaacgccatcttcgtgcacggtttcgcgtcgtcgtcgtccttctggtcggagacggtgttccgggagtcctcgtgcatcctcgacggttgcaggttgttcgcggtggatctcctcggcttcggccggagccccaagcctgccaactgcatgtacagggtgagagaccacgtggaggcgatcgagagaaccctcatcctcgccggcgacggtgaatcgcagagtctgatgagctccttccacctggtcagccactccatgggctgcaccatcgccctcgccttggctgccaagcacccgacgcgagtcaaatccatcacgctggttgcaccgccgtacttcctgccgtgcgagcagagagcgagccaggtggcgctcaacaggctggccgagaagaagctgtggccaccgctgctgttcggttccgcggtgatgtcgtggtacgagcacgtcgggaggaccgtctgcttcctcgtctgcaagaaccacctgctctgggagtggctcttcagcctcctcaacctcaacaggggcgtggatttcagggtgagggatctgacgaagcacactcaccactcggcgtggcacaccatgcacaacgtcatctgcggcggggcggcgctgcaggacgcgaacctggaggccgtcgcggcggccggcatcccggtgcaggtgctccacggcgccgacgaccaggtggttccggtcgagtgcggccgccatgtcaaggcgaagatcccgcgcgccaagctccgtgtcatggagaggcgcgaccactctacggtggttctcggcagggagagaggcttcgccgaggagctcaaggcgttctggtgcgcttcaaggtccccggttcacgtccaggatgcggagcaacaggaaacactagacatcagcagcccctcaaaagattcaaagatcatccaacatgacaacacctcagtgcccaccatcctcgctcggcgtctgcggattgatctttgcattagcagccttcaacaggagcttcgcgccatcatgcagcaagtcctggagttcccttttgcttaa

SEQ ID NO: 1897 - DNA, 1612 bp, Zea Mays
acagcagcagatgtatcatcagcaacagctccacacccataaccagcacctgtcctcgtcaaggccaggcttacctcctgagaagcagttcctcctgcacggagcaggcggcggcggcggcggcggagatgcagggctcgtcctctccaccgatgctaagcctcgcctgaaatggacacccgagctgcacgagcgttttgttgaggcggtgcatcagctcggaggcccagacaaggccacgccgaaaaccatcatgaggctcatggggatccctggactcaccctgtaccatctcaagagccatctccagcgttggtaggctgccggacgggagcagacaacgccctatgccaagggagtgcttcaccgccgccaccaccgccgccgccgcacctgaacctagaaccgccgcagataaacaggtcaatgcacataagtgaagccctccagatgcagatcgaagtccagagacggctgcatgagcagctagaggttcagagacacctgcagctgcggatcgaagcgcagggcaagtacttgcagtccgtgctggagaaggcgcaggaggcgctggccaagcagagcggcggcgctgacgagacgacgacgacgacgcagcagcagcagcagttgctgctgccggatctcatctcgagagccacggcgacgaggcgcggcaatgtccagcaggagcacctccaccagcagcaccacctcggaggcgacgggtcggtggacagctgcctgaccgcgtgcgaggggtctcggtgccagagggagagggaccaggacctgctgtccatcggcctctcgtccgctccgcctcccactcccactcccagcagaggctacaacgacagaggaggcggcggcagcgccagctgcgaggagttcctgcagtttcttgacgagcccagcagaagaggagcaggaggaggagggtcctcggatgagcagcaggagcttgacctcagcatcagcggcggcaggagcaatccaaggcctcgcggcagccaaagccaaaggatcgacctcaacggatccagctggaactgaatggtcgtccttttagcaatggtctccttcctcgtagctttagctgcagtagggaaaatggccagggtcacagcaggtgccctgtgtgtgggtgcacttccatgccctgcagccatttgcagcaaataactaagcagtgactgatgatgatggtgaattggcatgcgagaaagagaacccagatgcacgttctcctttgacgtctgattagttaactctatagatctgtattccagacatggaaaagtacactgctgagatcctctcatcagtttcaggaatgtacagaactcgcagcggatgcacacgaatccatgctgctgcttctgccttggcccaccagtcagtaagctattcctcgctcggccaagccaacacaagcgatggaaatatccagctcggagctcgctattccactgtagcatgcttcttgtttcgtttgtctgtgcgtggccatcttcgtcccactagtcgctttctgtattcttttcttcctcttttcaactgcccattgctggtttgacacacaacgttgctctgtatttctggaataata

SEQ ID NO: 1898 - DNA, 2830 bp, Zea Mays
cttcccccgccccaagcccccaacccgatctctctcatcagctcgctctttcctgtcccctctccgccacctcaccgccggctcgctcaaaaatcctcgcgccggacgccggccctgcctccgcctccgcctccgctgcgccatgcccgtcggcgcctgattcatgtctcagtcctacgccgccgccgcctcgaagcgccccttctcgtcccccaccacatctccgtccccgacgtcatcccctgcgacgccgcttatgaagaaggccaagcatcccgccgccgcctcctcctcttccgtggggaccgtagagaagaacggcatccagcttgataccgttgccgccgccatgggtgggggccgaacgaatggcgaggaggatgcggacatggtgctcgtcaaccaggacaagctccccgcgcccagcgtgccggcctctgctggcgttgccgccaacctctttcgaaagaaggccacgctcccgcagccgtcgacctccgcccgcaagccgctccgcatcaaaataggtcaaccaaaactgccaaaaaacttcgaagaggatacatggtcgattttgaaggatgctatcacagctatttttctcaagcagaaactttcttgtgatgttgagaaactctatcaggctgctggtgatctttgtttacacaagctaggggcaaacctatacgaccgaatcaagaaagaatgtggaatacatatagctgaaaaaatatcagcattagtgggtcaaagcccagatctggttgtattcttgtctctggtccaaagaacatggcaagatttttgtgatcagatgttgattattcgtggtattgctttacttcttgatgtaaaatatgtcaagaatgtggcaaatatctgttcagtgtgggatatggggctgcaactgttccgcaagcatctatcactatccacggagattgaacacaaaactgtaactggccttctcagattgatcgagagtgagaggcttggtgaagcaatagataggacattacttagtcatcttctgaagatgcttactgctcttggaatgtattctgagagttttgaaaaaccctttcttgaatgtacttctgaattttatgctacggaaggtgttagatatatgcaacaatctgatattccagattacctgaagcatgtggagtcgaggttgcaagaagaacacgaaaggtgtattctatatttggaagctaacacgaggaagccactgattgcaactactgaaaagcaattgctagaacgtcatacatctgccattattgagaaggggttcactatgctcatggatgccaatcgtataaatgacctctcgaggatgtacaaccttttccagagggtgaatgctgttgagctgctaaaactagcgcttagttcatatatccgggctacaggccagggcattattatggatgaagaaaaggacagagaattggttccatttcttcttgattttaaggcatccctcgacaaaatattggaagaaagttttgccaagaacgaggctttctccaataccataaaagattcatttgagcaccttatcaatctacgacagaaccgacctgcggaattgattgcaaagtttcttgatgagaaacttcgagctggcaataaagggacatcggaagaagagctggagggtatacttgataaagttctggtcctgtttcggtttatacaaggtaaagatgtatttgaggcattctacaagaaggatctagctaagaggttgctgcttgggaagagtgcatcaatagatgctgaaaaatcgatgatcacaaaactcaaaactgagtgtggaagtcagtttaccaacaagctggagggaatgttcaaggacattgaattatccaaagaaataaatgattcattcagacaatcatctcaagctaggacaaagcttccctctggcattgaaatgagtgtccatgtgcttacaacaggctattggcctacatatccgccaatggacgtgaaactcccacacgaactgaatgtgtatcaggatatatttaaagagttctatttaagcaagtacagtggaaggcgtttaatgtggcagaattctttgggacactgtgtcttgaaagcagactttcccaaaggcaaaaaggaacttgcaagcgtggttttgatgttgttcaatgacgcacaaaagttaagcttcattgacatcaaagattccactggtatcgaggataaagaattgagacgaacattgcaatctcttgcatgtggtaaagttcgggttctccaaaagataccaaaagggagagatgtagaagataaggatgaatttgtattcaatgaagattttagtgctcctctctaccgcataaaggtaaatgcaattcaaatgaaagagacggtagaagaaaacacgagcaccactgagagagtgttccaggatcggcagtatcaggttgacgcggccatagttcgaataatgaagacgcggaaggtcctcagccacacccttctaataactgagctttaccagcagctcaagttccctgttaagccagctgatatcaagaaaagaatagagagcttgatcgaccgggagtacctggagcgcgacaggagtaacccccagatctacaactatctggcttgacaacgttttggtggatcgttcccatttcattactatcagaaaaaggcactgtaaattaatttattttccggtttcttgttctttcatgcttttcttctctgggaggaagttgtagttgtagctgctgcaacgtgtttatatagaacaattttttcggcatcagtataaaatcaggttccttaaagc

SEQ ID NO: 1899 - DNA, 1874 bp, Zea Mays
aagcttcagctgtcacctcttgtcccttgacatgtttctgccgcctacactggacgacgcttgatgcatacgagatgatgagttggccggaggaaggaagaggctgaaagggcggcggagagagaaaggctataagagcgagctgggtccctcgaggatgccatcaagaaaccgcgtggaggggagggcgatgagatgagggatgctggccgcggtgatggactactttagctcctgctggggcccgcgatcgggtgccgggcaccgggaaaagggctccgacgccgctggccggcaggacggtctcctctggtacaaggacgtcgggcagctcgtcactggggagttctccatggccgtggtgcaggccaaccagctgctcgaggaccagagccaagtggagtccggatcgctctccctggctgacacgggcccgcagggcaccttcgtcggcgtctatgatggccatggcggcccggagacgtcccggttcatcaatgaccacctcttcaaccatctcagaaggtttgcaactgagcacaagtttatgtcagcggacgtgatccggaaagctttccaagcaactgaggagggctttctttctctagtcagcaaggaatggtctttgaagcctcagattgcttcagtgggctcctgctgccttgttggtgtaatctgtgctgggactctctatgttgcaaacctgggcgactcacgtgcagttcttggaaggcttgttaaggcaactggagaggttttggccattcagttgtcatcggagcacaatgcgtgctatgaggaagttagacaagagctgcagtcatcacatcctgatgatccacatattgttgttctcaaacacaatgtttggcgtgtgaagggtatcatccagtcagaagacgggcgggcgaagcaagaggaagcacgcgcgcgttgtcgctaagggagaacggagccgcgccgccgtggaaggtttgactggcgggcagagcaggagggtcgtgccactgcggaagagggttgctgccaccacctagggatgtaaatgatctcaagatctattggagatgtatatctaaagaaaccagagtataatagagaaccgcttcacagcaagtttcggcttcgagaaaccttccagaggccgatccttagttctgaacctcaaattactgaacatcgaatacagccaaacgatcaatttgttatatttgcttctgatggtctatgggagcacctcagcaataaggaagcagttgaccttgtccaaagtagtccccgaaatggaatcgctcggagactagtgaaagccgcgatgcaagaagctgccaagaagagggagatgagatattcagacctcaagaagatcgaccgtggtgtgagaaggcatttccacgacgatataactgtcgtcgtggtgttcatgccatgagcaaagctagctggagcaaaagcccctcggtttctcttcgagggggcggtgtcacccttcctgcggagtccctcgcacctttctcagctccggcatggttgaagagcaccaactgaagctgctgctactcttgaaaggaagagcacagtgcaggtctgcaggagagatgaaaaaagaacagcaatcaagtgtagcgttacacttgcacctgctgtgttgttgctctttgcaaaactactgtctagactccgcctggtaattagtgtactgatagcgaggtaaaaaagttagattatttgttagcgacacacatcctttcaccttctcttctctccctcgattcctatcccttttctcttcatccttgagagaacaggtggttgtaaattgttcagaacatgttttcccttatagtccatcatatcccgcttttttcgtgttg

SEQ ID NO: 1900 - DNA, 2207 bp, Zea Mays
cccatctctgccttgcttcctcggttgttcctcccccttcttttattaggttttttttgtctcattggatttgcgcctgtgctgctcacctgagcgcatactagtctctgcatcagctgcatcagagagtagagacctccgagctgctcttcaacacgcagattgggcagagccgcaaggtgcctgccgggagagagtgaaaagtgagagagcgcgcgctcaagggggccaaaaggaatttttttttatccagcttcttagcttgattctatctgatccgggagagcagccgccagtccaactaatccttgctgttggtgtgccggggctttgattgctctccagatctgaggcacctgctgggtggattccaggaatcctagcacgaagttgacagtggagttctcagggaggaaggaagaggctgaaagggcggcggagagagaaaggctataagagcgagctgggtccctcgaggatgccatcaagaaaccgcgtggaggggagggcgatgagatgagggatgctggccgcggtgatggactactttagctcctgctggggcccgcgatcgggtgccgggcaccgggaaaagggctccgacgccgctggccggcaggacggtctcctctggtacaaggacgtcgggcagctcgtcactggggagttctccatggccgtggtgcaggccaaccagctgctcgaggaccagagccaagtggagtccggatcgctctccctggctgacacgggcccgcagggcaccttcgtcggcgtctatgatggccatggcggcccggagacgtcccggttcatcaatgaccacctcttcaaccatctcagaaggtttgcaactgagcacaagtttatgtcagcggacgtgatccggaaagctttccaagcaactgaggagggctttctttctctagtcagcaaggaatggtctttgaagcctcagattgcttcagtgggctcctgctgccttgttggtgtaatctgtgctgggactctctatgttgcaaacctgggcgactcacgtgcagttcttggaaggcttgttaaggcaactggagaggttttggccattcagttgtcatcggagcacaatgcgtgctatgaggaagttagacaagagctgcagtcatcacatcctgatgatccacatattgttgttctcaaacacaatgtttggcgtgtgaagggtatcatccagtcagaagacgggcgggcgaagcaagaggaagcacgcgcgcgttgtcgctaagggagaacggagccgcgccgccgtggaaggtttgactggcgggcagagcaggagggtcgtgccactgcggaagagggttgctgccaccacctagggatgtaaatgatctcaagatctattggagatgtatatctaaagaaaccagagtacaacagagaaccacttcacagcaagtttcggcttcgagaaaccttccagaggccgatccttagttctgaacctcaaattactgaacatcgaatacagccgaacgatcaatttgttatatttgcttctgatggtctatgggagcacctcagcaataaggaagcagttgaccttgtccaaagtagtccccgaaatggaatcgctcggaggctagtgaaagccgcgatgcaagaagctgccaagaagagggagatgagatactcagacctcaagaagatcgaccgtggtgtgagaaggcatttccacgacgatataactgtcgtcgtggtattcctcgattcggatgccatgagcaaagctagctggagcaaaagcccctcggtttctctccgagggggcggtgtcgccctccctgcgaagtccctcgcacctttctcagctccggcacggctgaacagcacctactgaagttgctaccactcttgaaaggaagaacacagtgcagatctgcagtggtgagagagagagaaaacagcaaccaagtgtagcgttacagttacacctgctgtgttgttgctctttgcaaaactactgtctagactccgcctggtaattagtgtactgatagcgaggtaaaaaagttagattatttgttagcgacacacatcctttcaccttctcttctctccctcgattcctatcccttttctcttcatccttgagagaacaggtggttgtaaattgttcagaacatgttttcccttatagtccatcatatcccgcttttttcgtgttg

SEQ ID NO: 1901 - DNA, 1758 bp, Zea Mays
atggggtgtatcatggcttgtacaacctcatttaatatggggtctcttgaagggcagacactcgtcgcaataattagcgaactacctagcgccttgatactcaagaggcatgcccacatcctacgtggcactcgaaatgtgcaagatactccttcgaccgacacggaggacatgagctccacggcctccaacgggattgggcccctagcgtcagtgagcgggtcgtcccactatggcgatgccaaggctagctcaagtgccccggccccaagggaagagctggcggtggaccccgcttcactcgtggcgcctgcggagcatcgcgaggaaagtgtcgaggcaatggtgtcatcctccgctcctgctacgtcggttgggcatggcgaggggaacggtgctggtggcatcgcaccctctgtcgcccattgcgccatcgaagcgtcgcaaggggaaggagctggtgacaacgcctcccccagcatcctccgtgttggcggtggtagttcctttagggcttgtttgggtaatcttggattggagtggattgaggtggtgttgcggcagtgggggttgttggggcccagtcgcccagacctagccttcaccggacatccctccctcctcttctcggggagtggtgctccctgcgctgcccattctcggataagacctagccttcaccggacatccctccctcctcttctcggggagtggtgctccctgcgctgcccattctcggataaggttccgaggggtcaccccatcattctcgaaggcctggaaggagaggatatggatgtggagcaatggcagctcatcgagggagcatctgctagagctgacaaaggtctagagactattgagcgctgcctcgacaatttcgaggaggcgatgttgatagcctgcactatgatgatgtgggacctgctccccatcggccagcgcctattttatcgatcgatggcacagagggaggtgttgctaactgcatgacagaaggtggagcagctgcatgcggaggtctcccattcggaggagagaaagcacgagctcgcctcacttcgtgctgaggctgaaaggctttgtggagaggtgatgtgcttgcgcacgcaacgtagcgagcgcggagcagcgcgaacctccttcgagaggagaggggccatcttcagggggacatgcatgagttgaatcattgggccaaggaggccgagtggaccctgagggtggaaaatgcttgcctagaggaggcaaacttggagctctcaagagagcgcaaggcggtcgaagagctccagaaaatgttctctaatgcccaagacaccgggaaagtggtggaggagctgaagaaggcgacggaggacgagatgtgcaagcccgcgcttgccgatgatgatgttgtcgccacacagcgcgtcgtcgtcgaaggtgcgttccactggagcagcatggccattgggcagatggtctccaacttcgatgagattgatgccactgtgatcgtggagggctttgctgctggccgtagcgatgaggagttggatgacattgaagaacaagtacgccctcatgcctggtcgatcgcgagccttattgacacgaagttcattctgacccggcctccaaatccatgaagcattaggcgagccctagtcatcttcagttcttttgtaaatgaacttagacgatggagctgaatgaatgttgtgcttttattttaatgttattttgctagtgagtccttgtgattggtcattccga

SEQ ID NO: 1902 - DNA, 2714 bp, Zea Mays
gggtgaaaatgaacagagacgcatgactggaaagggtggcttttgctgactttcgttttacgccagcgagtgaagaactacttcctccctcccttctgccttctcccctgccccctctctcatcactctcagatctctccctccccctccctccttcccttcatctctctgaattctgcacacctcgccgtccacgcattccgcgctcgccctcgcggatccggcagccctttcttcgccgtcgttcttgcctccgctgtcctgctctcctggaggctgctgttgggtcaccagtggctggactcgaccccgcggcctccggggggtgggttcgctggatggttatcgcctcctgatccatccggaccccggatcctctgcaaaggcaccgcctttgtgggttgggttctctgcgcccatgcagaagggtttggcgcgtcggcggtgaggcagggctctggtttagttcttgcgttggactagtccggagatgcttcgtggaacggggtacgggggcggcgatgcgcggaggcgggcactgcgctcgtcgcggcggcatctgccggggtggatctggtggcttctcgggatcttcctcctcgtcgggctcatgctcttcgtcctgcaccacaaccaaaaggagcagttccggccgcccgtcgtgagcacgaggttttgacattatgtgcagagtatggctgggtggtaggctcttgagtatcagagtacaattttttgccctagatctttattgccatatttcagtattggatcctttgaaggataatggttcagcgatccaggaagtccctcgtgaaaaagtgaatttctcagaagaacttttgagcagcacatcatttgctcgccaattagtggatcagatgactctagcaaaggcatatgtcatccttgcaaaagagcaaggtaatcttcagcttgcatgggagcttagttcacagataaggaattgtcaaagattgctatctgaaggggcagttaatggaagagcaatcactaaagatgaagcccatcctataataagccggctagcacggttaatatacaaggctcaggactctcactatgatatcagcacaacaatagtgacattgaagaaccatgccttggcactagaggagcgtgcaaaggcagcaattgttcagagtgctgagtttggccagttagcagcagaatccttccccaaaaatctgcactgtctaactgtgaaactgacagaggagtggcttcggaacccgaagcataggagtcactcagaggagaaccggaattccacacgattggtggataataatctgtaccatttctgtatattctctgataatgtgctggccacttcagttgttgtcaattctacggtctccaatgcaaatcatcctcaacagcttgtgtttcatgtggtcaccgacagaatccattttggcgcaatgtcaacttggttcctcataaatgacttcaaaggttgtactgttgaagtccgctgcatagatgagttctcgtggttgaatgcttcttcatctcctcttgtcaggcagctatctgaggcggaaactcagggttactattactcagctggttccaagaatcctgaaagagaaacaaaattccataatccaaagtttgtttctctactgaaccatttacgtttctacattcctcagatacttcccaacttggagaaggtggtgtttcttgatgatgatgttgtggtgcaaaaggacctgactcagctgttctccattgagttgcatggcaatgtcattggagcagtggaaacctgtttggagtcgtttcatcgatacagcaagtatctaaatttttcgcaccctaccatcagctccaagattgatccacatacttgtggatgggcttttggaatgaacatttttgacttgatagcctggaggaaggcgaacgccacatcgttgtaccattattggcaagagcaaaattcagatctattgctctggagaacgggaattcttcctgcaggccttttgacattttacggcctggtggagcccctagaccgcagatggcatgtcttgggtcttgggtatgatgtagacatagatgaccgtttgattgagagtgctgctgttgtgcactataacggaaacatgaaaccgtggctgaagctggctattcgccgttacaagtatatatgggagcggtatgtgaatatctcacatccgtatgttagagagtgtatgttgcaatagaaagcctgcaaatctctgtatgttcttggatggtgttgaagctgtttcctcacacgaggctgctttcgagcacattgtatgagggaaaggttcagaggtagtagaatatataccagtcatcaaagaagtcaactgttaagtttctttttctttttgggttgggggaagattcattttgagatgaaaataattcctttgcagagtttacatacaaatctggactgggaattttagcagtctaaccagatacatctggatagatattgtaaaagagatacagttggatcaatgagcattttttctttgagatttaggaagtgcaaactgtgagctcaactgtgcagggtcagtggtgctgcattcttttagtactatcttgttttatactggcgaagaaggttctgcctccctacttgtataagtaactgttttagtttgtgctctccatacttaaaggctctgtttggaagcgac

SEQ ID NO: 1903 - DNA, 1562 bp, Zea Mays
atgggcggggcaggtgggcttatgttgctgcgcgcgcggtgccgtctccaactctgtctcggcctctcgcgtggaggtggaggtggaggcggagccgatgagatcgatcgcccgacccccgtcacgtccggggtcgcattctctttccgtcccggggaaaaaagaaggaaaccgaaccttggcagcggcgtgccggcaggcatgtcagcgacggtagccggccacaggtccagattccggaaccgaaccaccgtcccccgcgaaccacggaacagcgaagacacctgggccaggggaagcagaggaagatcgcgaagtactacaagaaacaagagaatctactgaaggatttcagcgaaatggagaccatgaacgaaatgggtggcctagatcagaatgctcctaccgaggaagagcagaagcagttggcgaagagcgagaggtttgccatcaacctgtcgaatgcagtcaacctggtcctcttcgtaacaaaagtcgtcgcttcagtcgaaagcgcgtccatggcggttatagcgtcgacgctggactctctgttggacctgctgtcagggttcatactttggttcactgcgtacaagatgaaaaagccgaacaagtacaactatccaattggaaagaggcgcatgcagccagtgggaataatagttttcgcatcagtgatgggcacacttggcttccaagtgctgatcgaatcagggcgccagctcataactcagcatgtcctctgttgcggtcgtgagttcttcctcatgctctactgcagaacgttcaagaatgagatcgtgagggcctacgcccaggaccatttcttcgacgtaatcacaaactcggtcggcctggtctcggcgctgctcgctgtccggttcaaatggtggatggaccctgttggcgccatactgatcgcgttgtacacgatcacgacgtgggcgcgaacagtgctggagaacgtaggcacactgataggcaagtcggcgccggcagagtacctgacgaagctcacgtacttgatctggaaccaccatgaggagatccagcacatcgacacggtgcgagcctacaccttcggcacgcactacttcgtcgaggtggacatcgttctctcgggcgacatgccgctgagtcaggcacatgacatcggcgagtcgctgcaggagaagctggagcagctgaccgaggtcgagcgcgccttcgtccatgtggatttcgagttcacgcaccggcccgagcacaaggccgaggtctgagtgcgtggttagtggttactgcagagttcagaccagctgtagcgctactgcagatttgacttcatatgctattagttcgtaagatgaatgctatattcatttcccacaactcttcaaaaagaatctagatattttttgtcatgtacgtgcagactggaataaaattttgtatagtcgttcatgaaccggtgaaaaatatattttttaatacatttgactaataaagaattattcatattagtttctttttattttctataaaacaaacataatagatatccaaagtgtatattttaa

SEQ ID NO: 1904 - DNA, 1592 bp, Zea Mays
tcggcttcctcctcccagtcccgaaccgcacgcgctcgatttcccgcaccccctctagcctctagcggccatgtcgcccgccgccgccaccacaaccttcgtcgcaatctccatcgccgtccccaaccctaccgctccatcccgcggtcgcgtgcgccttccgctaggcggggtccccgctgctccacgccgcgccgtcgcctctatggcagtgtccgcccccaggtccggcgccgccacctcgtttctcgagcgccgcgagtcggagcgcgctctccactttgtcaaataccagggcctcggcaacgacttcataatggtggacaacagggattcgtcggtgccgaaggtgacgcccgaggaggctgcgaagctgtgcgaccgaaacttcggcattggcgccgacggtgttatcttcgtcatgccgggggtcaatggtgccgactacaccatgagaatcttcaactctgatggcagcgaaccagagatgtgtggtaatggagtccgttgcttcgctcggtttatagccgagattgaaaatctgcaggggacaaatagattcactattcatactggtgctggaaagatcgttcctgaaatacaaagtgatgggcaggtaaaggttgatatgggcgagcctatcctttctggactagacatccccacaaaactgctagctaccaagaacaaagctgttgttcaagctgaattggcagttgagggcttaacatggcatgtcacatgtgttagcatgggaaaccctcactgtgtcacatttggtgcaaatgagttaaaggtattgcaggtcgacgatttaaaacttagcgaaattgggcctaaatttgagcatcatgaaatgtttcctgctcgcacaaacacagaattcgtacaggttttgtctcgctcacacctcaaaatgcgggtctgggaacgtggtgctggagcaactcttgcctgtggtactggtgcttgtgcagtggttgttgcagctgttcttgagggtcgagctgagcggaaatgtgtagttgatttgcctggcgggccattggaaattgagtggagggaggatgacaatcatgtttacatgactggtcctgcagaggtactggggaccaagatagaagggttggctgccactcagagcttgtgagattggttatagtatccatgaaacagagtgttctggtaccagtacacttgttcagatattcttaattatgattgcttgatttgggtagcagtagaggcttccttttgaagcattctagtgttcaccttttgtactcctttagtttgtcaggtttgaacactacatgggtaacatgtctttcccaccattttctgtttcttttctttgtaagtgaacgccaatgcagttttagtattgttttctatagatttgtcttgatgcactgggcttactacttattttctggtatgaatgctgcctatttcctgaaaatcgcaatcatctaaagtgcttctgacaagtgacaacagacaacatgggttgttggctatggctcactattaattttcacctgcaacaattaagagtgtcaaattctgtgcttatataatctccgtatttt

SEQ ID NO: 1905 - DNA, 862 bp, Zea Mays
cataaccctaacctagccgattcaatcccagcaacagccgccctatcctcctcgtcagccgtcaccgccgccccacagcctcgcctctaccatcgcccccgccggtgctagctgcatccggccaggagctcgattgtttgccggcgatggtgcagaccaacctctccatcgacaagattaatgccatgcttaaggcattcgaccatacgagagggttcatgtagcatgattaccaccttggctagaggcacaacatgctcattatgtggaggttgtcttaggtcactggaatcaaaatgggaaacctcctatgcagaatgttttgtaatatgtttttcataaggcataggaaaaattagcataggcaaagaaatgggtcaaacctcatgttgagactgctaagatgaaatggattcctgttaaggagaaattggttctcctcaagaaaatgtagaacataatgtacaaaaggtatcaacaaggtgttaatgaattcaacctcatattgagattgctaagatgaaatggatttccgttaaggagaaattggttgtcctcaaggaaaatgcagaaccttatgtacaaattggttgtcttcaaaatgttggtcatgtagctgcaagcctacaacaaagagaatcaacaatggtggtgatgctacacatgtagaagtagcaatgttggtcttgtaaatccaagatttggttgttgatgaatgatatctatgataatatattgctaagtatatgtgatgatcattaattgtcgtttaattataatgagttgtgccttttgtgccacattgacattggtgatagttaaaaattaaaatggtcttgattgaccaaatgttgtgatgaac

SEQ ID NO: 1906 - DNA, 2414 bp, Zea Mays
tttagcctctcaagatgtttgcaagctgtttcttgattaatattatattgttttgtttcctaaagaagtgcaggcctgatgcagtgatgagaactgtctcactgagccaccagctcacgggttcgaagcagcctgtccgcatttgcgggagaaggcttgcctcggtttatccctttctcaggccccactcttgtgggagcctcatgcactgggtctgcccctttttgtattgtttactaaagtatcatagatgccacacttgttcaactgatcattgaatatcaaattggttgtttttatatcagtcattttacacagtaatttggttaatgaccctccccctccccctccctctccaccataaccctgttgcagccctttcgccacacactctattgattgatcttgttttgttcttcagctgctttgatttctgatccttaggatttcttctggattgctcataatcatgtgagtgatgctagataaactgctcagaagaataaataataaagggattgtatcaaatgtctgcattagtttccctgtttggttttctgcaattagtaataagttacaccaacctttgactttaaaacgagaagcttatatttgtattattttgttaatcaaagtaagctaatgtttgcgtctatctgacagctggaattgggttctactcaccagatctatctgacaactgcattagtttcccttggagacgaattttcaggcttggttaaaaaatctcctcattgtgcctcatccgctctcggttacgatgttctgtgcgccagcatccggttgggccgttgcatagtggacggttgacgtcggcccgttagtgatgggaggctagggttcgggtattttctcggccgggaccattgtttcggactcctattaatattataccggcagggtggtcatttcctccatggcccgagtttttttagatctctgtttgactattgcatttcgtggatgagtctagaaagtgatttgttttcttcattgcattttgtggatgggcctaaaaaataatatttttatctttttcatgcgtcacaaagtaatctgtttttatctctttcattgcatttttctagtttatctgattatttgcctctagacttgaaatttgagttaatttctgttctatgacctaggctatcgagaatatgatgctgtttcagtatcttgtcaacacacttgaagcagattttgtgcctcgccaaattgcaaccaaagagtcactagactgggtgattttcagagagtctctcttaagtatgcttctgggatcacgaaagctcgtgttcaaatcttttgtgaagaactgcatgtgtattctactcaaccagtattaccatgaagctaaagatgattatgaagacatcataccttctgaaagagaaactgaatcaacatcttatcacaatttctccctaaactatttgtcctttgagttaaaaaagacactcatttctctcaggaaattatttgtgatggttatgaaacttgacttgaccaggaaagaagcagacacattagggttaacctcaagagctgacagattcaggcctttgtggaacggaagtggaaattggagattattttgcagtacttttcaaaatattgtggcaagggcgcagtccgtactcgaaggtctgataattcacaagaagatttgaaactggaaaatgttctgaatttctttgtgacagccacaagtgcaaaagctattgtcagaaagatgagtgcagaaattgcccagcttcttttaacacatgcttaccaggcgtgcctttctgctgaagatgccaacagcaattctgctgatacacccgaaaaagttggagctactctccaagagatatcttccaacttcatagctgcttttcaaaacatcaggaaagttagcccggatatccagatatcaccgttcgagaaagaagctctgtttactgctgcaacgttggttaggaaattgaagagcaaagaaaggtttaagcaagagggaactccaggacttgctgcatgatggcgcgaagctcctgttgaaggctgctaatgcaaagatcaatccgcagacgccgagcgaggatggtgggcactgaggtgttgtcatgttggatgatctttgaatcttttgaggggctgctgatgtcttgtgtttcctgttgctgaaataagtgagaagtggctgagaacttagctgttatgtgtgtgtttctggtttgtttcagtttataaacattgagttgtttggtggtgtgacctgaatcaggtcagtttctggtgttttatcccttctagatcttagcccttggtgctttgctagacgtggataagaacaattgtatttctgttatgcaagtaatagaaatggagtgatctccgttcgaaaaaaa

SEQ ID NO: 1907 - DNA, 1598 bp, Zea Mays
gtgaacggattgtaaacgtagcggtcagtgcaaatattattatatacttgaccaaagagtatcatatgggatctgcggaaagtgcaatggttttgtttatctaccaagcagctacaaacttcttgcctatctttggggctattgtgtctgatgcactattgggacgctttctcacaatctcactcacacttttcgcatgcacgattggagctgttcttctctggttgaccacagtagttccaacattggtcgcagaagattgttcaaatgaagaccagagttgtcactcaccgacaacactacaattttttgtcttgctaacttctttattgttcttgtcaattggcgcaagtggtgttcgcccttgcagccttccttttggtgtggaccagtttacccactggagcggcgctccaaaggaccgtgcgctcaaagttctattcggctggtattacgtatcaatgggtggctcagcaatcatttctataactctcatcgtgtacttgcaagacaaattgggctggaagatcggttttgccatttctatggttatagcggcatttgctgcaattttaaacattgttacatcgcccctttacatcaaggtgaaaccacagaaaagcacgtggattagtttagtgcaagtggttttcatcgctataaggaatcgacacattcagcttcctaaagcagcaggtgagaatgatctgcattactgcaacgttggaggactggcaatggttccatcaagcaaaatgagtgtatgcacagttgagcaagtcgaggacatcaagcgtgtactaagtgtcatccctatgtggtcagctacgattacaagtttgttgatccaaacggcttcgttcagggtgctacaggcagaaacgatggaccgtcatgttggtagcacaaggttccaaatgcctgctggttcagtcgcaatatttgaaggcattacattcacattggtgtcaggatgcattacaggaagagaaaaaacgcttagtcacaagcagaaaatgggcatcggcgtgctcttttccattgcatgtgctctttcggcatcagtggtggaggccatccggaggaagcaagcaacaaggcagggcctagaaaataatactgatgatggtggggttgtaaatatgtcagtgctgtggctagcccctcaatgtgtttttgctggcctcattagtgcgtttggatccattggacagatcgaattctactatgaagtgctaccaaagtcaatgagtagcttagcactggccctcctccccctagcaataggtgtcgcaaacattgcaagtacagtggtcgtcaagctcgtcaaagtgattacatgtagtggtggaagagtaggatggcttcttgataacctgaaccaaggccattatgactacttctattttgtgctagcaatgctcggtattgcaggttttatctattttgttgcttgttgctattggtttgaggaaccatcaccaaaccagcttgttcaatctaatgaagatgaaccaaatatgagatgaccatggttggcataaagctttctataatgtcattgggtcaaaccatgtttgtcgaggcatagttttcat

SEQ ID NO: 1908 - DNA, 3131 bp, Zea Mays
gtagcggggcatggaacaaccacaatgcaatgcgcctttgcaggcagtggggcaagaaaagccgagggagaggaggaagcgacgctaccggcgatgcgtggctgaacaattgagggagagttttgctgtcgacgccgactatgaatacatttcaaaggaccacaagccagattgccaaaatgggtccagcagaagcaccaaggtttcctccccagatgtgatcactaagccagaccatgatgaatctgctgaggtagttgactcaaaatccgaagaggcacaaatcacagatagtgagcaggcaacatatgcttctgccaacaatgacttaaaaggaactaaggcctatcaagaagctgatgtttctggcctttacaatcttgcgatggcaataattgattacagaggtcacagggttgtagctcagcatctttttgtatattattatgccaaactgtcacaaatgagtatcatacctggtattcttcaaggagacaagtctgattctcttctgtatggctctgttgataatggcaagaagatatcttggaacgaaacattccattcaaaggtagtcgaggctgcaaagcggctccatttgaaggagcatgtggttttggacggttctggcaatcctgtaaaattagctgctacagtcgaatgcaagggcattgttgggagtgatgacaggcattacattttggatctgatgagagtgactcctcgagattctaactacattggacaagggcaccgcttctgtgtgctgagacctgaacttatagcatcatttgttgaggctgaatccatgaaacaatcgttgaagcagaaggttccagatgctccagttgcaagtacttctgatgctaaggctacctctgttgaagcagatgacaagtctgaagaaagctctgttcatacacacaaggaaaatgacaactcaagctccgagattcttttcaatccaaatgtgtttacggagtacaagcttgatggcagtccagaggaaatcgctgccgacgaagagttggtaaaaagggctggtacatatcttatagacatagtgatcccaaaaattgttcaggatctatgctcccttgatatctcccctatggatggacagactttaaccgatgcattgcatctccatgggataaatattaggtatctgggcaagattgcaggcatggtcaaacatttaccacacttacaggacttgttttctgctgaaataatagttagatctgcaaagcatgttatcaaggatatactgaggcaaagtttggatcatgatattgggccagctattgctcatttcttgaactgtttcatggggaaagttttaggtgcttctacagagggtagtctaagtgacatgcagtcaaagactctgaagggccatgaaaatagccaaactcaaaagtctactaaaggccataaactgagcaatgctgctgcttcaagaaaaagcttgtcagcttattctcatctaacctctgatggaatttggtttagcattaaggaatttgcaaaatcaaaatatcagtttgaagtgccagatgatgcaaggctttcagccaaaagggtagctgttctccgaaatctttgccaaaaggtaggaataacaattgctgcacgtaaatatgatcttgatgcttcaactccatttgaagcctcagatattttaaatctccaaccagtcgtcaagcattctgttccaacctgtacggaagcaaaaaatcttatggaagcagggaaagtcaggatggctgagggaacattgaatgaggcatatgcattgttttctgaagccttttcactgcttcaacagataactggtcccatgcacaaggatgctgcaaattgttgccggtaccttgctatggttttgtaccatgctggtgatacagctggggcagttgtgcagcaacatagggaactcatcataaacgagagatgtcttggtcttgatcatccagacacagcccacaggcatgatgccagtaatatgaataccgctctcagcatgaaaagaagacatatgatatactggtaaaacaattaggggaaaatgactcacggactgaagactcaaaaaattggttgaatacatttaagcttcgagaagagcaggtcaacgcccagaagcagaagggccaggaagctaatgcatccgataacgctgttaaattcttgaaggcaaaccctgcagttttacaagcaatgaaggctgctgcgatccaatcaggtggtgtgtcagcaaatgtcaacaggtcgctcaatgctgcagtcgttggagaaggtgtaccacgactgagaggagtggatgagcgagctgctcgagcgactgcagaagcacggaagaaagctgctgcaagaggccttaatgtccgtaatggccctgtggcaaaccatgcgtctgatgaactagctcagattctcaaactcatcaacgctgtttcggggtcttccactcctggctctgcaaagactgaggtatctgcctctgaagggcaggcaacgaatggatgtattcaaaatggaactgacactgaaccgaaggctgcggataccaacgggctatctgcatcggttaagtccactgtcaacgcaccatttggactggggacaacattggagtcgaagaagcagaaatcgaagcaaaagtcgtagaaaacctgtgcttggaatttcctttagcaacagttttggactgtagagtgatttgggtttttgacctttataggattgccacgttcacgtggtggaagagttcatttgtttttgttggaggttttttaggaggtctcaataatcattacaagaaagaagacaattgtttcgaatcatcattgatagaccactgatgagatattggctaatccttaagttaataaatcttcagtcgatacaatacctgtttaaagcatccttgtgatggctgctattgtttgtcgtacggcatatgctggtataccgttaatgtagttcttgatcatcgtatctttttctagaaggtatacccgtacaatgttgccaactattttattattgctatcgataattattgaactaggctgagcgctgttgcttggcctggccgtgaattatttctagcatcactttttgac

SEQ ID NO: 1909 - DNA, 3271 bp, Zea Mays
atggaacaaccacaatgcaatgcgcctttgcaggcagtggggcaagaaaagccgagggagaggaggaagcgacgctaccggcgatgcgtggctgaacaattgagggagagttttgctgtcgacgccgactatgaatacatttcaaaggaccacaagccagattgccaaaatgggtccagcagaagcaccaaggtttcctccccagatgtgatcactaagccagaccatgatgaatctgctgaggtagttgactcaaaatccgaagaggcacaaatcacagatagtgagcaggcaacatatgcttctgccaacaatgacttaaaaggaactaaggcctatcaagaagctgatgtttctggcctttacaatcttgcgatggcaataattgattacagaggtcacagggttgtagctcagcatctttttgtatattattatgccaaactgtcacaaatgagtatcatacctggtattcttcaaggagacaagtctgattctcttctgtatggctctgttgataatggcaagaagatatcttggaacgaaacattccattcaaaggtagtcgaggctgcaaagcggctccatttgaaggagcatgtggttttggacggttctggcaatcctgtaaaattagctgctacagtcgaatgcaagggcattgttgggagtgatgacaggcattacattttggatctgatgagagtgactcctcgagattctaactacattggacaagggcaccgcttctgtgtgctgagacctgaacttatagcatcatttgttgaggctgaatccatgaaacaatcgttgaagcagaaggttccagatgctccagttgcaagtacttctgatgctaaggctacctctgttgaagcagatgacaagtctgaagaaagctctgttcatacacacaaggaaaatgacaactcaagctccgagattcttttcaatccaaatgtgtttacggagtacaagcttgatggcagtccagaggaaatcgctgccgacgaagagttggtaaaaagggctggtacatatcttatagacatagtgatcccaaaaattgttcaggatctatgctcccttgatatctcccctatggatggacagactttaaccgatgcattgcatctccatgggataaatattaggtatctgggcaagattgcaggcatggtcaaacatttaccacacttacaggacttgttttctgctgaaataatagttagatctgcaaagcatgttatcaaggatatactgaggcaaagtttggatcatgatattgggccagctattgctcatttcttgaactgtttcatggggaaagttttaggtgcttctacagagggtagtctaagtgacatgcagtcaaagactctgaagggccatgaaaatagccaaactcaaaagtctactaaaggccataaactgagcaatgctgctgcttcaagaaaaagcttgtcagcttattctcatctaacctctgatggaatttggtttagcattaaggaatttgcaaaatcaaaatatcagtttgaagtgccagatgatgcaaggctttcagccaaaagggtagctgttctccgaaatctttgccaaaaggtaggaataacaattgctgcacgtaaatatgatcttgatgcttcaactccatttgaagcctcagatattttaaatctccaaccagtcgtcaagcattctgttccaacctgtacggaagcaaaaaatcttatggaagcagggaaagtcaggatggctgagggaacattgaatgaggcatatgcattgttttctgaagccttttcactgcttcaacagataactggtcccatgcacaaggatgctgcaaattgttgccggtaccttgctatggttttgtaccatgctggtgatacagctggggcagttgtgcagcaacatagggaactcatcataaacgagagatgtcttggtcttgatcatccagacacagcccacagttatggtaacatggccttattctatcatgggctcaatcaaactgagctggcactgcggcacatgtctcgcacactgctgctgctaagtttggcgtcaggacctgatcacccggatgttgcagcaactcttataaatgttgcaatgatgtaccaggatgccagtaatatgaataccgctctcagcatgaaaagaagacatatgatatactggtaaaacaattaggggaaaatgactcacggactgaagactcaaaaaattggttgaatacatttaagcttcgagaagagcaggtcaacgcccagaagcagaagggccaggaagctaatgcatccgataacgctgttaaattcttgaaggcaaaccctgcagttttacaagcaatgaaggctgctgcgatccaatcaggtggtgtgtcagcaaatgtcaacaggtcgctcaatgctgcagtcgttggagaaggtgtaccacgactgagaggagtggatgagcgagctgctcgagcgactgcagaagcacggaagaaagctgctgcaagaggccttaatgtccgtaatggccctgtggcaaaccatgcgtctgatgaactagctcagattctcaaactcatcaacgctgtttcggggtcttccactcctggctctgcaaagactgaggtatctgcctctgaagggcaggcaacgaatggatgtattcaaaatggaactgacactgaaccgaaggctgcggataccaacgggctatctgcatcggttaagtccactgtcaacgcaccatttggactggggacaacattggagtcgaagaagcagaaatcgaagcaaaagtcgtagaaaacctgtgcttggaatttcctttagcaacagttttggactgtagagtgatttgggtttttgacctttataggattgccacgttcacgtggtggaagagttcatttgtttttgttggaggttttttaggaggtctcaataatcattacaagaaagaagacaattgtttcgaatcatcattgatagaccactgatgagatattggctaatccttaagttaataaatcttcagtcgatacaatacctgtttaaagcatccttgtgatggctgctattgtttgtcgtacggcatatgctggtataccgttaatgtagttcttgatcatcgtatctttttctagaaggtatacccgtacaatgttgccaactattttattattgctatcgataattattgaactaggctgagcgctgttgcttggcctggccgtgaattatttctagcatcactttttgac

SEQ ID NO: 1910 - DNA, 2147 bp, Zea Mays
aaacaattagggttagacacttcaactccctagtaaatttgaacaagagaaataatatagagttctcaaactttagttatagcaagaaaaagaaatttcaatgcattcaaatggtaatttttgtattagattattatattaaccctagctcatatatagaggaccaattttcagttatactgtttccatgcagtagtattcaatttttaattgaatacaagcatttgaattttggatgaataacattagcgaacatatcattttattgcatgatgatcagttaaaataatttcaacagctacaaatgcacttcctagcaaaatttacctaagattagagttatgcattccagcgccgtttaaaaaagcatatagatctattggttggaccgtttaaattagtatctgatcctaatgttaaattagtgccagttctttacgtcattgatcctatgttacttacagtacgcccgagatcccaaagcttcccagcgtcggtcctcgccgctcgctcggctgagatgacggctttaggtcgcctttcacgtttgcttagttctatcgtccaccgctctggaggccttgtgcgcgccttctccatgttggtcgaggtcgtcgatgttgccgatgtctccgatctatacgtgccacgtgacgcccattgctactacatcttgtatgtgtaccatttcatatttcttgtgagattgtctctgttcatatattttggtctgcttaaatcataaacatagtttatgtgtagttcggtatataatttttgttttagcttgtggtccttcaaatttagtacattgtttgaatttggaatgcatctttctttgtgtttggacaaagctttagccaatgattacttaattaatatgcagatatgcttttgtgatacaaaacataagtttcttgtcatatgaacctagtaacattcaatacatcttttttgtgctcttctaaatgtgatttcttttaaactaactcaattaaatcttccagtggaaagcatgggcctctgaagttatcctctaccagagtgatcagcatttcagagtatttcaaggaagtgtctttgctggacagggcacctaggaaccgtttcattgaagatattgacgatgacctcccgttcttaactcatgatagggttcacaagctactgagatctggattacccccttgtatttcagcaagacctgtggcttatcgattcttgacaccgatttcattgaagaaaaccttggtgtgctgcctgagttggatttactggtattcagatcactgaacatgagtcgctctgagtctgaaatagataattgctacaaaccattcgtgaagctcttcaaggctcttgaggtgcatcgacttttgagggagaagtgcccggcacgtggacagggtgctgcagccaatgcaatcatggtgacgattgaagagaaaatctttgacttcatgaagtcatgcagtacaaatgctatgctaattagttattctggtgctcatggtgagaggacaaagaagcacattgtgggcagtgaagatagaggagatgaggcgctgatatctgaagttagtgatgtcactaaagatctcaaagcgtcgaatgtcccactgaaagttagaaattttatgggcaacaaggagctcagtgttgagggcaaaacaaccaccgcagaaggaaacgttgagattgttccaggagatgagctgacagctactctcttggacgctgtgaatactattcagcgcactactactggatatgatcagattcgttcagcaaagaaaaaagtgatgtcacacgtcaaacagatgaggatgtaccagattcggctttttaagctgctacaagagaaagttatgcacaaagatctggaaattgatcttgagggtccaaagaatgcctctgtgaagttaaaagctgtgaatgcttctgctattgttgacacacacagacatggaatggctcatgctatgcagcctgataatgtaaatcttgtggagcatctgcctgaaggcaatcaagagagcctctccaaagagccatatgacgtgaatgatgtagtagatctgtttcagtacaagtgttcagagtatttgactattgctgttgctgaatttgatgagcgggaaatttga

SEQ ID NO: 1911 - DNA, 926 bp, Zea Mays
actagcaatttctccgtgttgaattttcaattgagaccgagtctacggactacgtctaccccggttccagtttccgcgttcctcgaactcgaagaaatgtgagcctggctgtgatttttcctccctcgctagtcatcttcaagcatcaggaccgaagccacacgacaccagccgtcctcgcgatctctcctccgtctcccattccccaccgcgcccttctccccgcgcctcctcactggaatcggaagcgactcgcggggccggtgcgcaggctgctggcagcgccatccgcggtggccggctaccatggaggatctaggcatcgaggcgaaggaggctgcggttcgcgaggtggcgaagctgctcccgttcccggagctcctctcctctatcgcctctatcaaatacgactaccttacgcggcagcagataaatgatgcacaactcagtacaatggtggcagaccaggtggagcaggcccatgctggcatcaatgctctagcattatctcagataacaataaacaaactacgtgagaacttcattgatatagacaagttgtgtcaggagtgtcaaactttaattgagaaccatgacaagatcaagcttcttagcaatacaagaaacaatttgaacacaactctaaaggatgtgggaggtatgatgtccatttctgttgaggctgctgctgcacatgactcattaagcaatgaccaggagttaattcacacttacgagctcttgatggtaagaggcgttttgctctagctgctgctgcatctcataaggaagaagttggaagattaaggttctgcttttgaacttcaaatgagaatactttgaggatgttgatcaaacatgggaaacatttgagaaaacattatggggccatatcactaactttttcaaactttcaaaagagaggt

SEQ ID NO: 1912 - DNA, 1882 bp, Zea Mays
ccgcctcgcctctccctcgccctcccctccaacatgtcactgccatagtggacccgtcctacgctcccctcacgttgcccgcccccaccccagccaccgtcgcgccgccccgttctccccatcctcagcactccgctacacgcccgccgcagcccgacgccccgtgctcgacgactccccctccatcctctcgccgaggctgccctcgtcctcccccacacccactgcatcgcccgaatctgcgctcgcgatgtcttcacttcccctcgcgccgccgtttcctctgcatcactagccatgtcgccgacttgcctaggacggagcccgtccgaccaaccatgccaggcaccacgccgtcccctcagcgtcgtcctctccacggtgtggtcggccgtctcgaagccctcgcgtcccctagcccatgcacccgcctcggatgccccaactgcccaaacgccatgcccccgcctcaccgtcccctctgcgcagccgcgcagtcgaggtgcgaccgaccgtggaggagccctcgcgacccctagcccaaccagccatgggcccccatcgtttccccttccgcgcagccagggccccaaatttggcaatgcaccatcccccccaacaatcgtgctcgatctggcaattgcgtgcatgatatccgccgctgatttggaaagcgcacgatctacaacgatgatttggaaagtgccttgccaaacgattccaacacaaatcccccaaatcgtgcacccatcatcattaaaaaggtcgcaattgccagactgctacaaccatcctacagctacggaaatccttcgctcacactcctccaggtgaagacagttaccttccctttgcaatccaaccatatatagagatcaacgtcaaaaggaacctcaggctttgtaaacgactaacttaaatcggcgaggttcaggaagcatatttgagacgttgcggctcggcaaaccgcttatcgtcgtcataaacaaggatctgatggacaatcaccagagcgaactagcagaagaattggctgaaaggaagcacctcttctgtgcacgcccacaaacactgggagagaccatccgagcgatggacctggagacgctggttccttacgagccaggggatgccaagccagtcgtcgccctgatcaacaggtttcttggcttcccagttggttgacaaacaaaccatgagatacctccattaaggcgtcagttcctgtacctgtttgatgtaaaatgaattaactggcatggaaacaacaagactgtccttgattgttgcagttgggtttaattaggggggcgtccattcgttgttcttgtcatgcccgcccttgacacgagaagacaatagtattaaacttgtcaatttctggaatgatgtgtggttggatggcatcgctgaagccaataatactttaagatcgtgagaggcccgaagaagacggaagtcacgtcaccctttttcatagttcaatagtcagggcagtcaataataccagggcttgattcaagaaggtgcaaagctgctggtcagggcagcgagcgttaagttggatgctcgtgttgtcgatcaagtggaagaggagaacgatgatacagagaactaaaagtttggtatagtgatcagctttctggtggaagcccgacgaggattgtctacttctagatcttggtcgtatagctttgttctacttctcttgtgttgctcttgttcgagtataaggtctacaatgacataatgcttgtaccatcttttttgtggtaacttattttttctcatgcagtgcatgtgacttgaaactttgttaggacatagtttgtgaaagggaaaatggacccaacatttcctatagtcgattttggtatctgac

SEQ ID NO: 1913 - DNA, 594 bp, Zea Mays
cgtcaatagccgagcattgagaaatcacgtagcgaagagagcagagagcaaggagagagacgtcgcgctccggatcttgaccacgccgtccctccggcctcggttggtggctatggaattcgattgggaggcaaggaggttggtcaagacactggtgtgaagtgtgagccataagggccggccgaatttctcactggagcaagtcggacgttgtggagccgcagttcgacacggaccatgtcaccaccggcacctctttgggagcgtgctcgtcggaggtcaagcgccgtcgcggagcttcaccacgccgtggacccagggcctcttcgccatcatattcgggtgttgctcgccagagcgttgtttcaccggttgccagaattgccgcctccgtggtgatcgtgcgcgcctccgtgttcgaccaccagaggagagggatgagagcgtggacgttggatgtggatggatggatggatggactggattaaatctaatttacccattcggcttgaatccatctgaaccatcagagtttgatcgggcgagtagatgttaagccaagacgtggacgatcgtacgtcgtagatgtggaat

SEQ ID NO: 1914 - DNA, 1067 bp, Zea Mays
gttttttgtcgggatcgctttagattctagcatcagcatcacccgtcaattcagatcttcagctccctacgtggaagaacaggcacacacacaccagcccacttaggcccatcaacgccccaaggcccaacattccgtcaagtccttcgacaaagtcagcctcggctacggcggcaacaagaagctcgacggccgccactaccaggtccagcttaattatgcagatgaccatgatggttccaccttcgttcccgcaagaacactctctgaacaaggccggagcacaggctgcttcgctggttggctggttctggttgtgaagcacagagacgcggtatacggaccggagttcgtcaaggatgacgggaggaacgagctcagcggtttcagccttgctcatatgaaggatgtcgacgatactgaacttgactgaaacgatgaagattcggatggtgattcagacgaccgacgagtatgcggtcaaggaggaaggagaggaggagaagtagaactgcttggccaggtttctgcagtttcatttgtgttggcagatgcattttctggggtctcatcgagtatgtggattttttttattattataatatagtagtagcataggatgagagtctcatagcctatcatcaacttgattctaacacacttttgcagtgtcgagcatatgcttgtcattagatgtttcaggcgtgctctgcttctttcaatcatggtatataacgttcatggtagtgtgtttatgggttaccaaggttaggtcacaatttctaaggggctgatttggtgaacagagaattggagaagatccatgagaaggaatcctcttggtattcaattttaaataacaagaggatccctttccataaatctcatctaattctctggtcaccaaatcagtcccaagaacttatttggatcagccgagtctcgacgagtccacagacccactttgttatatttttctcgttgagctgtagatgggtaggtactgccaggttctacagcaatttgaatgtttgatctattcacgtaacaacacaggtgtatcattt

SEQ ID NO: 1915 - DNA, 2458 bp, Zea Mays
gccctcctgcccctctgctcccctcccagatcccgtgatccgctgccgtgatccgatgccgcacccgccatcaacgccctcctccccctctgctcccctcccagatctcgtgatccgctgcgaggccgccatcaacgccctcctccccctccgctcagctcccctcccaggatctcggcgcgctttcatcgccgccttgatggtccacggctgcacccacatacgacatcgcctgtccgcacgcaagcttctgcctgcgcccacctgtgtgcatagatgtgtgcccccgcccacctcttctgcgcccaatctttacccgtcgtccgcgccgctgttccatcctcgcacccacgcccgagatccacatgtgccgcaccccagccgtgctccggatgctgcaccgcccttccatcctccgcatgcagcaccatgttggccgccgccctgaaacctcgctaccacggagctgcaagcccccgcttccaaaccagcaccatgcagacttccaatttgttttttgtttggagcactgttgattttttctcgtttttttgagaacattacattgcccgtctttcactgttcaacttttcttaattaaccatttacatttaccaaaaacttattcaacttttcactgttcaagttcaatttgttttgtgcagtattgatctgttgtgcagtgtatactttgaggttcggttggccgatcttgcgatcgaataccaaaaacttgtgcggtactctgttgctgaataaaacttggatcaggttaccccaaccccaatggcatttaccgagccgatggaggcgaacctgctacgccaagtgctggactatccccccagtgctctgtccatgtccatccctccttcagcttcattgatggttgcactgctctactatactataagtgaattgagttaaagcattttttgttcgactactgtttggtgcatgcaacttaatatggctgatttttagtctttctattttagtttataaattgtcaatcacagggattaaaagagactaaaagtaaggtttcaggttctatttctatccatctttaattaagggctgaaacgatactgtcttgattcctaattcacctaatattcctagaccaagaacgactcgggttaatggtcagggatgccaaattgtttcagtaaaactaagcaagctcgtatgatgattatgtacctacttgagaacaaattgtctaaaacatatctgctactacacttcagtaaaacaattgatcacacacaagaagttcagatcagaaagcaggctgtcgctactcccgtcaggttctcggatggttcccgtcaagggctgaccatggagaagagcacagtggtggtcagtgtccctgttgttgtcatggccgagactgctgagaccgactacagctcgagcttctctattcatggttacgaaatgtattggggttctatatttttggtgctagacttcttgtcgtggattcacatttgctacctggggatgcagagtcccagaaagatgttgggaagggtgataaatcaagggataagggaactgctgagaagtttgcaatatatcagaagcatcgttcttcgttggcagacactgttcaattcaggaggccagctgctccaacttccagtgtgaatgctgatattgtgggaacatccactctgcagtctgcatctctaccgaaacaagaaccctcaacagctacatccaagagctatactttcagagaaggtgatagggtgcgttatatgggtccagctcagttatcctcattgtcacaaaggaagagagtggctcttcactcccatcggattgacaaaaacacactcggacaaccagtgctggtattaatcgagatgtcgcatcaacaaacgctcatgcagagccagattctactcctacagtcctacgtctacacgagacgacacaagtgcatctataattgatcttttcttttcatctactattctcaacagacacagcagaactgcatgccagcagaggaatgcatatctagtggagataaactgtaatcggccgcctggatgacacgataggaccacgcgtaagaacaaactgggaccaaataataaaagacgaacggagaaaacgtgtcgttgcagatgcccaggttgtcgcactggctccgtcactgtctgatcgagtatctgcaaagtagggattaggtttgtcaccgttgactttacatgcgcctgcacattattctcaagtagtagtacttgtaatcacccctaggccctagtcaatgtgcacgagggaggccaacgtggcttcgcccttgctttaaaatctgactgttttttttcttcactttctcataagaacgtacttttcctgtatcagtcgcctagatagttattttaaacttttacaagaattacagcgggaggtggtgataacgattacagttaaa

SEQ ID NO: 1916 - DNA, 2574 bp, Zea Mays
ccgctgtcgcacacgccctcctgcccctctgctcccctcccagatcccgtgatccgctgccgtgatccgatgccgcacccgccatcaacgccctcctccccctctgctcccctcccagatctcgtgatccgctgcgaggccgccatcaacgccctcctccccctccgctcagctcccctcccaggatctcggcgcgctttcatcgccgccttgatggtccacggctgcacccacatacgacatcgcctgtccgcacgcaagcttctgcctgcgcccacctgtgtgcatagatgtgtgcccccgcccacctcttctgcgcccaatctttacccgtcgtccgcgccgctgttccatcctcgcacccacgcccgagatccacatgtgccgcaccccagccgtgctccggatgctgcaccgcccttccatcctccgcatgcagcaccatgttggccgccgccctgaaacctcgctaccacggagctgcaagcccccgcttccaaaccagcaccatgcagacttccaatttgttttttgtttggagcactgttgattttttctcgtttttttgagaacattacattgcccgtctttcactgttcaacttttcttaattaaccatttacatttaccaaaaacttattcaacttttcactgttcaagttcaatttgttttgtgcagtattgatctgttgtgcagtgtatactttgaggttcggttggccgatcttgcgatcgaataccaaaaacttgtgcggtactctgttgctgaataaaacttggatcaggttaccccaaccccaatggcatttaccgagccgatggaggcgaacctgctacgccaagtgctggactatccccccagtgctctgtccatgtccatccctccttcagcttcattgatggttgcactgctctactatactataagtgaattgagttaaagcattttttgttcgactactgtttggtgcatgcaacttaatatggctgatttttagtctttctattttagtttataaattgtcaatcacagggattaaaagagactaaaagtaaggtttcaggttctatttctatccatctttaattaagggctgaaacgatactgtcttgattcctaattcacctaatattcctagaccaagaacgactcgggttaatggtcagggatgccaaattgtttcagtaaaactaagcaagctcgtatgatgattatgtacctacttgagaacaaattgtctaaaacatatctgctactacacttcagtaaaacaattgatcacacacaagaagttcagatcagaaagcaggctgtcgctactcccgtcaggttctcggatggttcccgtcaagggctgaccatggagaagagcacagtggtggtcagtgtccctgttgttgtcatggccgagactgctgagaccgactacagctcgagcttctcacttcttgtcgtggattcacatttgctacctggggcacctttgcaggatgcagagtcccagaaagatgttgggaagggtgataaatcaagggataagggaactgctgagaagtttgcaatatatcagaagcatcgttcttcgttggcagacactgttcaattcaggaggccagctgctccaacttccagtgtgaatgctgatattgtgggaacatccactctgcagtctgcatctctaccgaaacaagaaccctcaacagctacatccaagagctatactttcagagaaggtgatagggtgcgttatatgggtccagctcagttatcctcattgtcacaaaggctcctctccttttgctggcttcgctgttggaagcgagacatcatgtggtgtggataacgtccttgcagagcacgtgaactcaaatttcactctaatgccagctagctgctacatagtgcacttctgtatattatgagaagagagtggctcttcactcccatcggattgacaaaaacacactcggacaaccagtgctggtattaatcgagatgtcgcatcaacaaacgctcatgcagagccagattctactcctacagtcctacgtctacacgagacgacacaagtgcatctataattgatcttttcttttcatctactattctcaacagacacagcagaactgcatgccagcagaggaatgcatatctagtggagataaactgtaatcggccgcctggatgacacgataggaccacgcgtaagaacaaactgggaccaaataataaaagacgaacggagaaaacgtgtcgttgcagatgcccaggttgtcgcactggctccgtcactgtctgatcgagtatctgcaaagtagggattaggtttgtcaccgttgactttacatgcgcctgcacattattctcaagtagtagtacttgtaatcacccctaggccctagtcaatgtgcacgagggaggccaacgtggcttcgcccttgctttaaaatctgactgttttttttcttcactttctcataagaacgtacttttcctgtatcagtcgcctagatagttattttaaacttttacaagaattacagcgggaggtggtgataacgattacagttaaa

SEQ ID NO: 1917 - DNA, 684 bp, Zea Mays
aaatgcagccacacaacagtagctagctcatgcagattcattcagatgcaccaatcgtgagtgtggatccatggctgtgctgtgcccaacccaaggtacaggttacttgtcactgcaggagacgaaacgactgatcctctttggtcacatggctcaaagaattatcaaagggccatgtgatgtgcttgtagctaacatgctagccgttgtaggcgaaatagagacactcccattccttcgtcacccatggggtcaaaataatcgtggcttgttctctcgcacgctagaagcagcagcgtcgaaaccactcctcaaacagctaccacctttgaattattgccgacatcgtcaatcgcaccttaaggagacgcgtccattgagatggacatggttcaattcaaggcagcaccggtgccgctccatagtagcaagtgactcctcatcgaccaaggaacagaagtatacttccaggaagcagcaagcaccactgactgaagacgtcctccctcaccttgcgaagaagttgttcgccgatgcagccagtgggaacaccggaggttcaggcagtgcatcgacctaaaaatgttttaccttcttgtatcaaactgacattattgtattattgagtacaatgagaacatataaaaaagattgtaacaggatattattgtattattgagtaca

SEQ ID NO: 1918 - DNA, 2793 bp, Zea Mays
actcactaaaagtacctgatcattgcaacttatatttatatattttggatgacgaacaacttagaaatgatatcaaggttatatataatatcatatcttgtgtttgttcccgtaaaaaataaccaccaatatctttactactctataagcctttattgtaggcctccacacccgtgcgccggttctgcctctcgatgcccgtctgcccgcgcgccccactccctcttccctggcgcgagatggatccgccgcgaatcgcccacaaatcatggcagtacttctctggttcacgcatctgtcggtccacaaatcacgcatccgtcatggcagcgacagacagacaagatttaacttgcatccatggcagccgccgcgcatctgtcggtccacaaatcacgcatccgtcggtcccaaatcacgcgccagggaaggtgctttccaaatcatgcgccagagaaggcgccttcccaaaacacacatccatggcagccgtcgcgcccgcgccagggaaggtgcttcccaaatcacgcgtcagggaaggtccttcccagatcacgcattcatggcagccgcgcccgtaaaccgcgcctcccccacgacgctcttccatccacagcgtcgcccccttccatccatggcagtcgcgctccctctgcgagcctatacgtgcggggatgttgggaggcgctaccaccaatcgagcggcattagccccgacctgaagcacacatggccggaatccagaggatatcgtgcccccgcccccatccggagtctgccccgcatcgtgcgatgctcgttgctgagctcccgatgaccgcccgatggtgtcgaaccccgcaccgtcgtcggcaccgcgctactcggcgtactcgctaccgtcgacccacctccccggagaggacatcctcttctgcatcgacgccgacctcgaggtccacgccaagatgaagtccgctgccgtagcatcctcgggatccacgtccactgcgtcgccgcagtccgtaggagctgatggtgccccggcggtggggacccggactgtggtcgcccgagaaccacccacgttgagactgacgcatcccaagccagataaggatggataccctcacatcttcgattatttcgccgtccaaacacatgatttcctggttcccctttggcttcctccagatcttgccttcgcccgcatcgaccatcgcgccgctgccgtgacctaccatggagctctgcctcgccgcgcgcgccgggacgatggcggccgcgtgccggaggatggcaccgacgataggcgtgccgaagaagaggcacgacggtggcactgtgcgcgtacgttgcgtggtgacgacgcccatgggggagaagacggagtaccgggacggcccgctggagcgtgcgttcatggggctgttcgcgcgaagatggagaagtacgcggcgaagaagtcggcggcgcaggcgaaggagaagagggcggtgtgggagtgggactacgagagcttcgtggacgtgtcgtggcggttccggcggctgttcccgccgacgcggtgggcctgcgagttcaacacggcgctgaccgtgcccttcttccgatggctcgtgggcccctcggaggtggaggtcggcggcctccggcagcgcagcgaggtgcgcatcgagaagtgccggtacctggagagcagcggctgcgtggggatgtgcgtcaacatgtgcaaggtccccacacaggacttcttcaccaacgagttcgggctccccctcaccatggacccaatgcatatttcgaagacatgagttgcgagatgatatacggctaggtgcctcctccgttggaagaggacccggcgtcgaagcaagcttgctacccgagcctctgttccatgttgacgctgtgtgccccggcctgtcccaagcttcaatagagcggttgtgtcgtccgagcattgatctgaaccagcacagtttatcagggacgtagcagtgagttggttatagagaactcagatttgatggctaaacataaaagcgacttagaaggattcaagttatatgtatactaaagtggtgaggactcgcaagaagttcaatccactgccagaaggttagatttgagtctcaattattttcaagggaagagatcatgctgataattcactccatgggtacgaggttttcaaaaatccgagcattagtgatgtcctgtgcacaacaacagcagaggctcttgcaatggggaaattcgtgatttgcgcagaacatccatcaaatgagttttttcatgtcatttccgaactgtttgacatacaagacttcagaggagtttgttgcgagagtgaaagaggcaatggatagagaaccctaaccgctaacccctgagcaaagatacaacctttcgtggaggcagcgactgagagattcatggagtactcagaccttgacaaggttctgaacaatgaggctgctcagcctaaacaaggctggcaaccgaagccattcctggtacccgggactactataagcagcactgtgtggatattagtctcttgcctccttaagtagcaccctgtatatggctggtgatatggctggtgatgactaatcgtaggtatatatgtacataatacaccatgtcgctcttatgtcgactaatgtttggagtattgtaattgtagcacgcatgacgacctttggccattgttttgtactctgtaataaggttctttctccttaaatttggagttttattgcagaaatttgtagtacatggatatcaaaagttcataactccagaaga

SEQ ID NO: 1919 - DNA, 3519 bp, Zea Mays
ccggacagtcccaagcaggtcaaacctgcgctgctgtgccgctggagagagaggttctaatgctcttctgtcccgcgccgcattaatttcgcgattttgagaggtctagtactccggtccggtgtagccgtgtaggaggacgcaagggcaaggcgagctgctgctgctgctgctgccgccgccgccgccttgtcgggtaacgagcgacctcgacgtcggacgtctcaagtggtcacatgctcgaggtcctggacatggcgccgccgccaccaccgccgccgccgccgccgcatgcgcggcaccatcagggggcagccaagggcggccacgcggagcggaggaagcaaccgctgcagagcagcgtgacgcagcccaaggcggaaccggcggcggcggcggcggcggccgtgctgccggagggaggcaagaggtgcggaggaggcggcgggaggcgccgcggcgggcgcggccgggccaaggcaccacctggtgagcctcgcgtcgcgctagcgctggcgcctccgccgcgcacggtcattggcccgcccgtgccgagcaaggggctgtcgttctgccgccgccccggattcgggaccgtgggcgcgcgctgcgtcgtcaaggccaaccacttcctcgccgagctcccggacaaggacctcatccagtatgatgtgaagatcacgccggaggtgagctcgcggaccgtgaaccgggccataatggctgagctggtccgcctctaccgctcgtccgacctggggatgcggctcccggcctacgacggccgcaagaatctctacaccgccgggaccctcccgttcgacgctcgcgagttcgtcgtgcggctcaccgatgaggacgacggcaccggcgtcccgcctcgggagagggagtacagggtcgccatcaagttcgccgcgcgcgccgacctccaccacctcaggcagttcatcgccggacggcaggcggacgcgccgcaggaagccctacaggtactcgacatcgtgctccgcgagctcgccaaccagaggtacgtgtccatagggcggtccttctactcgccggacatcaggaagccgcagcggctcggcgacggcctgcagtcatggtgtgggttctaccagagcatccggccgacccagatgggattgtcactcaacatcggtgagctgtgcgggctggggaatatttcttgccctcatgcatgtgattcctttcttttttgtcctgtggctgccgcttacatggccatgttgacggcagacatgtcgtccacggcgtttattgaacccctgccggtgatcgagttcgtggcccagatattaggaaaggatgtcatatcaaggccattggccgatgctaaccgaatcaagatcaagaaggcattacggggcgtaaaagttgaggtcacgcaccgggggaatgtaaggcgcaagtatcgcatatctgggctcacaacacagccaactcatgaactgattttcccaattgatgaacaaatgaatatgaaatctgtcgtggagtacttcaaggaaatgtatggtttcaccattcagcatcctcatcttccttgccttcaggttggaaaccaaaagaaggcgaactatttaccaatggaggcctgcaagatcgttgaaggccagagatacacgaagaggttgaatgaaaaacagatcacatcgttgctaaaggttacatgccaaaggcctcgagaacaagagatggatattttacagacagttcatcaaaatggatatgagcaagatccatatgcgaaggaatttgggatcaacattagtgagaagctaacctatgttgaagcccgagtccttcctgcaccttggctgaagtatcatgacactggaaaagagaaagagtgcttaccacaggttggtcagtggaacatggtaaacaagaaagtgataaacggatgcaaggtgagccactgggcatgtataaacttctcaaggagtgttccagaagccacagctcggggattttgccaggaattggcacaaatgtgtcaaatttcgggcatggaatttaacagtgagcccgtgatgccaatatattcagctagaccagatcaagtagtgaaggcacttaaaagtgtgtataatattgcactgaacaaactcaagggtaaagaacttgaacttcttctggctatactccccgacaacaatggtccgttatatggtgacatcaaacgtatttgtgaaactgatttgggattgatatcacaatgttgcttaaccaagcatgtttttaagatcagcaaacagtacttggcaaatgtctcactgaaaattaatgttaagatgggaggaagaaacactgtgctcctggacgcaataagttggagcattcctttggtcagtgacatcccaactattatatttggtgcagatgtaacacaccctgaaaccggggaggactcaagtccatcaatcgctgccgttgttgcttctcaagattggccagaagttacaaagtatgctggattggtttgtgctcaggcacaccggcaagagctcattcaggacctttacaaaacatggcacgatcctcagagaggcactgtaacaggcggcatgatcagggagctgttaatatccttcaggaaggccactgggcagaagccattgagaataatattctacagggacggtgttagtgaaggccagttctatcaagttctcctttacgagttagatgccatccgtaaggcatgcgcatccctagaaccaaattaccagcctcctgtaacatttgtggtggttcaaaaacgtcatcatacgagactatttacaaacaatcacaaagacagaagtagcatggacaagagtggaaatattttgccaggaactgttgttgattctaagatatgccacccaacagagtttgatttctacctctgtagtcatgctggaatccagggaacaagtaggcccgctcactaccatgtcctctgggatgagaacaatttcacagcagacgaaatgcaaacactgacaaacaacctttgctacacttatgcccggtgcacacgctcggtttctgttgcattccgggcgcggttctacatggaaccagagatgtcggagaaccagacgtcgaagagctccaatggcacgaacggaggcttggtgaagcccctgcctgctgtgaaggagaaggtgaaaagggtgatgttctactgctgacgaggtgaccgctttaacaaccattcacatgctgtagctaacttggtagggttcagtaggggattagattagctttctccaggaacgaagaggaaacgggatgcgtatttggatcatgaacaatcaatctgttagcgatcgctgtaaaatactcggaaatgcctgtataatagttcttgttggttcagatgcatgcatccaatgttccagtgtactatgaaaagggggtgtagaagaaaccttctggtgttttctaggttgaattcaatcaattcattaacatcacgctggagtacaatctctgatgtttctg

SEQ ID NO: 1920 - DNA, 2318 bp, Zea Mays
gtttctgaacctgagctgcgaagtgtggtgggtaaagagatcatgggaaataacaacgtcactggacaacaagtatcagaagagaccactaatggagctgacaaaatcgttgagccttcaaatagttcacctgggcccaacggcacaaacgacactgagaaggatggcgctgagtatgtcaactggtcaaaatcctcaaaggaacccgtcattaccaatgctgaagataagcagatggcttcatatcaaaaaaaatcaccagataaggttgaaggcttagatgagaaaagcaggagctcaattcagtataacacatcaacacgagatgatcagactagtaacttacaaaaagatgatgaaccattgaggaaagaagcaactgaaacagccatattttcttccgaaacaattgctcttgtcagtaccactgaagatgtgacaagctacaaggatagctcaatctataacgaagaaattgtaccacttatgcatgggactacagaaacaagtgaagaaactatccaaggcaactacaaatcattgttacaagaaaaaatagaaggttcactagaagaactggaagaatctagcagtcatgacaattcccccatgggtggtagtctagctggtgaaaatacaactgagaacacagaacaaggatacattgaggtggcaacagtagaggaaattttggtggtaatgcaaggagaaactacatcatcaactgaatcaattgtcagcacttatcttgatgctgatgactctgagatcaaggaagtggttatagaagataagcctgtacaaaaagagagtctaccagatgtgcaaccatcagatggcacaaacctagagatatccaagaatgacaacatgcaaatacaaataccacatgaccaggaagaaaacagagcaataagcaaaattgcaacagtaaatataatgactgaaagtgatgaggcatttgaggatgataataatatccttgcattaggaaatcaggatgaagataatgcagtaagtacattatgtggtaatctctataatgatgaagttgttgcaaagtgtcaaccatatctaaaaaatccaacttcgatgaatgatccagaactggaaaatgaacaaaatgaaagggtagttggttcaagacgacagagttcagtttctgttactacaacaatgaagcataatggcataggaacaatatacaaggaagaaggaatagctgagaaaaatatcacggcttggaatctagaagataattttgcaacagagaacaaacctgaagaacattatggtaacttagtcagtattactgaggtcaatggaaaggattttacaggcttacaatcatctttgtcagatcatcattatattgggaatgaagagatacaaagaaaagtcagtggagtatccggaatagtagagtttgataaagagacagtaaaggaaattttagaagaagataaggtaaataatgtagaaggtctaggcctccattttgatgcacatgtagtgacaaaggagggaggagacttatccaatttaccaaaggccataccattaattcctcttcaatcactagaagatattgacaggaaggtatatagaaccagagataagcaagaaactattacaaactcgcaagttgaccaatctcaactgatactgcttgaaaaatacgaggttttgaaacttgagaatggcgagattcttagaaagtgtatgcagttggtggaagatagctctaatgtagtcataatctctactgatggtatcaaccatgagaaagtagatacaaacactacatcttcagattttacctttgaagccaaccactaccaaaaggaagtcacagaaggcatttcagctgcagcctttactgctcaatgcaatcaggtgaaagtcacaacatgttttggtacggctactgaggaacaacatactcatcagacatcaactccagggagagaagccagtgaagtgactccattacttcagggagcgcaaaatataggtttttccaattgtattgagcagcatagccatgtacacatggaaatccccacagccgacattgctgtaatgcaatttaaaattgaggctgatgaagaatctgagaggagcccactgttaagccccagggaaccaacaggaggagacttcagaatagcaaatcattctgcaagatttaagaaaccatttgagagcttgctgatgcagagcgaagctggtatatggtctccattgaaggaaccagaatcgaactcgaagagtaataccatgttccccaagatataaatttaaagatatcacagttt

SEQ ID NO: 1921 - DNA, 3803 bp, Zea Mays
atggactatgtcgcgtacacctatacgtcgagctgctcggccaagatcgatgccagagatgcttcctccgcgccgtccaagccagaggggattcccagaaggggggatttgttgcgtgatctcggggtgggagggcaggggcagttgggtgggaaatgggctagtttgggaaccacaatttttcttgggaaaatagaaatcccttgggaaattggggttcccaaactagccctaaaggagcctaaagagatacacacatccagacgtttgaaatggtcgtgggccgttatgcaaatcccggatcctattcacgggctaggaatgagtaaacaatttttctctggtgatgccagaaaaaagcggccccttataatgactgcaaattctatcaaggccgacagcccactagagccgcccgagatgtaccacgcgatgcggctgcgctgcctcctcctgcaccctccgatgtggagtaattcgagctccctcggcatctctgccagcggcgtcagtagaggttccttcgtcaggaggttcagcgcgctcggggcgccgcggccgcctggtcctgcccgacggctgtgtcggttttacggctccaagggcggcgtcgggagcgctgaggcgaggggcgccgctgcgtccccggcggcggcggggagcagcggcaggtgcttcgagcaggagcacgcgcggctcggggaaagggaccagcaggagtggctgagcggcgagaggtttctcaccggctgcaagcgacgggagtcgacgttcctcaccaggcgggagaggttccgcagagagttcctgcgccgcgtcgtgccgtgggagaaggggtcgctctcgtggcagaatttcccctactacgtcaatgacaatgcgaggcagctgctgagtgagtgtgtggcgtcccacctgcgtcacaagagtgtcacatcagaatatggctcacgtttggaatcctctggagggcggatattgctccaaagttctccaggaactgagctttacagggagagatttgttagagctcttgcacatgagttgcaagtgccgctattggttctggacagcagtgttcttgcaccatatgattatggggaggattactcagaaagtgaggaggaggatgagcatgctgagtcagaggatgaaggttcagaatctgaaatggaagacgatggtgatgaagattggacaagcaacaatggaaaatctggtgaaagtgacgatgaggatgctctcaaatctgtggaagatctgaagaaatctgtggatgacctaaaaaagttggttccttgtactatcgaggaatttgccaagagaattgctggtgctgaagaaagtacggcgtcagaatcttctgaaactcctgagtcaccagaagaagagaaaaggcctttccaaaggggagatagggtgaagtatgttggaacctctgcagtcgttgaagcagatcagaggatcattttggggaaaatacctactcaagatggctcaaggagtgcctatacttttattagtggaaggggtctatcaaatggacagcgtggggaggtatatgaggttaatggggatcaggttgctgtcatatttgatccttctatagagaaatcacacaatgcccatgaagatgtaactaacaaggaggaaaatggatcagcaactgtttactgggttgattgatattgcacatgatcatgataccgaatcagacgattggcatattgcacttgaagcactttgtgaggttttgccatctctacagccaataattgtctactttccagacagttctcaatggttatctagagcagtttcaaaatcagatcgcagagagtttgtgcaaagagttgagaaaatgtttgaccggcttaccggaccggtagtattgatatgtggccagaacttactggcagcagcacccaaggataaggaacaacctgcactgatgttccacaatctctctcgcctgtcttcactgccatccccactgaagcggttggtagggggcctgaagggagaaagatattcaaggtccagtgacatatcaaagctcttcaccaatagtctaactgttcctcttccagaggaagatgaacaactacaactttttaataatcagattgaagaggatagaaaaattatgatttcgaggcataaccttgttaaattgcacaaggtgcttgaggagcatgatctttcttgtgtggagcttttggatgtgaagttggatggtattgttttaacaaaacaaaaagcggagaaggccgttggttgggctagaaaccactatctgtcatcaacaactcttccttctatcaaaggtgacaggttaatcattccccgtgagagtctggatatatcaatcgagaggctgaaggaacagggtataacagctaagaaatcctctcaaaatctgaaggttttggctaaagatgagtatgagcgcaatttcatttctgctgttgtgcctccgaatgaaattggagtgaaatttgacgacatcggtgcacttgaggacgtgaagagaacattggatgagcttgttacacttccaatgaggagacctgaacttttttcgcgtggaaatttgttaaggccctgtaaaggtgttttgctttttgggcctcctgggacaggaaaaacactcttggcaaaagcccttgcaacagaagctggagcaaattttatcagtataactggttctacactcacatcaaagtggtttggagacgcagagaagctcacaaaggcccttttctcctttgcgactcgactagctcctgttatcatatttgtggacgaggttgacagcttacttggtgcaagaggtggtgcatttgagcatgaagcaacaagaaggatgcgcaatgaattcatggcagcttgggatggtctcaggtccaaagagaaccaacggatccttattcttggtgcaacaaatcgtccatttgatctggatgatgctgtgatacggcgtttacctagacggatatatgttgaccttccggatgcgcagaaccgaatgaaaattctaaagattttacttgcgaaggaaaaactagaatctgattttaagttcgatgagcttgcaaatgccacagaaggctattcagggagcgacctaaagaacctatgtgtagctgcagcatataggccagtccatgaactactagaagaagagaaaaagggacgtgtgagtaacgaaaacagttatctgagacccctttgcttggatgattttatccaagcaaaagctaaggttagctcgtctgtttcttatgatgcaacaagtatgaatgaattgagaaaatggaacgagcagtatggggaaggtggcagcaggactaaatcaccatttgggtttggcaactgacactacagtagagatttaccaatactgtatctttgtaacatttaggctgcctcttgttggtagattagggagtcagttccatttttttaccatgagcttatttgaacaacctcgtaatcacctcgtgcaaacaaaaaagaatctagttaaacgccaattttgcctactagttaatggtcggaaataccagtgtagaatcagaaatcggctacacactacaaaataatgtatctgagctactctgggtaagcattaagctttaacaagatgtaaacggcttaagaattttcagttaattcatactagttctcagcatggaattcagtagaactaatttagtattgatagctagtcgatggctggaatcttcaggatgtctcctattgcccagaaactttgttcgtatcaaaagaatggaagagaa

SEQ ID NO: 1922 - DNA, 1872 bp, Zea Mays
ctcgcccacacgcgaaggcacctagcagccgccactcgccgaactgaggaacacgccgggcgacgggatacagcagcagcgcgcccctctatccccgacgcgacggcgccctgcagctgcagataaacctgttccaatggccaaacaaaaagagggtgtggacaaaagaactgctaggaagatgatccgatctacggaaggctgtgcaaagagcattactttcgagaggaacaacaaatcagacgctgtgcagcttcacgatctgccgaatgacatcctaggtagcatactatcacggttgacattcagagaatcctcacagatgggccttgtttctcatacctggcggcggctgtggagaagctgttgccggaaactggtcttcaccagtgccaccatgttccaacccggaaataggagcatcaaacatacaaggaccaactttgccatgagagtcaacagtttcttgcgtcagctacacactcatcctactcttaataagtttgttattaagttcgggctgcgcaggaagcacactcgccatgtcaacagatggattcgcttctgctccgtgtcgcgagcaagacacatcactattaatttcactcctggagtgaaagattttttcatgggtccagccaacagcaagtacatcttccccctgaacgttttcagtggtccagaaggctcctctacacatgtcagaactcttcatctgggctatgtctgtctggacacaacctcgtctgatttcatgatctttgcaaatctgaagaagctcactctgcacaaaatttcctttttgggagacctccagtgcctgatgctgccagaatgcaattctcttgagtgtctgagcatcagcttctgttccttgcctggtttaagcacatgccaaccgctgcaacgtctgcgatgtgttcgtttgcactactgctatctaaaaaagattgagctggaagctccaaatctaacatcgtttgacttgaccaaccaaccaattccatttgtgcttggtggatctctgaatgtaatggaagccaacattaaactgttagctaaggactcaccttatggtgataatctggactacatctacactgagcttcctgctgcgctgtctcatgtgcataaactctcgataacctcgggtctcttcgtttttgatcagctgcaagggttttccaaaacctcagccagattcatcaatctgaggcatctgaccatgtatttgcctctttatggggaacctaagtcaattagtgggattcttcgcttggcctacctactggaattggccccagctctagaagaattggaattgcatgtgaatggcggtgacgtggatgttgggtgggcactcagagggaatatgttaccgtactcacacaataggctcaagagggtccttatttcaggagccagtgtatgggaggggctaatggagctggcatactacatttttcggagtgccaatagactcgaaagtatggtcttagatccaaagataaggattggggctcctcagctggatggttggatgattgatattggtagggagacgatcaaaaagctttttgagggagaggagtttcagagcattattactattctgtaagaatggtaagataggccacaggattttagtggtcacaccaagtggccatgtttgattatgccataggtttgaccagtatgctaaaaaatgtttgttgttttcatttccgaccttaggaaatgtaaattaagaccctgttccaatctcgcgagataaactttagcagtttttttagctacttttagtcatttgtaatctaaacagtagagctaatggtggtaattgaaactaaattttagcatttcaattcatat

SEQ ID NO: 1923 - DNA, 1565 bp, Zea Mays
atggcggcaggcagccaggaacagggagatgggcttattgacaaaatcagaggagacattgctatccttacattgctcgccgaagtattatgtcttttggacatgattgtaaattcttttgcgcatacaatatctacaaagcctgttgatcgctacacaagaccagagttcacagatgatggtccaatggcaatcaatgctggacgacaccctattcttgagaccttgcatactaattttgttcctaacaatatatttctctctgaagcatctaatatggttcttgtcatggggccaaatatgagcgggaaaagcacatatctccaacagatatgtttaattgtcattcttgcacaaattggctgttatgttccagctcagtttgcatccttaagagttcttgatcgtatatttacacggattggtaacggggacaatgttgagaacaactcgagtacgtttatgacagaaatgaaagaaactgctttcatcatgcaaaatgtttcttcaagatacactgtttttgccacgcacatggaacgcttgtcagaactttcaacaatgtatccaaatgtgaagatcctccattttgaggttgacttgagaaatgaccgcttggatttcaagttctgcctaaaggatggcatccgacgggtaccacactatgggcttctgctggccagagtagctggtatccctacttcggtgatcgacacttcaacaagtatcacttcacagatcacagagcaggaaatgacaaggatgaatgccaattgcgaggagtactggtcgcttcagatgacgtaccaggttgtgcagcggcttatctgcctgaagtactcgaaccatggcgacgactacatccgtgaagcactgcagaatctcaaggagagctattctgcgggccggctaacataagaggtctcatcagtatgagctctggcccttaataaatgttaaataagagtttttcgattgcatggtgttcgttcgcgacatgttttgttgttttgcaggtgtatgccgctggaggatccataagccaatgtatatattcctccgtcaatgtgatactatcttaggtcctcaaacgcacatctatcgttatcgcacatgccatgtaacatcttatcccctattcatatagatgatcacgaagcaagacagcatgtgaatgtttagaacaagtgattattatgacctcagccacatagcttttacgaaaagatttactggaatatatggaacaccaaagtaggagattagagtggtcgatacatacaaactgtaggtttgaacagcaaatgttggcattgttttctgccaatacattaatcgatacagtagcatgagaggaggaggagcacagaaggcggcctagaccacacaagagagcgggaggtagtgtggagccgagcaggacaagaattcatgagggacaaaaaaaaaatgtatggcaaaatcattcattgtcataaaaaacttgtgttttatataatttcagtttcatgtcaatgtatcaataaaataagcaaatataccgttaagtttttgttgaccgagac

SEQ ID NO: 1924 - DNA, 6421 bp, Zea Mays
aaaacctttccgtccgttactgctatagcgttcatcatcccattccttccccaccaccacctcctgcttctacactactggactgctgctgctgctctccccctcccctcccctcccctcccctcccggccgccgccgccgccgccgcgtgttctctctcatctagggtttcatctccatctagtcgagcattcccgtgctggggtggggagtgggagactcgactcgatttgattcgactccatttcgtgctagcgcctagcgctgcagagcgagtgaggtgacgggaatggcggctccggggcggaggacggcggacgtgtcctcgtcctcgccctctccgtcccctgccgccccctccaccggcaggcgcctcctgcgcacgcagaccgtcgccaacctcggcgagtccatcttcgacagcgaggtcgtgccgtcctcgctcgtcgagatcgcgcccatcctccgcgtcgccaacgaggtcgaggttgaaaacccgcgcgtcgcctacctctgtcgcttctacgctttcgagaaggctcaccgcctcgacccgacttccagtggccgtggtgttcgtcagtttaagaccgcacttctgcagaggcttgagagggaaaatgaccccacactgaagggaagggtccacaagagcgatgctagtgagatgcaacgcttctaccgcgaatactacaggaagtacatccaggcactgcaaactgtcgttaataaggatgaccgtgcgcgcctcactaaggcataccaaacggctgctatcttgtttgaggttttgagggctgttaatgattcccagtccgttgaagtcgatcaagcgattttggatacacacatcaaggtcgaagaaaagaaaaagctgtttctaccttataacattctcccgctcgatcctgaaagtactggcgaagccattatgcgatatccagagattcaagctgctgtttatgctcttcgcaatactagaggtctgccatggccaaaggaccaagacaagaagcctgaagagaagaatactggcaaagaccttcttgattggcttcaggctatgtttgggtttcagaaagacaatgtgtccaaccaaagggaacatttgatactgttgcttgcaaatgttcatataaggaaaatacccaaggctgaccaacaaccgaagttggatgacaaagctctggatgatgtaatgaagaagctatttaagaattataagaagtggtgcaagtacctcggccgcaaaagcagtttatggttgccaaccatccagcaggaagtgcagcagcgtaagcttctttatatgggtctctacctgctgatttggggtgaggcggccaacttgagattcatgccagagtgtatttgttacatctaccatcatatggcttttgaactctatggcatgctggctggaaatgtgagcccaatgactggtgaaaatgttagaccagcatatggtggtgacgaagaagcctttttgacgaaagtcgtgactccaatatacaaagttatagagaaggaagctgaaaggagcaagaccatgaaatcaaagcattcacattggagaaactatgatgatctgaatgagtacttttggtcagttgattgtttccggctaggatggcctatgagagccgacgctgactttttcaaaactccaaaagatccttatctgaatcatttgaatggagagaacagatctgcaggcaatgtccattggatgggaaaagttaattttgtggagatacgttcattttggcacatattccgtagttttgacagaatgtggatcttcttaatattgtccttacaggccatgataattattgcttggaatggtggaacaccaagtgatatctttgatgctggcgtatttaagaaggttttgagcatatttatttctgcagcaattttgaagttgggtcaagcaatcctagatctcgtatttggctggaaagcaaaaagaagcatgtcatttgcagtcaagctacgatatgtcttgaaattaatatctgctgctgcatgggttgtgattttaccagtgacttacgcgtacacttgggagaatcctactggtcttgcaagaacaataaaaagctggcttggggatggtcagaatcagccatctttgtatatactggcagtagtgatatatatggcaccaaacatacttgcttctatgctatttcttttcccatttatgagaagaatcctagagagttcaaatgttaaggtcataacgatcatgatgtggtggtctcagcctcggttatttgttggtagagggatgcacgaaggtgcattctccctcttcaagtataccatgttctggattattcttttagcaatgaagttgattatcaaacctctggtacagccaaccaaagatataatgagagaacctatcaggacattccagtggcacgagtttttccctcatggaactaacaatattggtgttgttatatcactctgggctccaataatcctggtatatttcatggacacccaaatttggtatgcactgttctctactctgattggtggcatctacggggcttatcgtcgtcttggtgagatacgtacattaggaatgttgagatctcgctttgaatctttgcctgaggccttcaatgaacgcttgattccttctgatgcaaataagagtaaaggtcttcgtgctgctttttcgagtagacccaaggcttctggtgacgaaagtgagagagagaaaagagctgcaaggtttgctcaaatgtggaacgccattattacaagtttccgcgaagaggatctcatagacaatagggagaaggatctgctactggttccagactgtaaagaccgtgaacttgatatattccaatggccgcctttcctacttgctagcaagatcccaatagcactggatatggcagcagacagtggtggaaaagaccgtgatctgacgaagaggataaagtcagatccatacttttcctttgctatcagagaatgctatgcttcattcaagaacatcatcaataccttagtatttggtcagcgggagaaagatgtcctagtacagattttcacagttgttgataagcatatagaagaggaaactctgataacgggtctcaatatgaagaaccttcctgcactgagcaagaagtttgttgaattacttgagttactgcaaaaaaacaaggaggaagacttgggtcaggtagttattttgttccaagatatgctcgaggtggtcacgagggatataatggaggaacaggacctgctcgagacgttggattctttacatggtgccaatagtagaaaacatgaaggaattacaccgctagatcagcaagaccagttgtttgctaaagctattaagtttcctgtggtggaatcaaatgcatggactgaaaagataaagaggcttcatcttctgttaactgtgaaagagtctgctatggatgttcctattaatcttgatgctaggcggcggatatcgttcttcgcaaattctctatttatggatatgcccaatgctccaaaagttcggaacatgttgcccttctctatcttgactccttattacaaggaagatgttctgttttcattacaaaatctggaagagcgaaatgaggatggagtttccattcttttctacttgcaaaaaatttacccagatgaatggaaaaatttcctcgaaagggtgggctgcaagaatgaagaggtactccgtgaagatgaacagctggaagagaagctttgtctttgggtgtcatatagggggcagacattaacaagaactgtaagagggatgatgtactatcgaaaagctttggagcttcaggcttttcttgatatggccaacaatgatgatcttatgaaaggctacagagcaatggaagtaatgtctgaggactcaccattaaagactcaatgcaaggctatagccgacatgaagtttacatatgttgtctcatgccaactatatggaattcagaagcgttctaatgagccttgcgcacatgatattttgagactaatgacagagtatccatcacttagggtcgcctatattgatgaagttgaagcacccagcaaagatagaatcaagaagattgaaaaggtttactactcagtgttagtgaaggcttctgttacaaaacctaatgagcctggtcagagccttgatcaggtcatctacaagataaaactaccaggtaatgccattttaggtgaaggaaagccagaaaaccagaaccatgcaataatattcacccgaggcgaatgtctccaaactatagatatgaatcaggagcactatatggaggaggctttgaaaatgagaaatctgctgcaagagtttgagaagaaacatggagtgagacatccatcaatacttggagtcagagaacacatatttacgggcagtgtgtcatcccttgcttggttcatgtcaaatcaggaaactagttttgtgacaattggacaacgagtgcttgccaatccactgagggttcggtttcattatggccatcctgatgtcttcgatcgtcttttccacgttacgaggggcggtgtcagtaaagcatccaaaattatcaatcttagtgaggacatctttgcaggattcaattccacattgcgcgaaggcaatgttactcaccatgaatacatgcaagttggcaaaggaagggatgtaggtctcaatcaaatatctctgtttgaggcaaagatagcaaatggcaatggcgaacaaacgctgagccgtgacatctaccggctaggtcatcgctttgatttcttcaggatgctgtcttgttactacacaacaattggtttctacttcagtacaatgattacagtatggactgtatatgttttcctctacggccggctatatcttgtacttagtggactcgatgaagcactggctactggaaagagcttcagttggcctctgttttcttcacattctcgttgggaacaaaaactcactactacggaaggacgttactccatggaggagcggaatacagagccactggacgtgggtttgtggtgttccatgccaaatttgctgagaactatcgactttattcccgtagccattttgtcaagggccttgagctgatgattctactagttgtgtatgaaatatttggtcagtcatatagaggggctataacttacatcttcatcaccgtatccatgtggttcatggtgggcacttggctctttgcaccattcctgttcaatccttctggatttgagtggcagaagattgtggatgactggactgattggcacaagtggatcagcaatcgtggaggtattggtgtggcaccagagaaaagctgggagtcatggtgggaaaaagagcaggagccccttcgttactctgggaagcgtggtactattgttgaaatactgcttgcattgcgtttctttatctatcaatatggactcgtgtatcatctgaatataacgaagaagataaccaaggataaccagagtgtgctggtttattgcttctcatgggttgtaattttcgttgttttactcgttatgaagaccgtatcagtggggaggaggaggttcagtgcagagttccagctagtgttccggctgatcaagggtctcatatttataacttttacagccatcgtggtaatcctaatagcaatccctggcatgacggttctggacatctttgtttgcatccttgccttcatgcccactggatggggtttgctcctgattgcccaagctatcaggcctgtgattcaaaagatcgggctgtgggggtcgatcaaggctcttgcccggggctacgagatcctaatggggcttctcctgttcacgcccattgctttccttgcctggttcccgttcgtgtccgagttccagaccaggatgctgttcaaccaggccttcagcagaggtctgcagatctcccgtatcctgggaggacacaagaaagaccgagggacgcggagcaaggagtagtagggctgctgattgaaggtccgtctatcgggagttatgtcgtcctggagcggtctatcaggttcagagaatattagggtccgtatgtatgtatgtgtgtgtcgcacctagcaccagtagtatgtatgtatgtatgcgtatgtaggttcagagaatattagggtccctatgtatatgtatgtatcaggattgctatggtcttttggattggaagatctgagatttgctggtgcaatggccagtatctgacatccaaatgttgaaactataattaggctctgctaatagttagctaacttacagctaacaattagtttattagctggcttacgactaagtagtcagattaaagttgggatgtcggtcgccccctttaggtttagttaggctcgttccaatgggtggcgagagc

SEQ ID NO: 1925 - DNA, 3798 bp, Zea Mays
cattttcccactcttccgcttccacgagcagatgccggcgaatggcaagctctcggcgaagccctccccctcgccgatggttgctcccgcctcgcgccccaaatttacagctgttacctttctcggtgactgcgacgacgacgatgacttccaacctcctcgcccccgccccttgaagccttgcattggcgccgccgcacttcggttccgtaagaagctcaaggctccatcctccgggaaggagaatagttccgccgccggtggtgccgttactgtggtgggggtcgcttcgacggccgtgaaggatgccgaaaccctagccgccggctctagggttagtggcgacgttcccaaaacgaagagacgaaagaccggtgaaagttgcggcctgtcgaggtacggatctgatagcactaaactaagctgtaaaccgaagatagaattggatagatacggatatggcaaagggtgctgcagtttcttgcccagtgcgatagactcgacggttttggcgctcggtgcggtatgtgattttggagttaggcgttgtgatgaggctcaaatagctgtctccaggcattgtacctcagttcttgaggcggggcacgccacagaagagctgacaccgacaggctctgggtgtgatccacccaaaacggagaagaagccgggcagttctgaagctgtggagggacatcacgactccaggttgattgaaccgaggcttgttgaatcagatgcaaacctcgagtttgtaactgggattcttggctcactgactgataaacaggacacgaagaaagcaaacggggtggtatttggatgtggtgttggatttcagaatgggaactatcacttggattctctacagccagagcttctaacgtcgaactcaaagtatgattctagagtttgtgttagcaatgaaatccaagagcctggtttgggagcctgtaacttgatttcacaggagaggaaagtagcagctggacattctgcatgtgcaacccctgaaaatgtgactgcagagaataaatcaagtgcacctgaggcttgtaaggggcaatgccactccgattcatctgcatcaaagcttccagaatcccatatgatccatgactttgaagttgatggttgcgataattttgagattgggacccagctcagtgagctcattaacttgtgtatgaaggattccatagagggacaatcaaactttggtgcagctcccatggaacagaacactttagactctaagagactcagttcagactatgaagcgaaatgccctctatgtggatcggatatttctgatttaagcgaggagctccggcagctgcatactaacaattgccttgacgaaccagctaaggaatctagtcccaaccataaaaaagagcccagtgttggacaaaatgttgaaactggacgtgttgtcgaatggttaagaaaccttgggttatccaagtatgaggaagtttttatcagagaagaagttgactgggaaaccttgcagtggctcactgaagaggacctgttgggtattgggatcagctctcttggaccaagaaagaaaattatccatgctctaggagagttactgaagaaacatgatgatcccagtgaaatggaagctgtgttaaattcaggaaatactaagaagactaaacttccgatgaatggtaataaattaattaccgaatactttcaatgttcctcatttgatcaaagacaaagaagggtatgcaaagcaaacaagccatctaatctgaacgagaagaaaatttctagtgctaaagtacccactagaagaactgctggtaaaggaaagattaaggatacgcctctttggtgttgcatcccagggaccccttttcgagtggatgcatttcgctacttgagagattatcaaggcttgactagaagcttttgtcatgggaagatatactgttcgtcaattacagcgagtcttgtgcatcataagattggtatcccatgggatagattgcatgtattgaccctaaatgaaaagctcaatattgctggagttaatttgatatgttttgatgccaaccattgcccaggatcaatcattattctctttgagcctccaaatggtaaagtaagtgtttctttgagtatctttttccatctatttgacatatctattcaatatgttatttttctttacttgccttttaggctgttttgcacactggagatttccgtttttcttccaagatggccaacaatcctgttttgcagtcttcctgtgtccacactctaatacttgacacaacctattgcaatccacggtatgatttcccaagtcaagaaatcgtaatacagttcgtcattgaggccatccaagcagaagctttcaatccaaaaacattgtttttgattggaagctacacaattggaaaagaaagattgtttatggaggttgctcgtttgcttcagaagaaagtatatgttggagctgcaaagctgcaaatactgaaacatttagagcttcctcaggagattatgcactggtttacagccaatgaagcagaaagtcacatacatgttgtccccatgtggactctagcaagcttcaagcggatgaaatatctatcgaatcaatatgcttggcgttttgtcctactggttgggcatttggcaaaggtaggaaaaagacaccaggcaaaaggtggcaacaaggatcaatcattagtatacgtccataaaaccattgggagacagagtacttgtgaagatcaaaacctctgaggctaaatctgatggaggtattttacttccagtatcagttcagacaagaccacaaggaggggagattgttgcggttggagaagggagaagttttggaagtaaccgcattgagatcagtgttccggttggtgcacaagttgtctactcgaaatatgcaggcacagaattgaaattcaatgacgccgaccatctcattttgaaagaagatgacataattggtattcttgacagtgatgatgtgaaggatatgaaaccactgaatgatcgcattctgattaaggttgctgaagctgaagaacgaactgctggtggtttgctattgacgcaggcaactaaggagaaaccttctgttggatcagtggtagccgttggcccagggccgttgggcgaggacggcagcaggaatcccctgtcgatcactcctggaagcaacgtgatgtattccaagtatgcggggagtgagttcaagggcgaggacggtgagtacatcgtgctcagggcgtctgacgtgatggctgttctttcctgatccccaaaccatacagcgccaggtgcgcgataggaagttttgatgttgaggccgaaccttatcttttatttgctcttgtttggaattggtggaggcttttgaactgtaatctggtgcgaattataaggaaaataagccgagttgtgtagacttgagacaggactgtgctgtgctgtttggctggtaggtgagctaaccagtgttcagctggtgggtgagctgaccagcacgtcgggttcggctgttcttcctgatgtcagcgttgtacgccaaggttggccaacggcatcaatattactaatagcatctaggctaccgtttgagtttttcatggattaatgacaacacaagatgtgactattatatacttcctctgtttttttatttgtcatgttttagttcaaaaataaacctgttttagttcaaaaatgaactagcggacgacaaatattcaagaatagaagatagtattttgcaaagataactaggcttat

SEQ ID NO: 1926 - DNA, 3904 bp, Zea Mays
cattttcccactcttccgcttccacgagcagatgccggcgaatggcaagctctcggcgaagccctccccctcgccgatggttgctcccgcctcgcgccccaaatttacagctgttacctttctcggtgactgcgacgacgacgatgacttccaacctcctcgcccccgccccttgaagccttgcattggcgccgccgcacttcggttccgtaagaagctcaaggctccatcctccgggaaggagaatagttccgccgccggtggtgccgttactgtggtgggggtcgcttcgacggccgtgaaggatgccgaaaccctagccgccggctctagggttagtggcgacgttcccaaaacgaagagacgaaagaccggtgaaagttgcggcctgtcgaggtacggatctgatagcactaaactaagctgtaaaccgaagatagaattggatagatacggatatggcaaagggtgctgcagtttcttgcccagtgcgatagactcgacggttttggcgctcggtgcggtatgtgattttggagttaggcgttgtgatgaggctcaaatagctgtctccaggcattgtacctcagttcttgaggcggggcacgccacagaagagctgacaccgacaggctctgggtgtgatccacccaaaacggagaagaagccgggcagttctgaagctgtggagggacatcacgactccaggttgattgaaccgaggcttgttgaatcagatgcaaacctcgagtttgtaactgggattcttggctcactgactgataaacaggacacgaagaaagcaaacggggtggtatttggatgtggtgttggatttcagaatgggaactatcacttggattctctacagccagagcttctaacgtcgaactcaaagtatgattctagagtttgtgttagcaatgaaatccaagagcctggtttgggagcctgtaacttgatttcacaggagaggaaagtagcagctggacattctgcatgtgcaacccctgaaaatgtgactgcagagaataaatcaagtgcacctgaggcttgtaaggggcaatgccactccgattcatctgcatcaaagcttccagaatcccatatgatccatgactttgaagttgatggttgcgataattttgagattgggacccagctcagtgagctcattaacttgtgtatgaaggattccatagagggacaatcaaactttggtgcagctcccatggaacagaacactttagactctaagagactcagttcagactatgaagcgaaatgccctctatgtggatcggatatttctgatttaagcgaggagctccggcagctgcatactaacaattgccttgacgaaccagctaagggcaagcatggtgtagtggtgagagctgtctcactagttccctcggtcgtgggtttgaagcagtctctccgcatttgtggaaggaaggaatctagtcccaaccataaaaaagagcccagtgttggacaaaatgttgaaactggacgtgttgtcgaatggttaagaaaccttgggttatccaagtatgaggaagtttttatcagagaagaagttgactgggaaaccttgcagtggctcactgaagaggacctgttgggtattgggatcagctctcttggaccaagaaagaaaattatccatgctctaggagagttactgaagaaacatgatgatcccagtgaaatggaagctgtgttaaattcaggaaatactaagaagactaaacttccgatgaatggtaataaattaattaccgaatactttcaatgttcctcatttgatcaaagacaaagaagggtatgcaaagcaaacaagccatctaatctgaacgagaagaaaatttctagtgctaaagtacccactagaagaactgctggtaaaggaaagattaaggatacgcctctttggtgttgcatcccagggaccccttttcgagtggatgcatttcgctacttgagagattatcaaggcttgactagaagcttttgtcatgggaagatatactgttcgtcaattacagcgagtcttgtgcatcataagattggtatcccatgggatagattgcatgtattgaccctaaatgaaaagctcaatattgctggagttaatttgatatgttttgatgccaaccattgcccaggatcaatcattattctctttgagcctccaaatggtaaagtaagtgtttctttgagtatctttttccatctatttgacatatctattcaatatgttatttttctttacttgccttttaggctgttttgcacactggagatttccgtttttcttccaagatggccaacaatcctgttttgcagtcttcctgtgtccacactctaatacttgacacaacctattgcaatccacggtatgatttcccaagtcaagaaatcgtaatacagttcgtcattgaggccatccaagcagaagctttcaatccaaaaacattgtttttgattggaagctacacaattggaaaagaaagattgtttatggaggttgctcgtttgcttcagaagaaagtatatgttggagctgcaaagctgcaaatactgaaacatttagagcttcctcaggagattatgcactggtttacagccaatgaagcagaaagtcacatacatgttgtccccatgtggactctagcaagcttcaagcggatgaaatatctatcgaatcaatatgctggccggtatgaccttatagtggcgttttgtcctactggttgggcatttggcaaaggtaggaaaaagacaccaggcaaaaggtggcaacaaggatcaatcattagtatacgtccataaaaccattgggagacagagtacttgtgaagatcaaaacctctgaggctaaatctgatggaggtattttacttccagtatcagttcagacaagaccacaaggaggggagattgttgcggttggagaagggagaagttttggaagtaaccgcattgagatcagtgttccggttggtgcacaagttgtctactcgaaatatgcaggcacagaattgaaattcaatgacgccgaccatctcattttgaaagaagatgacataattggtattcttgacagtgatgatgtgaaggatatgaaaccactgaatgatcgcattctgattaaggttgctgaagctgaagaacgaactgctggtggtttgctattgacgcaggcaactaaggagaaaccttctgttggatcagtggtagccgttggcccagggccgttgggcgaggacggcagcaggaatcccctgtcgatcactcctggaagcaacgtgatgtattccaagtatgcggggagtgagttcaagggcgaggacggtgagtacatcgtgctcagggcgtctgacgtgatggctgttctttcctgatccccaaaccatacagcgccaggtgcgcgataggaagttttgatgttgaggccgaaccttatcttttatttgctcttgtttggaattggtggaggcttttgaactgtaatctggtgcgaattataaggaaaataagccgagttgtgtagacttgagacaggactgtgctgtgctgtttggctggtaggtgagctaaccagtgttcagctggtgggtgagctgaccagcacgtcgggttcggctgttcttcctgatgtcagcgttgtacgccaaggttggccaacggcatcaatattactaatagcatctaggctaccgtttgagtttttcatggattaatgacaacacaagatgtgactattatatacttcctctgtttttttatttgtcatgttttagttcaaaaataaacctgttttagttcaaaaatgaactagcggacgacaaatattcaagaatagaagatagtattttgcaaagataactaggcttat

SEQ ID NO: 1927 - DNA, 4456 bp, Zea Mays
atgccggcgaatggcaagctctcggcgaagccctccccctcgccgatggttgctcccgcctcgcgccccaaatttacagctgttacctttctcggtgactgcgacgacgacgatgacttccaacctcctcgcccccgccccttgaagccttgcattggcgccgccgcacttcggttccgtaagaagctcaaggctccatcctccgggaaggagaatagttccgccgccggtggtgccgttactgtggtgggggtcgcttcgacggccgtgaaggatgccgaaaccctagccgccggctctagggttagtggcgacgttcccaaaacgaagagacgaaagaccggtgaaagttgcggcctgtcgaggtacggatctgatagcactaaactaagctgtaaaccgaagatagaattggatagatacggatatggcaaagggtgctgcagtttcttgcccagtgcgatagactcgacggttttggcgctcggtgcggtatgtgattttggagttaggcgttgtgatgaggctcaaatagctgtctccaggcattgtacctcagttcttgaggcggggcacgccacagaagagctgacaccgacaggctctgggtgtgatccacccaaaacggagaagaagccgggcagttctgaagctgtggagggacatcacgactccaggttgattgaaccgaggcttgttgaatcagatgcaaacctcgagtttgtaactgggattcttggctcactgactgataaacaggacacgaagaaagcaaacggggtggtatttggatgtggtgttggatttcagaatgggaactatcacttggattctctacagccagagcttctaacgtcgaactcaaagtatgattctagagtttgtgttagcaatgaaatccaagagcctggtttgggagcctgtaacttgatttcacaggagaggaaagtagcagctggacattctgcatgtgcaacccctgaaaatgtgactgcagagaataaatcaagtgcacctgaggcttgtaaggggcaatgccactccgattcatctgcatcaaagcttccagaatcccatatgatccatgactttgaagttgatggttgcgataattttgagattgggacccagctcagtgagctcattaacttgtgtatgaaggattccatagagggacaatcaaactttggtgcagctcccatggaacagaacactttagactctaagagactcagttcagactatgaagcgaaatgccctctatgtggatcggatatttctgatttaagcgaggagctccggcagctgcatactaacaattgccttgacgaaccagctaagggcaagcatggtgtagtggtgagagctgtctcactagttccctcggtcgtgggtttgaagcagtctctccgcatttgtggaaggaaggaatctagtcccaaccataaaaaagagcccagtgttggacaaaatgttgaaactggacgtgttgtcgaatggttaagaaaccttgggttatccaagtatgaggaagtttttatcagagaagaagttgactgggaaaccttgcagtggctcactgaagaggacctgttgggtattgggatcagctctcttggaccaagaaagaaaattatccatgctctaggagagttactgaagaaacatgatgatcccagtgaaatggaagctgtgttaaattcaggaaatactaagaagactaaacttccgatgaatggtaataaattaattaccgaatactttcaatgttcctcatttgatcaaagacaaagaagggtatgcaaagcaaacaagccatctaatctgaacgagaagaaaatttctagtgctaaagtacccactagaagaactgctggtaaaggaaagattaaggatacgcctctttggtgttgcatcccagggaccccttttcgagtggatgcatttcgctacttgagaggtgattgttctcactggtttctcacacactttcatgtggatcggggtgctgcggtcgccgacatggtagcaacagcgaggttcggtgccaggggctggtacaccggtcctggtatggttgcccttgtcgtcgtcagccatgcagctggtgatgaagatgaccctcagggcgcaatgcaactagtaggcatcgtcgcccacgaagatgtaggtgctggagcgggcgacgacggccaggccgctggtgctggcgtgctgctggagagcgccaagctgattgtgttgagcctcgcaaatagatcgtcgaaggttccagtagtagaggtagccggtgatgccgtcgacgaggctgcgccacggcttgggcagcgacgggccttccggcgtgtaccatggggctgcgcgcccggacgagccactaccgcccgacattgggtcgggtctaggcaacccgcagtggtgcccacatcgtggtgcggaggtggtgtcccggcggcgcggggcagaggtgtcccgaaggcgcggagggtgacgcaacctgccggcatggaggtggaggcggcggcggcggacccagagcggaactatcttgcaaaatatgcactgtacaaaggtccttctttgtgggatctggccaccacccacaattccatcctgggtcacgattatcaaggcttgactagaagcttttgtcatgggaagatatactgttcgtcaattacagcgagtcttgtgcatcataagattggtatcccatgggatagattgcatgtattgaccctaaatgaaaagctcaatattgctggagttaatttgatatgttttgatgccaaccattgcccaggatcaatcattattctctttgagcctccaaatggtaaagctgttttgcacactggagatttccgtttttcttccaagatggccaacaatcctgttttgcagtcttcctgtgtccacactctaatacttgacacaacctattgcaatccacggtatgatttcccaagtcaagaaatcgtaatacagttcgtcattgaggccatccaagcagaagctttcaatccaaaaacattgtttttgattggaagctacacaattggaaaagaaagattgtttatggaggttgctcgtttgcttcagaagaaagtatatgttggagctgcaaagctgcaaatactgaaacatttagagcttcctcaggagattatgcactggtttacagccaatgaagcagaaagtcacatacatgttgtccccatgtggactctagcaagcttcaagcggatgaaatatctatcgaatcaatatgctggccggtatgaccttatagtggcgttttgtcctactggttgggcatttggcaaaggtaggaaaaagacaccaggcaaaaggtggcaacaaggatcaatcattagtatacgtccataaaaccattgggagacagagtacttgtgaagatcaaaacctctgaggctaaatctgatggaggtattttacttccagtatcagttcagacaagaccacaaggaggggagattgttgcggttggagaagggagaagttttggaagtaaccgcattgagatcagtgttccggttggtgcacaagttgtctactcgaaatatgcaggcacagaattgaaattcaatgacgccgaccatctcattttgaaagaagatgacataattggtattcttgacagtgatgatgtgaaggatatgaaaccactgaatgatcgcattctgattaaggttgctgaagctgaagaacgaactgctggtggtttgctattgacgcaggcaactaaggagaaaccttctgttggatcagtggtagccgttggcccagggccgttgggcgaggacggcagcaggaatcccctgtcgatcactcctggaagcaacgtgatgtattccaagtatgcggggagtgagttcaagggcgaggacggtgagtacatcgtgctcagggcgtctgacgtgatggctgttctttcctgatccccaaaccatacagcgccaggtgcgcgataggaagttttgatgttgaggccgaaccttatcttttatttgctcttgtttggaattggtggaggcttttgaactgtaatctggtgcgaattataaggaaaataagccgagttgtgtagacttgagacaggactgtgctgtgctgtttggctggtaggtgagctaaccagtgttcagctggtgggtgagctgaccagcacgtcgggttcggctgttcttcctgatgtcagcgttgtacgccaaggttggccaacggcatcaatattactaatagcatctaggctaccgtttgagtttttcatggattaatgacaacacaagatgtgactattatatacttcctctgtttttttatttgtcatgttttagttcaaaaataaacctgttttagttcaaaaatgaactagcggacgacaaatattcaagaatagaagatagtattttgcaaagataactaggcttat

SEQ ID NO: 1928 - DNA, 631 bp, Zea Mays
atggaggcctttggattgcgtaaccccatggtcgatgggtccttggagtggttgagcccgagatccttgacgaccgcgaacaccatatcccccgagaacagatccttgggtcagaggtccctcttggcgccggtgggagaggagcggctgctggctagcagcaacaccaacctgctgtggtgctccagcccgtctttctcattcgactactccacatctgcggcactacccatggcggctactgctgctctgacctcgtcgaaggtgtgggtgaccatccgcatggcgtcggcgtcgactgcggcgccgttgagaccgcgtgacaccaggctgctgcgccgcattgacggaggcaacgttggcaccgtgtacctatgccgccatggtcttcggcttctaaatgttcatacctcaaaaccattttctttgatttcaaaactgatggaggagaagaattctgctgttgaactgaacaacaagcttcgacaagaattggttcacatgatccctccatccacctttataaagtgtatttttatctgaacataatcccttcataaggtttgaccaacaactatgtcaaattatatgcttgtctagtgtacagaagttatatctatagattcatatt

SEQ ID NO: 1929 - DNA, 1212 bp, Zea Mays
aaataactcgtcggagtcagtacggtgctctctccgtctcagccgtcgccaactaatctatccccgatcacgcggcgaaccgccgcaacaccactatcaccaatcgcaatggagaaccctccaccgtcctccgccggtccgtactcggcgcccgcgccggcagcgcagcatcaggacgcggcgaaggaggatcaggacgtggcgcagctcgtgctcaacctctgcatcccggagctccgcgagaaggccatcatcatcctttccaagaagcgagaaaaatgtgaagatcttgctctactactatggcactcttttggtacaatggctgcactactccaggaaattgtgtcaatttatcgattactttcacccccacaattatcttttgaccaatcaactcgagtctgcaatgtgcttgtactccttaagtgtgtggcatcacaccctgatactaggatgccatttttaaatgcacagtttccactgtacctgtaccctttcttgaacactacctacaaaacaagagaatatgagttcttgaggattagtagcctgagcgtgatcggtgctcttgtgaagtccgatgatcatgaagtcattgtgaatttgctgtgttctgaaatagttcctttgtgtctgcgtgctattgagatgggcagtgaactttcaaaaaagatggtcgaagcacttgctgaacagccttccccgaggacgcttaagaacacaatccgctgctacctcaggctgacagatgatcgaagggcctgccaagcgttacgtgactacctccccatcgcgttgagggacgggacattcaacggcttaatcgaggtcgatctcacagcaaggctatggctccaccagctgctgcataacgtcatgatgtcagacagtggaggcggccctcgccctgccccgggtcctgtgatggggatgtgaatgaagccggtcgccacgcctcatcatctgtgaagatccaagagcgtgcgttgtagctgtaggtagcgaagtagtaacccacagggaagggaaagcaatcgtggtggtgttcacacccttttggagggaacaaacacaaacagctgagctttgtgccgtttggatggcgaagaagcaacgataacacgcgtcttcttgatacaagtctggctggccattggtcgttgggattttgaaatgatatacaggtaaaatttgcactgtgaagaccgc

SEQ ID NO: 1930 - DNA, 1281 bp, Zea Mays
cattcccaaataactcgtcggagtcagtacggtgctctctccgtctcagccgtcgccaactaatctatccccgatcacgcggcgaaccgccgcaacaccactatcaccaatcgcaatggagaaccctccaccgtcctccgccggtccgtactcggcgcccgcgccggcagcgcagcatcaggacgcggcgaaggaggatcaggacgtggcgcagctcgtgctcaacctctgcatcccggagctccgcgagaaggccatcatcatcctttccaagaagcgagaaaaatgtgaagatcttgctctactactatggcactcttttggtacaatggctgcactactccaggaaattgtgtcaatttatcgattactttcacccccacaattatcttttgaccaatcaactcgagtctgcaatgtgcttgtactccttaagcacagtttccactgtacctgtaccctttcttgaacactacctacaaaacaagagaatatgagttcttgaggattagtagcctgagcgtgatcggtgctcttgtgaagtccgatgatcatgaagtcattgtgaatttgctgtgttctgaaatagttcctttgtgtctgcgtgctattgagatgggcagtgaactttcaaaaaaggtggccacttttattctccaaaagattatgcttgacgacacagggcttgcgtacgtatgcgcttcttctgaacgtttctgcgctgttgccaatgtgctagctcagatggtcgaagcacttgctgaacagccttccccgaggacgcttaagaacacaatccgctgctacctcaggctgacagatgatcgaagggcctgccaagcgttacgtgactacctccccatcgcgttgagggacgggacattcaacggcttaatcgaggtcgatctcacagcaaggctatggctccaccagctgctgcataacgtcatgatgtcagacagtggaggcggccctcgccctgccccgggtcctgtgatggggatgtgaatgaagccggtcgccacgcctcatcatctgtgaagatccaagagcgtgcgttgtagctgtaggtagcgaagtagtaacccacagggaagggaaagcaatcgtggtggtgttcacacccttttggagggaacaaacacaaacagctgagctttgtgccgtttggatggcgaagaagcaacgataacacgcgtcttcttgatacaagtctggctggccattggtcgttgggattttgaaatgatatacaggtaaaatttgcactgtgaagaccgc

SEQ ID NO: 1931 - DNA, 2431 bp, Zea Mays
gattgtcaagatctatgtaatgaaaaagctaaccatctctcttgctgtaggatgaggtgttgattgctggatttgggcgtaagggtcatgctgtgggagacattcctggtgtcaggttcaaggttgttaaggtttctggtgtgtcgttgcttgcactcttcaaggagaagaaggagaagccaaggtcagcttggcggaaacgttctcctttcttcacaaactatgttgattttctgaccaagtgtccttacttacagatccatagaaaatatggtacaggtggtagcacagagaagttgaagctctgtgattttgctgtgggcacattctgtttattgtcttatgatatggcagaatcacggactgtttcgaattctgagaataagcgcactctcccagcatggatgttgaaagcaacctcaggtaatcaaacagcaaagaccgcagatcagaataagcaggcactggaatctgctgacattggggctcttgatcagagcaaacccatcaaaaggaacaacagacggccgctaaaaaacttggattcagtagctgctggtgaactgggagttttgcagcgatgtgagggtagaggaaaggccagaaggaagagcaaggatgctgtcaaagatgaagttgaagaaattgtggaattaaagagtaagaatgcaagaaaaacgagtggaagaggtgctgcaaagaatagcaagaaacggaagttggataatgtcgaatcaggaccatcatcgccagtatcaactgatgatgacatagagcttactgttgaggatcttgtgagcatagctgaagagtttgttaatgctgataaacagaagcaatgtgaactacaaactgtggaggttaccaggcataaagagcatcatctgtgccctaaaatttccactgaggtagatagagggcagtcagtagtaaatgctcaatcagtgaaaggatcgatgcagtgcgcaacagccacaagtaatacaggtgcaatcaagtatacagaagatgagagcactagccatcaagaagtgcaattttcaagtttcaaaacgacagaagatgttgctcaggatatgataaacctgttattcggtcacctattgagtaaacctgttgccaacacagagaagtctgatcctgtagaatcaacgactagaactgtaaatcaggtgccagaggggagaggctggcacagcgaagtaccaaggcaggaggaacctgtgaagaaaccagagcctgtagtagaatcaatgcctacgactataaatcatgtgccagagaagaaagactggcgtagcgagttaacaaagctgggcgaacctgtggcaaagaagaagagcagcctcagggacaaggtggccttgtttctttgactgcatcagatgagatttgggcagtagattgtgattcgtatgggaccgtgtctgctggttctgagcgtgtcccagtcccacggcattgtttttgcatatagttatacctttggttaataagctgtcctctttaaatctagcaagccagccctcactgttgctagatggtattcctgtgtataaaggatgcatggtgcattttctgttggttgaagtacgactgtatgaagtatcggtgttcctcaacgcgacaactacactagagggaagcggtttaaacatcgtagagttattaggcatggaggagcccagctatctccttactcgccatggagcctttgcagaagttgctggagactgacacagctgagagtgtcctgttcccaatcatttacagtgctgcaaaactatggatcagtatgggcgctgatgatgcagccatcttcgtaaaagtggtaatggatcgttgtctatctttgggaggatcagaagaggtttcctttggacaagctctggcgatcggcagatgcaaaaatttgggggcattgagtgtcagacctggatgtgcacagattgccactcccggtaatgctgttgacaggcagttcatcaaggccaacaccatcctcactcttggggatgaggaataccaatggacatgggtgtcgaacttctacgccgcatgcaacaagaacagaacggtcagggacgttttgcacggagtatgtttcttgaatacgaaaacagtgacagagatggcagaattgttatgctatgggactttctcagtaacagaaagacctgacgagaatgaaaccggttagctctggcaccacaaccggaagagccgcgacaaaagccgtgggcggggcttgtgccttgtggggaggagtcctgtcaaacgagtttggctccggagcggggctcctgtctttatgtactcccctgttccaaaatagttgttttagccttttaacaaattcattcaataattaatatatttgttttgtatatgtgtctagatttattatcatattttaaatatagacataaaa

SEQ ID NO: 1932 - DNA, 3390 bp, Zea Mays
atggcggcgatgcagcagttgctactcctgttcttgctcttggtatacctccggccaagtttcggtcagacgaacccccaagatgttgctgcacttcaggctttgatgaataattggcaaaacgaaccaccaagctggacaggttcaactgatccctgcacctcctgggttggaatttcctgttccaatggtcgggtgacagaaatgagattaacaggcatgaatctgcaaggtacattaagcaataccataggccaactatctgctttgaaatatctggatctgtctaataaccaaaatctcgggggtccacttactccaaatattggaaatctgaagcagctcaccgttctgattttgcttggatgcacgttcacagggaatatcccgaaagaaataggcaacttgtcacagctcacattcctggcactaaactcaaataaattcactggtggaattcctccaacacttggccttctttcaaatcttttctggttggacatgtcagcaaatcagttgtcaggacaaataccagtttctccagggttggatcaacttgtcaacacgaggcatttccacttcagtgagaaccagttgacaggcccgatgagcgaaagccttttcagtgataagatgaaccttatacatgtgatatttaataataacaactttactgggccaatcccagcatctcttggacaagtcaaatcacttcaaataatccgactagatcataaccaattcagtggtccagttcccaacagtattaccaccctaagtaacctcatggaagtgagcatagcaaacaacctactgaacgggaccgtgccggatctcactaatctaactcagctagattatgtatttatggatcatggtgaacttaatgggacaatccctagtgctatgttcagtctccccaacctgcagcaagtatcattagctaggaactcattcagtgggaaacttaatatgacaggtaacatcagctcacagttgcaggttgttaacttgacatctaatcaaatcatcgaagcgaatgtaacaggctacagcaacacccttatattaacagagaatcctgtatgtttagacaacactagtttatgcaaactcaagcaaaagcagcaagcgtcatatgccactaaccttggcccatgtgctgccattccatgcccctttgatcagtcagcaagtccagtcacttcacagaactgtgcatgcaccagtcccattcagggtctgatgatcttccaagcacccgccttctctgatgtcataagccccacaatgttccaaattgtggagtcaacacttatgcagaatcttagcctggcaccaagatcagttgccatttccaatgttcaattcagccaaggaaaccctctaacattcatagtgagtatttttccggccagtggaacgagcttcaatcgctcagaagtcataagaatcatttctcctctggtcaaccaaacttataaagccccacccaattttggaccatacagcttcatagcgaacacatactttacagttcccagcaataagaagccctcgatgggcaaggctgcaataattggaatatcaattgggggtgttgtccttattcttggccttgttgcagtagcaacatatgctctacgacagaaaaggatagccaaggaggcagtagagcgaactacaaatcctttcgcatcatggggagctggtgggacagacaacggagatgcaccacaattgaagggtgcaagatactttccattcgaggaactgaaaaaatgcaccaataatttctcagaaactcaggagatagggtctggaggatatgggaaggtgtacaaaggaagacttgcaaacgggcaaatagctgcaataaaacgtgcacagcaagggtccatgcaaggtgcagctgaattcaagaatgagatagaactgctgtccagggttcatcacaagaacctagtgagcctagtgggtttctgctacgaacaaggggaacagatgttggtttatgaatatattccttatgggacactaagggagaacttgatgggtaaaagaggagtgaacttagattggaagaaccgcctcaggattgccattggctcagcaaaaggtctagcatacctccatgaacttgctgatccaccaatcatacacagagatatcaaatcaaccaatatccttttggatgaaagtctcaatgctaaggttgccgattttggtctttcaaaacttgtgtctgacacacaaaagggtcatgtttctacccaagtgaagggaacattgggctatttggatcctgagtattacatgacgcaacagctctctgagaagagtgatgtctacagctttggagttgtcctgctagaactagtaactgctagccagcccatagagaaaggcaggtatattgtccgtgagatcaggacagcaatagatcaatatgatcaagaatactatggcttgaagggcctaatcgatccaaaaatcagggattcagctaaattaattggcttcaggagatttatacagttggctatggaatgtgtggaagagtctgctgttgaccgcccaacaatgaatgatgtggtaaaggaacttgagatcatcatacagaatgaaggggcacaattgttaaactcagcgtctttatcagttgaacaatttggaaatgaaaagagacgagatccttatgcagaacatttgcctatgaatgatgaaagcagcagcagcacttttgactacaacagtgggtattcatactcagctgttcaaccaaagtagataacagtttccactctttgtttttgttgaaggatgtattatacgacattaatcttttccctgttgataaatcaatgaatgagtatttcagaaacacactggcacatgacttgcttcagatgaaacagcagtgaatgtctgatccatctataaaaccattcatgcctctgtactcctttacactgacaacataaggataaaaaatgtccgattagccagtcgaatcaagaactagtccaagacaatattgttgagaggtcatggccatgaagttcttgtcggtggatgccaatatgtgagtacaaaggactgatgagggacaatattataattgatgtttgccctttgttgacaaacagatgatttagtagaggcattgcccatgtgtgttgaaatatctttgtttgattatattaattaacagtgacgaaaataactcagtcattactactgcaatgcatgtctgttgcacttctgtagaagtagcagggacaagttctataaaaaatgttcgctgcacttaattgagtcccatcagcagccagttgggagaatgagataattaaaatatatgaatactcaaaagctaatgtaacaaaa

SEQ ID NO: 1933 - DNA, 3414 bp, Zea Mays
atggcctgcaaccgccgccgcaagcttctctgcgcctgtttgctgctggcttgcgcagcccccgccgccgccgccgccgtcaacatctccgtctactggggccagaacagcaacgagggcagcctgggccagacatgcagcagcggccgctacgccttggttgccatggccttcctttccacgttcggcagcggccagacaccggtcctcaacttggccgggcactgcgaccccgcgtcgggcggctgcacagctctggccgcggacatcgcggcctgccaggcgagaggcgtcagggtgctcctcagcatcggcggcggtgctggaagctacaacctctcctccgcctcggacgccgagagctgcccgtacccggacgcctcgctcggcgcggcgctcgccacggggctgttcgaccacgtgtgggtgcagttctacaacaaccccgggtgcgagtaccagcagaaggacggagacggcgtggccaacctggcggcatcgtggaaggcgtggacgcagtcgctgccgtcgtcggcgtctgtgttccttggcctgccggcgtcgcctgctgcagcgggtagcgggtacgtacccccggacgaccttgtgtcgcgtgtgctgccggcggtgagcggctccgctaactacggcggcctcatgctgtggaaccgctactacgacaacagcaccggttacagtgcccggattctgagcagcatcacagcggatcgaccaaacagctcgccagttccagggggctccggcgatgaatcgccaccgccggacaactcaccagctccgccgccgagcactggccggtcacgaaagagaaggatcaaaacatatatcatagcgggcaccgcaggcgtatccgggctgtgtgcaataatcgctctcgcagccttgatgtggtggtacaagagacgttatggcatggtaataccatggcgcagaggcgtatccggggtcgaatcctttctgcaaaagcaaggagctctactacacccgaaaggctacacttactcggaggtgaagaggatgaccaggtccttcgctcacaagctcgggcaaggcggctacggcgctgtctacaggggcagcatgcctgacggccgtgaggtggccgtcaagatgctgacgggcatgctggagggcgacggcgaggagttcatgaacgaggtggcgagcatcagcaggacgtctcacgtcaacatcgttactctggtagggtactgcctccagggtccaaagagagctctcctgtacgagtacatgcccaatggctccctcgagaggtacaccttcggcagcagcagtggagaagacgccttgagctgggacaggctgttcggtatcgtcgttggagtcgcgcgagggctggagtacctccacacgggctgcaacacccgcatcgtgcacttcgacatcaagccgcacaacatcctgctggaccaggacatgtgtcccaagatctcggacttcgggctggcgaagctgtgcgggcagaaggcgagcagggtgtccatcgccggggcgaggggcacggtagggtacatagcgcccgaagtcttctcgaggagctacgaggcagtgggcagcaaggctgatgtgtacagctacggcatggtggtccttgagatggtcggagcgaggaagaatgtccatgtcagtgctacagacgacggcggcaacagcagcagcagcaggtattttccgcaatggctgtatgaaaacttggaccagttctgtcgccccacaaccacgagcaacggcgagatccgcggtgacgacgacgacgccacggaagtgctgctcgtgaggaagatggtcgtagttggactgtggtgcatacagtccaaaccggacagtcggccgtccatgggccaagtccttgagatgctggagagcaacgccgccgacctgcagctgccgccaaaggccttgtgcaccgcttattaaaccgagtccgatcttgtaaaaactctagtccagcggcgtaatgcattcattgcttacctgctatagatagatactactgattcgagctcattgttcttcactccaccacgtcctttgttctttcaaagatgacctcgtgggtctatcttttgcactctttttgtgaccttctatgctgcttgcgctggctttcagtagagatgttctgtgtgcgctgagacagacagcacctcgaccctcccttgcacatccttcaaccgctccttacacgagtaaataaaacattatccacctattcttcctacgatcaggcagagatacctcccacacaaactggagaccatgattttttcccccacacatttgagtaggcacccaagcctctaagctacgtgatacagaacaaagatgatacccaaaaccttttacactccctctgacattgtgtgcgctgccccccacccccaccattcaccctcaacacacactcacaacaaccttttacccactatatgacattgttttcctatattttttcccctggaattgctcaagtgaaaaagggaacaccgagtacaaattccatacgaaaattaccaattcacaaccatcatgtgatgtaggaataaccacagagaacaagaaccagtagacttacaatagaaggctgagtagtgctcaattcatcctttgaaaatgacaatagcattccattcgccgatcttacccataagacctggaaaattgggttttggtgcagtgaaccgcgccctaagtggtgcccgctttatgggtaagtgctctgtgggcttcttaataacttttacagcctacaagactaaagtagttttaacttacagagcatgccacaaagtagttacccagatcaaagaccaacctgtattcaggctaccaatcacgcccctaactgtccaggctctttatgctctatagctcctgataacttttagaaacagaagaaaaatagagcgagatgctagctagaggaactttaactggccaaagtagccttacagcaattacaatgttccatatgcaggtaatgctgacaagtttttaactactatgctatataaacatacaaccaataatcatttgttgaaatatccaaattcaaaatcaaggtgtattacgtacaaaattaatgaccatgtaaaccataacaatgctagctttatgttgtgtgtgatgatgaattcagtgctgtactgttgtaaacctagaacggtcacccatcctattagcaatatggcaccattacaaattccataaaaaatttgcatccaggcagttgttaggtgattaggtctaaacaccgaagaaagaattctctacagaattgtgctacacaagctgctactactgaaagacactatcgccagaaatcatgacatatatcaagaactaggtatatgcccgtgctttgctacggag

SEQ ID NO: 1934 - DNA, 4052 bp, Zea Mays
gtaaataaagtgccacctaaaccaatttatttggtaccaaataaataaaaaagggaaaaactgttgggagaaacttaaaagtaaagttgattccaaaggaccactccatttcacaaatcatgatgcattatgttgtcataacccaatttgttaaccacgtgatgcaagctactctctctttcaaattataaatgttttggtttttatagatatattgtttttattatatatctagacgtagtatttattggcacggtgcgaaacgctggagctaatatctagattagactcgggtgcaaagcttgtgtaaccggtgccaagagttaaggccccctttagaatgcaggaatttcggagttattgtataggaatttcatagaatcagttgattttcacataaaaacacaagaaacagaaaaaaatcccgcgttccaaatagggcttaaataatattttgtctctgctcaacagtacaactacaatggtctttatcagtcctgcatacagtgaggaagcaaaggaggcggagctagtagtttatttcctgtggaccccatcgttagaatagttgggtgatccaaacgttggagcattttacacagtttagcacctcctcctgacatgtatagttttagaactgtaataggatgaaacaatagtgttacatctctatctctatctctactatataaaagcaccagttttgacggtcaccccgcgtcatattttataaaataatcccttctattatttgaaatggcccacaagacacattctcttcacatcgatcgcatctaatccaattcgtctatccactccctgtccacagcgtatccacgccccgcacggcgcacgagcgcctcagtaacccacacaatgacaaaaacccatgcacgccatgtcttccgtttatagaaacgaccggcatggcaagtgggcccgtgccaaatgcaccacgacaggagcccaacaacccatggacgccgctccataggggacagggaaaacgaaacacagggaaagcggtttcaacagctgcggggtggaactattttactcatcctaatccgccaaccaacctggctacaaaaagtcgtactgaggcccctcaagcgatagcggtggtggatctgctcgccaccggtggcctgacgcccctccagatactccgactcgcctacgtcctccaaggcctgttcaccgagttcgtgttgcgttcgtgggacctaatggagaccgacgctgctggaatggagggcatcgacgccggcatagggggcagcgcggcggtgttcggtaccacatggatctgtggcacgacgcccaccgcggtaacatcggtatggcgagcatcaatggaagggtgaccacgagcaagataggcggcttcggcacgacaggagaatgtccgggggacggggtgtgagcaagatgccacacggcatggcacgtagtgctgctgtcaccgatgagcatgatgagcgccatcgtcacgaggccatggcggagtagagagacgaagcgtcacaagtcattactagcggctaggagaagtgcttccttaggagtgaggagctacaaggccatcgcgcacttacgacgggtccttggtaagcattttattgtagctccattcgaagttgagcgtgtacttttcaccagagctaggccagttgggaacgagatggagatggttggtggccttccgatgcaaagcacggacagctattgttcgagacatttggttcattagctcatttgttgcacgcaagacgatattgggtaccgctcaactcatgcatggctcatgcatgctacatcatgaatctctgcatggcctctgtttgacaattattgaggcatattttcttctctatcagattattgtgcaatagctagaggcatctttacgatccatgaattttgtgtttaatgcgtgtgtctaagagaaaataaaagaacataggttcagtggaagatgttgtgggtctttaaccggcagtcataccgtgcgtttatatggaatcaatgtcttgagttataaatcatcaaggccgttacaccatatatagatcgaagatcgtaagaagccactaagcccaatacaacaggaagctacaccctgttagctgaaagaggacgagctacagagagctctataaaaatagggattgggtttatttttcaactcatatctttctcggtcttttggctaaaataaaatgtaatatttattcttatcaatttaacatctgatctatagacaatatgctcactttgatattaaatttatttataattggtatttttttaggggagggtccatatgactgatttacttcgttcaaccattgattgcattgcagatattattctagttcttggtaatgtagcactgttcagtaatagtgtcaaaacatatttcggaccataccagaaagacacagatatgctaataagctacaaccagcaatcaagtacagcaaagcagtaaatttgatattcatcaaacttagatgtccattggtgtacacaaagcaataaggttgtcctctctgacctgaactttttgaaacacaaatcactgtggcaattttatagacagtactcgaattagtataagtatatacttgctctaaatcacaattctagccagtatcccctgtttgaagtatttgtccaacaaggaaagcaagggcacagttattgaaatatttccttgtttaattgttctgcaatgatgttgaagacatcaaggcattgtttggatctctagttttgtaaaaaaaaggatcccaataaacctgtttgtccatttctctgattttttgatgtaactaacttgagggtgagcaacagtagttttctctaaactccagtttttccgtttagtgtgtttcagatgtcatcattctcaacaacctggcaacttcactgaacactgacaggtacaacagcttcagccaaaaagtcacaggggctagagcttgtcaccagcaaagaaacaaccacgctggatgctttgccagaaggtgatgattaagagcacgatgatgacgacaacagccaggacagcaaacagcttggtgctatggtactcatacgcattgatgagagggagatgatgctgtgtgagcgtgatgggcgatggccaggaaggggagatactcaggatgttgccgtccacttggatgctcatcaaatatgctggagaaacggatgactgagacggagaggaagttcagcgggcttcatgtgctcagcaagatgccggagaaagttcagcaagatgacaatggttattgcttagccagggtgctatggtcatttgtgctctggcgggtcattggtgctgctgctggataccctatccatttcctgagattaggaatgaagaggcatccatggatgtgagctacagaaaggaagcagtaagatgattgattcaggggctcccgtgctgtacaatgaagagtagaaggaacaactatgcaagggtgaagtaatgggcaatggagagattaccaaacctcagtttagtttcctacatattaatccaaataacatgttatgttatgttatgtaaacctagattaatggtctagcaacttaaaactagtttttccttaaatttctgataaaaacatgttcttaccaaactgatctttattttatagatctaaacaaccactagatgattgtagcatgccatttaacagggattttatagccattactcagtaacattcttaagagttagtgacacattgtcctttgtggtggtcataaacataaatgtgccatagaattaaggtgaaggattaacccaactcatgtctacttttcatggcaagttagaccgaaatttgaataaacatgatcacggataataagattcagaccaaagaaaactacttttcatgactagacagaaggtaactttgagatttgataaataatcttactacgaatatcttcaaggaattcctgacgggccttctcgagctcatcctgcttctccaccctggaatcatcaaattagcccaaaaaag

SEQ ID NO: 1935 - DNA, 3793 bp, Zea Mays
cgacgagcagcgctacgaggaacccatcaacgccgacaattggggtggattcttcgatggagcagacgtgtctgccaacgccgagttcgccggccactgggacaacccttcctccaaccccgacgcgactgcctatgtcacaccagaggttgcggtggaatcggtgcacccggccgcacgcggacgcttcttcaacgacgattcgggtgccccgcttgactcggacgacgacagctccgtccacggcggccacggatccgtgatgtcccatctcctggagcgcgaggccgacaccgccttccttccccacttggatcagcgggatggagttgaggcgtggctcatcctgcgccggtgcactcccgcctccttcaacgtcgcctccaccgaccccaacaacgaggtctcgagcgccgttaccgcggacgcgctcgctaaggccgcgcccgcgctcttcgcttcgagggcgcccagaccatcgctcaagtacctggagctgcttctccaggcagaaatcgacttcgaccacattgacctaccgactgctgccgccgcagagcacatcgtcgcccaggtcaccggcaacaacgcggtgtccgtggtggaggaccaactcaggtgcaccctcttcctcacgcgtaacttcctgtcaagccaccaccaggccgtcagcaaggagtgggacatggtcgccgtcgtgcacccagtgtgcaacgtgggggaaaagaaggtggacgccatctgcactggccagatcgagcacctgctactgcatcacctcaagcgttcacctacctcgattggtgccaaggcggtgttcgatgaaatgcagcaaagcaccaattccgcgacaacgacacccgcatcctcagctctgacaacaacaactactacaaccatggctgcaccggccacctggctggacgcgcagcctgctgtgtcgacatgctcatcagcatcttctgctcaagaagatacaccaataccactcctcttccttcgcggtggactgagtatgatggataatgtcttacctgctaattctactttcctgtctaccaacatatcactcagcaacatggagtgtctgagagagtttatgcttcaccttaagctcggcaccgccagattcactatttgtgacgaaagtgtagtgaacctgtggtcgtcgccggtggagcgagttgttcagcaacaaacatggctacaacttgagttgacaaatagtggtcttgacctatggcctatctcatggcaatcgcaacaagtctattttggtactcaccatggattcgctgcatggcccaggagccatggcacaattcttgtcttcgattttagcaataccttgtcctggaacaactcaatgtcaattgttgcttcatgctcaaccaacacccttcttgccaaggatgatggagattctatgaaccggtgtttcagttggtgttggaagcctccatggttacatccaggtcagtcgaaattcagagatttcctctggtggtctttttggtatttccaatttgtcaggtccaagtattatgggtgcagagcatcacaattactaactccttggacaccacctatgacattatgtttggttggtgatgaccttgttgtgatgctagttattccaagtatgctactgttatctcggtgctattttagtggagtagaatgtgtgctggcagctgcagatccgttattttctacatttcatgctgagagagagttgttctggaagccaccttggcaacatctagttcctaacaccagatctgagatacagttgttgatggagtttgtctatctcaatacaggagtctgccgttctctgcacatgattactaaattttctaagcaatactttgttggcctatttttgctaattacaagggaaaaatttatgtctgggagaataatgttggctcttcttccacttctgaagctatttacatcaggaggagcaaggattgtcaatgcttcctcacttgcgtcggagctgaagagaatgccaaatgagaagttgcgaaacgatttgagcaacattgacatctgggacgaggaccggatacaagcagtactcaacacattcttggaagacctgaggagcggtcggctggaagaggctgggtggcccgtgatgctaccagcctacagcctgtcgaaaatggtcatcaatctgtacaccaggatcatagcaaggaggtatccggagatgcgcatcaactgtgtgcgacctggatttgtcacgacggacatcagctggaatctgggggtcctgacgcctaaacaaggtgcgagagggccagtcatgctagctctcctcccagatgatggaccaacgggttggtacagagatgaaatgggcgataagatgggcagcctattatttttcaaaatggtcaagtattcatcactagtcgagggattttgtggtgtgcagttttcatttcctaatattctattgtgcaagtcttggtcacaggagttagccaccaacacagaaagccatttactaccagaaatgctagaagcggccaatggttatatttgtcatgagcttcatcttatgcttacctctattggagtgacacatatgatcgattgtgaagatactccatccttcctgtgatcttccctaccttctcttgtatcttcctccactcctgctgtgtatcttcctccactcctgctgttcggttagggattagtgagtattgctaacagacggggacagaggatgtttgaaaagcgcagcatactcccgttgggcttcttgactgatttctccattactgatgatgtgcaaggccttcatagctttcttggaagattttccaccccaatcctgcatagcaaattccacaccaattccagccacccgcctgctacgtcttggagcattcgccttatagggctttgaagtcttctgatttgatgcaggtaatggaagaagggtttgtcaatagtcaaagtaaagtaaaactaaaagcgaccaggtctagaatcggaaccgtcgcctggtttgaaagctatgaagtagaaaagaggcgacgctgacgaggagaacaacggcgccatagctgctgtcgccggcttctggctcctcccaccgtcgctttctaaggtaaagataagaacaaatgttctcacttctcttacctttttcctttttcgtttctcactgtgcgttccgtcttcgacgacggagctgtttccgccggcctggtcgtcgctttctacagtgaatatatcagtcccacacttccctttgatagcagcagcgacgctacagcttcgccctccacatcctctcgcgaccgccgatgacaacgacaccgcagcttcctccgcatcctctcgcgaccgccacttttccaggtgagaagggttttctatacttcttttagctttccgccgtacgtttcttactgtagcttcctcattcttttacgttgcttcctcatccgtttcgaattagtcccacactttccttcgttttcccttttcgttactcactgcaccttcaccatctgtgcgcgattcattcatctttttctaatttttactttgcaaaaaaaatggaattagtacatctaaaaatatctggttcataatggagtcttcatctacaacaataaacatgcatgtcttttctctctttttccaaaatttcttcgaaattgtatgcgctttcccctaaaacctaataaactctaaaccctaaaccctatacacttccctttgatagcagcagcgacgctacagcttcgccctccacatcctc

SEQ ID NO: 1936 - DNA, 888 bp, Zea Mays
ggcgtccatatccacggttatgcccctatcctccgcgatccccaagcgcgcaaatcccgtctctagcgcactcgtcgctcgcgagatctcgacgccgccgccgaggccccagcaccgatcgtggcagcagaggaagagagggaggtggtgggcttgtccagggcgacagcacctgcaccgatcgtggcagcaaatgatgaagggagggaggcggcgggcttgtccacggcgaaaatggccatctccggcatggtcgcccctagctctagagacggtgccgtggtagggtgggctgcgcgtggcggctgcccaggtgccgaggtgcggtcgtgatgctcgggagccgcaacagccagccgccacctcccccgtggccctgcccccaaacccgcgatcctctcgagccgcccccaccccgccccaccgttctctagcagtctggctccatccgcaagccccgcacgtctccatgattccacgccccccgccaccagctctacacccggtgctccgcctccatgccgcagatcgatcacgtccccactccccaaggctttggtttacaccggcaactattcgcccttccctactaaatctgcgatcatttcttctcgattgtgaccatggcgactcaggtatccctcgtcatgtggagggcggtcttctcagcgctaggcttgctcgtggtggccacgctggtgtacacattggccactgacggctcgctgttccatcctgagctggttacgccaaatggagcagcaacatttggacgatccacaacctgttgcggccctacctgcaagcctgcacctgtggtctctctagctattgtggactaagatgccacaagttcaattgctggagaggcagggacggtgatgccag

SEQ ID NO: 1937 - DNA, 1026 bp, Zea Mays
gtccaccacccttaccgtgcccccgctccagccccgcccgcgccgtcttcctccctgcaatcccgccaccgcccgcgcgtcgtcctttcccttcaatctcgccctcgcccgcgccgtcccttccctgcatcccgtccccgtccgtgagccccctccacacgctcccgtccgcgaccccagatcccgtgactgccgccgtgtcttcgcccctagctccatcatcccgtcgtgtcccgccgtgccatcctccgctccgcgaccaccgcctctgctcccctcgtgcccagcgccgcgtccgcgaaccagcacccctcactctctctcccgcccggctctcctcgcccaactctctctcccgcaatcccacggcctcgccccaaatcgccgccccggctctcggtcctcgcccaagctctccatggaaggagatcgaggaatccgcgtccgctgcgcccggctctctctgcgtccgtagtctccctggaaggcgattcctcgatccgcgtctgctcgcttcggctcctccgttcccaaacctcctcaaccagcatctctagggttttcgcagccaccgcccatggctgccactccggaccgcgtcaatgccgaccttcatcgtcgcctcgccgtcgacactccaccgccgccccagggaggaatcgtccaggcactaagcacaaggaacagatggaatgggtactccatggattaccaaggaaaaaacaagctggtttttagcctaactgatccgaaatcatgcacagcacaaggtagagactgtacgatagttgattgcaccagaaaaatagtagcccagatgggtaagaaagagctgatgggaggcaaggacttctaccatgtggaagtacagtcaggatatgaccaagctttcatcattggggtgatggcaattcttgacagcatacatggagaaagacatgggacaaatagaagacatctaaagctttccaaggcagatgcctccagaggatatctactctctggtcatatgatcgatgcatagat

SEQ ID NO: 1938 - DNA, 2703 bp, Zea Mays
cgcaacccctggccctgtcaagcagacgcagggtgacaccaggcagcagcccacctccacgcgaacacgccgcaccacaccatcaccggcaccgcagcacggcagccagtcaccaggactccaggagtgatctttgatccccaccaggccgccacgctactgtcggaggaaagacacaaaatgtttcagtaccgcctgttgaaggtgtagctggaggaggaactagctatggatgggtggatggaggtttgcggggtacaaatattggtgctggtgtgattgatcctacaaaagtacactcagatgatcttttgcacgtctggtctatgcccagcacagcaaatgttagccagcaagaagcgcctcggcctctagagaaagtcaaccttttggcagcaagaaatgaaagggaaagttttcaaattgctttacgcccaaaggtttcatgggcaacttcaggtattgcagggtctgtgcagatacaatgcaccgatctctgctcctcctcaggagacaggttagtcgttggtcagtccataactttgcgacgtgtggtgcctatcttaggtgtaccagatgcacttgttcctattgatccactcagtcctcaaataagtattcaaccaggggagacagctgcagtttgggtatcagtaaatgttccatgtgggcaaccgcctggtttatatgagggtgaaatattcattactgcagttaagacagaattagattccagaacagaatctctaccaaaatctgaaaagtgtaggctatacagagaattaagaagttgtcttgacctcactggacccagagactactcgtcaccagaggaaatggtacaaagactaacatcagcttctactgtactaaggagggtgttggataatccagcactccaggactgtcaagagaataatggatttggagacatgatggatgaagatgttataaacaatatttcagttcgcttgaagttaagccttactgtttgggacttcactctcccagtgacaccttctttacctgctgtttttggtatatctgaaactgtcattgaagatcgattctgtttggagcatggcactgaaggatggtatagtgcactggatcatcactttaggtggctcctccaatataggattagtccatttttctgcagatggggtgatagcatgcgcattctagcatacacatgcccttggcctgccgatcatccgaaggctaatgaatattactctgacccaagattagcagcatatgctgtaccctatgcacctatcctatcgtgtacggatgctgcaaaaaattccctgaggagagaggttgaaatcttaaaatcgaagcctcattggtccaaagcttacttctatttgtgggatgaggtccaagtggctctgaactggctccctctacatttgaagcttttgcaaaagttccaaatgttctgcgtccgcacacgcaaatcttttgcacaagtgaatgggttcttggcacaagagaagacctagtgaaggatattgttgctgaattacggcctgatcttggtgaggagtggtggacatatgtttgtatgggtccttctgatcctcaaccaaactggcaccttgggatgcgtggaacccagcaccgggcagtgatgtggcgagtgtggaaggaaggtgggacaggatttctttattggggttccaactgctatgagaaggctatgatcccaagtgctgagatctgtttccgacgcggccttcctcctggcgacggtgtcctgttttaccctggtgaagtgttttcttcgtcacatgaaccagttgcttccacccggctagagcgcattctcagtggcatgcaggacatcgaatacctgaagctttattcttcacggtatgggagggaggaaggcctggcccttatagagaagactggcatgtaccttggaccggatcgatatacgctggatcatggaccggtagatgtgatgaggggtgaggtgtaccgcacctgcaggtcttagtgtagcaatgcctgccagatgctgtccttccagtctagggcgtctgttgtattatatatggtggtatgtgatctatgtagcgaattaatctacccttggtgatcgatcagatcatcaaacctggactaaactagtcctggtgcatcttttgaatctggctcgagagttgcatcaagtcgggagaaaaaaaacccaagagatctggccaagagatggagcgacccaggtccggctctggtacaaggcccagttagctaccggaagtgggccctatctgctgcaacaggattgagacgagattggcattgtcctctcgattccatgacgctgtgcccgcatacagctgaagctgaaatattctcctattagctgttaccttccatttcctttctgcgatttgcaccgcaggttacaccctccaaaggcgcattcgtttctaccgtgtgccgtgacgaggattcccgtctcagcaacggacgctgccgccgcgatgccctgtctctttcgaggtcggtagcgccatggcctaacgcggagctgtgtttggttggaagggaataatgcatgcgatgcatggtgaggaaggatgagtctatcccgagctctgtttggtccagagacatgaaaattaggtccagactgttaagtaaccctagttagggttatgtgggcaaatacctgctttgtccctg

SEQ ID NO: 1939 - DNA, 3089 bp, Zea Mays
cttccccttcgtttattgctcttctccggtccttctccgcaacccctggccctgtcaagcagacgcagggtgacaccaggcagcagcccacctccacgcgaacacgccgcaccacaccatcaccggcaccgcagcacggcagccagtcaccaggactccaggagtgatctttgatccccaccaggccgccacgctactgtcggtaaggccagggaccctgctgcatctgccggctgctcctctccccgcccccggttccatgagaggtcggcggtttcgataacacacaccaactgctccctccactccttccccctgccttcagcccttcccgcaccactcccaactcgtaaacgctgtgcgccaacgccgtcgcccttccggatccgtcgtccttccgccggcgccgtgatggacccaagcgattccaactccgccgcaggaggaaagacacaaaatgtttcagtaccgcctgttgaaggtgtagctggaggaggaactagctatggatgggtggatggaggtttgcggggtacaaatattggtgctggtgtgattgatcctacaaaagtacactcagatgatcttttgcacgtctggtctatgcccagcacagcaaatgttagccagcaagaagcgcctcggcctctagagaaagtcaaccttttggcagcaagaaatgaaagggaaagttttcaaattgctttacgcccaaaggtttcatgggcaacttcaggtattgcagggtctgtgcagatacaatgcaccgatctctgctcctcctcaggagacagggaagaccagcattcgcacagttctattccgatggttataaatgttgtaccaggtgtaccagatgcacttgttcctattgatccactcagtcctcaaataagtattcaaccaggggagacagctgcagtttgggtatcagtaaatgttccatgtgggcaaccgcctggtttatatgagggtgaaatattcattactgcagttaagacagaattagattccagaacagaatctctaccaaaatctgaaaagtgtaggctatacagagaattaagaagttgtcttgacctcactggacccagagactactcgtcaccagaggaaatggtacaaagactaacatcagcttctactgtactaaggagggtgttggataatccagcactccaggactgtcaagagaataatggatttggagacatgatggatgaagatgttataaacaatatttcagttcgcttgaagttaagccttactgtttgggacttcactctcccagtgacaccttctttacctgctgtttttggtgtatcctggcaatattcctttttactgtgttctatttccatttctgtgctgtgcaactgttatgggactgggtgcaatgggctgcgcttaatgggcctgcttggcccagcagaactggcagcaacagaaggcagtgttgggattgctgctgccctagccaaaccagcagcagggacacccgatcatccgaaggctaatgaatattactctgacccaagattagcagcatatgctgtaccctatgcacctatcctatcgtgtacggatgctgcaaaaaattccctgaggagagaggttgaaatcttaaaatcgaagcctcattggtccaaagcttacttctatttgtgggatgagccattaaatgtggaacagtatgacatgatatgcaacatctctaatgagctacggtcatatgcacctgatgtgcgaattttgacaacttactattgtggtccaagtggctctgaactggctccctctacatttgaagcttttgcaaaagttccaaatgttctgcgtccgcacacgcaaatcttttgcacaagtgaatgggttcttggcacaagagaagacctagtgaaggatattgttgctgaattacggcctgatcttggtgaggagtggtggacatatgtttgtatgggtccttctgatcctcaaccaaactggcaccttgggatgcgtggaacccagcaccgggcagtgatgtggcgagtgtggaaggaaggtgggacaggatttctttattggggttccaactgctatgagaaggctatgatcccaagtgctgagatctgtttccgacgcggccttcctcctggcgacggtgtcctgttttaccctggtgaagtgttttcttcgtcacatgaaccagttgcttccacccggctagagcgcattctcagtggcatgcaggacatcgaatacctgaagctttattcttcacggtatgggagggaggaaggcctggcccttatagagaagactggcatgtaccttggaccggatcgatatacgctggatcatggaccggtagatgtgatgaggggtgaggtgtaccgcacctgcaggtcttagtgtagcaatgcctgccagatgctgtccttccagtctagggcgtctgttgtattatatatggtggtatgtgatctatgtagcgaattaatctacccttggtgatcgatcagatcatcaaacctggactaaactagtcctggtgcatcttttgaatctggctcgagagttgcatcaagtcgggagaaaaaaaacccaagagatctggccaagagatggagcgacccaggtccggctctggtacaaggcccagttagctaccggaagtgggccctatctgctgcaacaggattgagacgagattggcattgtcctctcgattccatgacgctgtgcccgcatacagctgaagctgaaatattctcctattagctgttaccttccatttcctttctgcgatttgcaccgcaggttacaccctccaaaggcgcattcgtttctaccgtgtgccgtgacgaggattcccgtctcagcaacggacgctgccgccgcgatgccctgtctctttcgaggtcggtagcgccatggcctaacgcggagctgtgtttggttggaagggaataatgcatgcgatgcatggtgaggaaggatgagtctatcccgagctctgtttggtccagagacatgaaaattaggtccagactgttaagtaaccctagttagggttatgtgggcaaatacctgctttgtccctg

SEQ ID NO: 1940 - DNA, 3917 bp, Zea Mays
atggcgcccacactagcggctggaaggttagaagagggtgcaacaacgacagatgctctttacttagcagaaagaaaagggcatgatcaaacgaagaaatcactttctgaagctcaagaaacaaacaaggagttactaaaaaaaattgagaaagctgagaaaaacatagatcagcttctggagaatgtggaaagacttgaaaaagatgcaattacaagagagtctttactgcttacaacaaagcaaagctatggtgacaccgcaaaattgctgcttgaatctcaagagaaaaaccaagagttagtgcacaaagtagaggactcagatagcaaaattgttctgcttgaagattcagtaaaaagactcgaaggaaaattggcaataactgaagctttattgctaactgaaaaggaacagaatgcttccaccttaaaattacttgcagaagcacaattgagaatcgaagaattaataaaaaaacttgaaggttcagatagaaaatctgatagccttcaggatacaataacaagacttgaacaagatgtcactgccaaagaggccttattgcttacagaaaaggaggcacacgacgcaacaaggaagactctgactgaagctcaggaagagagtggagaacttctgaagaaaattcatgataatgataaacatattcttcagcttcagtttactatacaaaggcttgaggaaactacagttgcaaatgagaatttgctgttgagggagagggagcagaatgacataacaacaaaagcgcacaatgaaagtcaagaaaaatatgaagaattactaagcaaatttgttgatgttgacaggaaaatcgaccttcttcaaggtaccatagaaaggcttggagaaaatacaacaaaggattctctgttgctatcagagagacatgaaaaggatgctattaagaaagcacttactgaggctcaagagaaaaatgaagagttactgatgaaagttgaagatgctaatgaaaaaatagaacaacttcaaactacgatagatatgcttgaagataatgtagctgcaaaagatgtttctttagaagctgcaatgaaggaaaatgatgcaattaggagatctcttactgaagctcaagagagaaatgatgaattactcaagaaaattagtgacagtgaatacaggatccatttacttcaagacacgatacaaaagcttcaagtagatgcaatatcaagattgtcgtcttttgtaatggaaaaacaagaaagtgatgcttcaaagagagctgttactgaagctcatgaaagaaatgaagatttactgaagagaaatgaggacctcctcaagaggaatgatgatctgattaagaaaattgaagactctagtaaaattgtcactcaacttcaggaagctctacaaaggcttgaaggaaaagcatgcaacttagaggctgagaaccaagttcttcgtcaacaagcaacttcaactccaccaacttcagctaaatctccagcttcacgtgcaaagatctcaaggatccatagaagtccagagaatggccataatttgaatggtgacattaggcaaactgaaatgaagccctccactggcacatcagaagcaataacctcagcagctaatgttcctgacttgggcgaccaaaaagattttgaacatggagaaaaactgcaaagaataccaaaacagaaatatcagccttctcatcaccagcagccccaggacgatcagcagtggctactcgcttgtattccacaacatcttggattttctgggagcaaaccagttgcagctctccttatataccaatgccttctccattggaaatcatttgaagccatgaagacaggtgtcttcgacagcattttgcatgctataaactcagccacagaggctcaaaatgacatgagaacattggcatattggttgtccaacttatctacattaacagttctccttcaacgatcattcaaaactactaggacggcaatctcaactccacaaaggagaagattttcatcggagaggatctttcatggaaatcaaacttcaaatgctgggcttgcttatctcagtggtcaatcagttgttgggtctgctggactgccccaagttgaagcaaaatatcctgctttgctattcaaacagcagctcgtggatctaattgaaaaggtttatggcatgataagtgacagcgtgaagaaggagctaaaccctttgcttgaattgtgtatacaggatccacgaacttctcactcgagtatcgcaaaaggcaatcttaatggcatgggtcaacagaaccaactcacatattggctgggcatagtgaaaattctcactagctacttggatgtactgagggtaaatcacgttccatcaattctggtgcataaactcttcactcagatattctcattgattgatgttcaactatttaaccggttacttttgcggcgtgagtgctgttcttttagtaacggggaatatgtcagagctggactaactgaactaaaacattggtccgacaatgctacaagagagtttgcaggttcagcgtgggaggcattgaggcatattagacaagctgtcgatttcctggtgatttctcttaaaccaatgaggacattaagagagatacacactgatgtgtgccctgccctcagcatacaacagctagagcgaatagttagtatgtactgggatgatgtgaatggaacaaacactatttcagcagagtttacatcaagcttgaaatctgcggtgcgtgatgaatcgaatatggccacaagtttttctatattgctagatgatgattccagtatacctttttcacttgatgatattacaaagacactgccagtcattgaggtggctgatgacgactttgtgccttttgtccatgaaaacccaagctttgcgtttttattgcaaagaggggagtagtccatttttcctcaccatggtgacttcacccacctgtggataagtcaggattcctgcctaggatgtacagtacgcgtgattctttttgtaccaggtagcaaggcattaaagattagatgctaggtgagcttataggattctggttttattgatttgtgtgttgattgtccatttgtattcaggttttccttgccattttttttctgtttgtagttatttttttgggcttgtatactaggggctaagggcagaaggccctgtcctgtaagcaaagtagcacaaggttttgctgtaggtgggaaagctgtacatgtgttgtaggagggggagtagcggttatcctgctggtcagggctaagaacgacagttgttgagaaggcaacggttatgccgtttttcctggatgagcagaatatcttgtcctggactgctggacagcagagcagtgcccacggaggtctctgcgcgctcgatcgcgacgatgcggccactatggtagtagatgcactcattacctgttatactagtaatttgctcgcgcctcgcgcaagtcgttaaccgatgagtttatacaattaaaagagtgttgctttagccatataaatacagaagtagtaatatatgtggatacataaacatagaagtgacaaaattatataaacatacaattgtttgcgttggtagataagttcagtagcatcgtgagcagcctagatgtcaaaattttgaagacaacaaaatactggtcttgaaggccacaaaatgcagagcaacattacaatgcacggatccttttcatgatcgtgctcactttttatgaaattcattgcttgttgtattgaatgtatatgtatacattaaggtacaattattagaattgtctcaatatgtaacgaagtaacatgaatagatagctttgcttagcacagaatgtcatgtgaatgtagcaaaaaataagtcagttttat

SEQ ID NO: 1941 - DNA, 8626 bp, Zea Mays
cctcacctctctctctctctctctctctctctctcccctgtccgcggtcgcgtcgccttccaccaccaccccaccagcccacccgcatccgcgtcgctgctgctgctgccaccgtcgtgcgtctccgcgccacgcgtgcgcgtacccgtggcggatcgcgctgcagcagaggcgatcggcgagcgatccaggggaggagatcgcttgtcggcgccgccgctgccgccgccgatcgagccgcgactcctcccgttcggtcccctcgcagctcccgtccgggcccgtccctcgaggcagggcggggtggctcgatcgcccgcagatgaaacatggcttcgacgttaaacattgtaataggttctcatgtatgggtggaagataaagatttgtcctgggttgatggcgaggtatcccggattgatggtaaaaaagcccatgttcgcacaaccaaggggaagacggtcattgcaaatatatcggatatccaccctaaagacacagaagcaccgcctgatggggtggatgacatgacaaggttatcatacttgcatgagcctggtgttttagataacctggctgtcagatatgcgaaaaatatcatttatacctatactggtaacattctgattgcaataaatccattccaaaggctacctaatctggttgatgcccgtactatggaaaaatacaaaggtgcaaatcttggtgacctagatcctcatgtatttgcaatagctgacgtctcttacaggcaaatgataaatgaaggaaagagtaactccattttggtcagtggtgaaagtggtgctggtaagactgaaactacgaagttgttgatgggatatcttgcatatctgggtgggcgatctggaacaggagagaggacagttgaacagcaagtattagaatctaatccagttcttgaagcctttgggaatgcgaaaactgttcggaacaacaactcaagtcgatttggtaaatttgttgaaatccaatttgacaagagcggtaagatatctggtgctgccattagaacttacttgctcgagagatctcgagtttgccaaattaatagtccagagaggaactaccattgcttttacttcctatgtgcagcaccatcagaggatctcaagaagtataagctcggggacccatcgttgtttcactatctcaaccagtcagcttgtattaaagttgatggaatcaatgatgctgaagaataccttgcaacaagaaaagcaatggatactgttggcattactgatcaagaacaggaagctatattccgggttgttgctgctgtgcttcatcttggaaacataaattttacaaaagggagagaagcagattcatccataataaaggatgacaaatctagattccatcttaatacagcaggagagctcttaatgtgtgattgtgagaagttggagaatgccttgataaagagggaaattaatacaccagaaggagtgattaccacaacagttggtccgaattctgctactattagccgggatggtttagcaaagcagatatactctcgattgtttgactggcttgtaaacagaataaatgcatcgataggacaagacccaaactctaacaaactgattggggtacttgatatatatggttttgaaagttttaaaaccaacagttttgaacaactgtgcatcaattttaccaatgaaaaactccagcaacattttaatcagaatgtcttcaaaatggaacaagaggaatacacaagggagcaaattaattggagttacatagagtttgttgacaatcaagatgtacttgacctgattgaaaggaaaccaggtggcattattgcgcttcttgatgaagcctgcatgtttccaaagtccacacacgagacattgtctcagaagctgtacgaaaagttcaagaaccacaaaagatttaccaaaccaaagctttctcgtactgcatttacaattcaacattatgctggagatgtaacatatcaatctgatcaattcctggacaagaacaaggactatgtggtagcagagcatcaggaattacttaatgcttctaagtgctcttttgtatcagggttatttccacaagcaacagaagagaacacaaaatcatcaaaatcctcaattgcaactcgctttaagatacaacttcatgaactcatggagactttgagctctacagagccacattacataagatgtataaaaccaaatagtgtccttaagcctggcatttttgagaataccaatgttctgcagcagcttcgatgttctggtgttcttgaagccattagaatcagctgtgctggttatcccacaaggaaactatttcatgattttctacatcgttttcgtgttcttgctcctgaaattttgaaagagaaaaatgatgaaaaagtctcctgtcaaaaggttttggacaaaatgggactacagggttatcagataggaagaactaaggtattcctgagggctggtcaaatggctgatctggatgccagaagaacagagatgcgaaacaatgcagcaaaaggcgttcagagtcaattccgtactcatgttgctcgtgagcagttcctagtactacgggacacatctatttatttgcaatctttcgttagagccagattggcatgtaagcaacatgaattcctgagacaacaagcagcagctttgagaattcagaaaaatgcacgatggtattttgcctggaaaacttattaccaactacgattgtcagccattacattgcaggccgggctaaggtccatggcagctcgtaatgagttcacctttagaaagaaaaataaagcttcagtccatatccagtcccagtggcgatgccaccgagattactcaaattatatgaatttgaagagagccgcactaacatatcagtgtgcttggcgaagaagggttgctaggaaggagctgaggaagctcaaactggctgcaagagatacacaggctctaaaggtggccaaagagaaacttgaggaacgtgtggaagagctaacaagtcgcctggaccgcgaaaagaaactaagggctgatttggagaagtctaaagcagatgaagtttccaaattgaaagaagctcttcatgagatggagcagcgagtagaagaagtgaaagcgatgcaggaacaagaatcagcaaaaaaggctgttgaagaagctctagctcaagaaagagaaaagatcagtttattgactactgaaattgagggcctaaaggttctgctagtagctgaacgagaggagaatgataaaatgaagaaagcgcatgctaatgctctggaaacaaatgaagagttaaataaggaagtcagtgatgcagatgaaaagatcaaacaatttagtgatactgtaagaagactagaagggactgtaagcgaacatgagggccttttgctaactgaaaggcaacaaaatgaagcagctaatgctgcacttgctgaatctcaagcgagaaatgaagcactggtaagcaagcttgaagatgctgtgaaacaaaatgatctcctccatgaagctgaccaaagatttcaagaagctacaaaaaatttggaatcttcactgacatttgagaagcaacgacatgaggcaaatttgatagaattagctgaagcacgagaaaagattgaagaacttcaaagagaagttggggacactgatgaaaaattcaccctgcttcagactagtatacaaagcgttgaagaaaggttaagagagaaggatgctctattgacaacagaaagactagaaagtgaagcaactaagaaatcactaaatgaatctgaggatagaaaccaggacttactactgaaaattgaaattgctcagaaagacattgctcacttccaagaaaccgtccgaagacatgaagaaaatatggcagcactggaaacttcgttgagatctgaaaggcagcaaaatgatgcaatcatgaaacaactagctgaatctcagggggaaataggagagctgcaaaggaagcttgaagatgctgatgccagaaatgggcttcttcaagattctttacagagacatgaagaaaatatggcagcactggaaacttcgttgagatctgaaaggcagcaaaatgatgcaatcatgaaacaactagctgaatctcagggggaaataggagagctgcaaaggaagcttgaagatgctgatgccagaaatgggcttcttcaagattctttacagagacatgaagaaaatatggcagcactggaaacttcgttgagatctgaaaggcagcaaaatgatgcaatcatgaaacaactagctgaatctcagggggaaataggagagctgcaaaggaagcttgaagatgctgatgccagaaatgggcttcttcaagattctttacagagacttgaagacgatgctactacaagagaagctttaatggaaactgaaaggaaagaaactgaaatgacaaaaaagacactgactgaagctctggatcaaatcgaggaattagtcaaagaagttgagtgtgctaaccacagtgtgcatcagcttcaagatagtatgcagagaatggagcaaaccgcagttgcaagggaagcaactttactagcagaacatcaggaaaaagatgcgacatcaaaagcattagcagaggcacaagggaggattgaaggtttactgaaggaaatttattctgctaatagaaaaaatgatcaacttcaaagtactatagaaaggttagaagagggtgcaacaacgacagatgctctttacttagcagaaagaaaagggcatgatcaaacgaagaaatcactttctgaagctcaagaaacaaacaaggagttactaaaaaaaattgagaaagctgagaaaaacatagatcagcttctggagaatgtggaaagacttgaaaaagatgcaattacaagagagtctttactgcttacaacaaagcaaagctatggtgacaccgcaaaattgctgcttgaatctcaagagaaaaaccaagagttagtgcacaaagtagaggactcagatagcaaaattgttctgcttgaagattcagtaaaaagactcgaagaaagtactgcagataaagattctttattggctatagaaagacatgaaaacagtgaaaccaagaaagaattagttggttctcagaaaaagattgcggaattgctaactgaagtgcaagatactcgtgcaaatgttgcagaacttgaggacttgattaggagacttgaacaagatgtcactgccaaagaggccttattgcttacagaaaaggaggcacacgacgcaacaaggaagactctgactgaagctcaggaagagagtggagaacttctgaagaaaattcatgataatgataaacatattcttcagcttcagtttactatacaaaggcttgaggaaactacagttgcaaatgagaatttgctgttgagggagagggagcagaatgacataacaacaaaagcgcacaatgaaagtcaagaaaaatatgaagaattactaagcaaatttgttgatgttgacaggaaaatcgaccttcttcaaggtaccatagaaaggcttggagaaaatacaacaaaggattctctgttgctatcagagagacatgaaaaggatgctattaagaaagcacttactgaggctcaagagaaaaatgaagagttactgatgaaagttgaagatgctaatgaaaaaatagaacaacttcaaactacgatagatatgcttgaagataatgtagctgcaaaagatgtttctttagaagctgcaatgaaggaaaatgatgcaattaggagatctcttactgaagctcaagagagaaatgatgaattactcaagaaaattagtgacagtgaatacaggatccatttacttcaagacacgatacaaaagcttcaagtagatgcaatatcaagattgtcgtcttttgtaatggaaaaacaagaaagtgatgcttcaaagagagctgttactgaagctcatgaaagaaatgaagatttactgaagagaaatgaggacctcctcaagaggaatgatgatctgattaagaaaattgaagactctagtaaaattgtcactcaacttcaggaagctctacaaaggcttgaaggaaaagcatgcaacttagaggctgagaaccaagttcttcgtcaacaagcaacttcaactccaccaacttcagctaaatctccagcttcacgtgcaaagatctcaaggatccatagaagtccagagaatggccataatttgaatggtgacattaggcaaactgaaatgaagccctccactggcacatcagaagcaataacctcagcagctaatgttcctgacttgggcgaccaaaaagattttgaacatggagaaaaactgcaaagaataccaaaacagaaatatcagccttctcatcaccagcagccccaggacgatcagcagtggctactcgcttgtattccacaacatcttggattttctgggagcaaaccagttgcagctctccttatataccaatgccttctccattggaaatcatttgaagccatgaagacaggtgtcttcgacagcattttgcatgctataaactcagccacagaggctcaaaatgacatgagaacattggcatattggttgtccaacttatctacattaacagttctccttcaacgatcattcaaaactactaggacggcaatctcaactccacaaaggagaagattttcatcggagaggatctttcatggaaatcaaacttcaaatgctgggcttgcttatctcagtggtcaatcagttgttgggtctgctggactgccccaagttgaagcaaaatatcctgctttgctattcaaacagcagctcgtggatctaattgaaaaggtttatggcatgataagtgacagcgtgaagaaggagctaaaccctttgcttgaattgtgtatacaggatccacgaacttctcactcgagtatcgcaaaaggcaatcttaatggcatgggtcaacagaaccaactcacatattggctgggcatagtgaaaattctcactagctacttggatgtactgagggtaaatcacgttccatcaattctggtgcataaactcttcactcagatattctcattgattgatgttcaactatttaaccggttacttttgcggcgtgagtgctgttcttttagtaacggggaatatgtcagagctggactaactgaactaaaacattggtccgacaatgctacaagagagtttgcaggttcagcgtgggaggcattgaggcatattagacaagctgtcgatttcctggtgatttctcttaaaccaatgaggacattaagagagatacacactgatgtgtgccctgccctcagcatacaacagctagagcgaatagttagtatgtactgggatgatgtgaatggaacaaacactatttcagcagagtttacatcaagcttgaaatctgcggtgcgtgatgaatcgaatatggccacaagtttttctatattgctagatgatgattccagtatacctttttcacttgatgatattacaaagacactgccagtcattgaggtggctgatgacgactttgtgccttttgtccatgaaaacccaagctttgcgtttttattgcaaagaggggagtagtccatttttcctcaccatggtgacttcacccacctgtggataagtcaggattcctgcctaggatgtacagtacgcgtgattctttttgtaccaggtagcaaggcattaaagattagatgctaggtgagcttataggattctggttttattgatttgtgtgttgattgtccatttgtattcaggttttccttgccattttttttctgtttgtagttatttttttgggcttgtatactaggggctaagggcagaaggccctgtcctgtaagcaaagtagcacaaggttttgctgtaggtgggaaagctgtacatgtgttgtaggagggggagtagcggttatcctgctggtcagggctaagaacgacagttgttgagaaggcaacggttatgccgtttttcctggatgagcagaatatcttgtcctggactgctggacagcagagcagtgcccacggaggtctctgcgcgctcgatcgcgacgatgcggccactatggtagtagatgcactcattacctgttatactagtaatttgctcgcgcctcgcgcaagtcgttaaccgatgagtttatacaattaaaagagtgttgctttagccatataaatacagaagtagtaatatatgtggatacataaacatagaagtgacaaaattatataaacatacaattgtttgcgttggtagataagttcagtagcatcgtgagcagcctagatgtcaaaattttgaagacaacaaaatactggtcttgaaggccacaaaatgcagagcaacattacaatgcacggatccttttcatgatcgtgctcactttttatgaaattcattgcttgttgtattgaatgtatatgtatacattaaggtacaattattagaattgtctcaatatgtaacgaagtaacatgaatagatagctttgcttagcacagaatgtcatgtgaatgtagcaaaaaataagtcagttttat

SEQ ID NO: 1942 - DNA, 8855 bp, Zea Mays
tttttttctaattgcgttacatgacagtcgcgcccggctggcttcgcctggccgtggcacccctcacctctctctctctctctctctctctctctcccctgtccgcggtcgcgtcgccttccaccaccaccccaccagcccacccgcatccgcgtcgctgctgctgctgccaccgtcgtgcgtctccgcgccacgcgtgcgcgtacccgtggcggatcgcgctgcagcagaggcgatcggcgagcgatccaggggaggagatcgcttgtcggcgccgccgctgccgccgccgatcgagccgcgactcctcccgttcggtcccctcgcagctcccgtccgggcccgtccctcgaggcagggcggggtggctcgatcgcccgcagatgaaacatggcttcgacgttaaacattgtaataggttctcatgtatgggtggaagataaagatttgtcctgggttgatggcgaggtatcccggattgatggtaaaaaagcccatgttcgcacaaccaaggggaagacggtcattgcaaatatatcggatatccaccctaaagacacagaagcaccgcctgatggggtggatgacatgacaaggttatcatacttgcatgagcctggtgttttagataacctggctgtcagatatgcgaaaaatatcatttatacctatactggtaacattctgattgcaataaatccattccaaaggctacctaatctggttgatgcccgtactatggaaaaatacaaaggtgcaaatcttggtgacctagatcctcatgtatttgcaatagctgacgtctcttacaggcaaatgataaatgaaggaaagagtaactccattttggtcagtggtgaaagtggtgctggtaagactgaaactacgaagttgttgatgggatatcttgcatatctgggtgggcgatctggaacaggagagaggacagttgaacagcaagtattagaatctaatccagttcttgaagcctttgggaatgcgaaaactgttcggaacaacaactcaagtcgatttggtaaatttgttgaaatccaatttgacaagagcggtaagatatctggtgctgccattagaacttacttgctcgagagatctcgagtttgccaaattaatagtccagagaggaactaccattgcttttacttcctatgtgcagcaccatcagaggatctcaagaagtataagctcggggacccatcgttgtttcactatctcaaccagtcagcttgtattaaagttgatggaatcaatgatgctgaagaataccttgcaacaagaaaagcaatggatactgttggcattactgatcaagaacaggaagctatattccgggttgttgctgctgtgcttcatcttggaaacataaattttacaaaagggagagaagcagattcatccataataaaggatgacaaatctagattccatcttaatacagcaggagagctcttaatgtgtgattgtgagaagttggagaatgccttgataaagagggaaattaatacaccagaaggagtgattaccacaacagttggtccgaattctgctactattagccgggatggtttagcaaagcagatatactctcgattgtttgactggcttgtaaacagaataaatgcatcgataggacaagacccaaactctaacaaactgattggggtacttgatatatatggttttgaaagttttaaaaccaacagttttgaacaactgtgcatcaattttaccaatgaaaaactccagcaacattttaatcagaatgtcttcaaaatggaacaagaggaatacacaagggagcaaattaattggagttacatagagtttgttgacaatcaagatgtacttgacctgattgaaaggaaaccaggtggcattattgcgcttcttgatgaagcctgcatgtttccaaagtccacacacgagacattgtctcagaagctgtacgaaaagttcaagaaccacaaaagatttaccaaaccaaagctttctcgtactgcatttacaattcaacattatgctggagatgtaacatatcaatctgatcaattcctggacaagaacaaggactatgtggtagcagagcatcaggaattacttaatgcttctaagtgctcttttgtatcagggttatttccacaagcaacagaagagaacacaaaatcatcaaaatcctcaattgcaactcgctttaagatacaacttcatgaactcatggagactttgagctctacagagccacattacataagatgtataaaaccaaatagtgtccttaagcctggcatttttgagaataccaatgttctgcagcagcttcgatgttctggtgttcttgaagccattagaatcagctgtgctggttatcccacaaggaaactatttcatgattttctacatcgttttcgtgttcttgctcctgaaattttgaaagagaaaaatgatgaaaaagtctcctgtcaaaaggttttggacaaaatgggactacagggttatcagataggaagaactaaggtattcctgagggctggtcaaatggctgatctggatgccagaagaacagagatgcgaaacaatgcagcaaaaggcgttcagagtcaattccgtactcatgttgctcgtgagcagttcctagtactacgggacacatctatttatttgcaatctttcgttagagccagattggcatgtaagcaacatgaattcctgagacaacaagcagcagctttgagaattcagaaaaatgcacgatggtattttgcctggaaaacttattaccaactacgattgtcagccattacattgcaggccgggctaaggtccatggcagctcgtaatgagttcacctttagaaagaaaaataaagcttcagtccatatccagtcccagtggcgatgccaccgagattactcaaattatatgaatttgaagagagccgcactaacatatcagtgtgcttggcgaagaagggttgctaggaaggagctgaggaagctcaaactggctgcaagagatacacaggctctaaaggtggccaaagagaaacttgaggaacgtgtggaagagctaacaagtcgcctggaccgcgaaaagaaactaagggctgatttggagaagtctaaagcagatgaagtttccaaattgaaagaagctcttcatgagatggagcagcgagtagaagaagtgaaagcgatgcaggaacaagaatcagcaaaaaaggctgttgaagaagctctagctcaagaaagagaaaagatcagtttattgactactgaaattgagggcctaaaggttctgctagtagctgaacgagaggagaatgataaaatgaagaaagcgcatgctaatgctctggaaacaaatgaagagttaaataaggaagtcagtgatgcagatgaaaagatcaaacaatttagtgatactgtaagaagactagaagggactgtaagcgaacatgagggccttttgctaactgaaaggcaacaaaatgaagcagctaatgctgcacttgctgaatctcaagcgagaaatgaagcactggtaagcaagcttgaagatgctgtgaaacaaaatgatctcctccatgaagctgaccaaagatttcaagaagctacaaaaaatttggaatcttcactgacatttgagaagcaacgacatgaggcaaatttgatagaattagctgaagcacgagaaaagattgaagaacttcaaagagaagttggggacactgatgaaaaattcaccctgcttcagactagtatacaaagcgttgaagaaaggttaagagagaaggatgctctattgacaacagaaagactagaaagtgaagcaactaagaaatcactaaatgaatctgaggatagaaaccaggacttactactgaaaattgaaattgctcagaaagacattgctcacttccaagaaaccgtccgaagacatgaagaaaatatggcagcactggaaacttcgttgagatctgaaaggcagcaaaatgatgcaatcatgaaacaactagctgaatctcagggggaaataggagagctgcaaaggaagcttgaagatgctgatgccagaaatgggcttcttcaagattctttacagagacatgaagaaaatatggcagcactggaaacttcgttgagatctgaaaggcagcaaaatgatgcaatcatgaaacaactagctgaatctcagggggaaataggagagctgcaaaggaagcttgaagatgctgatgccagaaatgggcttcttcaagattctttacagagacatgaagaaaatatggcagcactggaaacttcgttgagatctgaaaggcagcaaaatgatgcaatcatgaaacaactagctgaatctcagggggaaataggagagctgcaaaggaagcttgaagatgctgatgccagaaatgggcttcttcaagattctttacagagacttgaagacgatgctactacaagagaagctttaatggaaactgaaaggaaagaaactgaaatgacaaaaaagacactgactgaagctctggatcaaatcgaggaattagtcaaagaagttgagtgtgctaaccacagtgtgcatcagcttcaagatagtatgcagagaatggagcaaaccgcagttgcaagggaagcaactttactagcagaacatcaggaaaaagatgcgacatcaaaagcattagcagaggcacaagggaggattgaaggtttactgaaggaaatttattctgctaatagaaaaaatgatcaacttcaaagtactatagaaaggttagaagagggtgcaacaacgacagatgctctttacttagcagaaagaaaagggcatgatcaaacgaagaaatcactttctgaagctcaagaaacaaacaaggagttactaaaaaaaattgagaaagctgagaaaaacatagatcagcttctggagaatgtggaaagacttgaaaaagatgcaattacaagagagtctttactgcttacaacaaagcaaagctatggtgacaccgcaaaattgctgcttgaatctcaagagaaaaaccaagagttagtgcacaaagtagaggactcagatagcaaaattgttctgcttgaagattcagtaaaaagactcgaagaaagtactgcagataaagattctttattggctatagaaagacatgaaaacagtgaaaccaagaaagaattagttggttctcagaaaaagattgcggaattgctaactgaagtgcaagatactcgtgcaaatgttgcagaacttgaggacttgattaggagactcgaaggaaaattggcaataactgaagctttattgctaactgaaaaggaacagaatgcttccaccttaaaattacttgcagaagcacaattgagaatcgaagaattaataaaaaaacttgaaggttcagatagaaaatctgatagccttcaggatacaataacaagacttgaacaagatgtcactgccaaagaggccttattgcttacagaaaaggaggcacacgacgcaacaaggaagactctgactgaagctcaggaagagagtggagaacttctgaagaaaattcatgataatgataaacatattcttcagcttcagtttactatacaaaggcttgaggaaactacagttgcaaatgagaatttgctgttgagggagagggagcagaatgacataacaacaaaagcgcacaatgaaagtcaagaaaaatatgaagaattactaagcaaatttgttgatgttgacaggaaaatcgaccttcttcaaggtaccatagaaaggcttggagaaaatacaacaaaggattctctgttgctatcagagagacatgaaaaggatgctattaagaaagcacttactgaggctcaagagaaaaatgaagagttactgatgaaagttgaagatgctaatgaaaaaatagaacaacttcaaactacgatagatatgcttgaagataatgtagctgcaaaagatgtttctttagaagctgcaatgaaggaaaatgatgcaattaggagatctcttactgaagctcaagagagaaatgatgaattactcaagaaaattagtgacagtgaatacaggatccatttacttcaagacacgatacaaaagcttcaagtagatgcaatatcaagattgtcgtcttttgtaatggaaaaacaagaaagtgatgcttcaaagagagctgttactgaagctcatgaaagaaatgaagatttactgaagagaaatgaggacctcctcaagaggaatgatgatctgattaagaaaattgaagactctagtaaaattgtcactcaacttcaggaagctctacaaaggcttgaaggaaaagcatgcaacttagaggctgagaaccaagttcttcgtcaacaagcaacttcaactccaccaacttcagctaaatctccagcttcacgtgcaaagatctcaaggatccatagaagtccagagaatggccataatttgaatggtgacattaggcaaactgaaatgaagccctccactggcacatcagaagcaataacctcagcagctaatgttcctgacttgggcgaccaaaaagattttgaacatggagaaaaactgcaaagaataccaaaacagaaatatcagccttctcatcaccagcagccccaggacgatcagcagtggctactcgcttgtattccacaacatcttggattttctgggagcaaaccagttgcagctctccttatataccaatgccttctccattggaaatcatttgaagccatgaagacaggtgtcttcgacagcattttgcatgctataaactcagccacagaggctcaaaatgacatgagaacattggcatattggttgtccaacttatctacattaacagttctccttcaacgatcattcaaaactactaggacggcaatctcaactccacaaaggagaagattttcatcggagaggatctttcatggaaatcaaacttcaaatgctgggcttgcttatctcagtggtcaatcagttgttgggtctgctggactgccccaagttgaagcaaaatatcctgctttgctattcaaacagcagctcgtggatctaattgaaaaggtttatggcatgataagtgacagcgtgaagaaggagctaaaccctttgcttgaattgtgtatacaggatccacgaacttctcactcgagtatcgcaaaaggcaatcttaatggcatgggtcaacagaaccaactcacatattggctgggcatagtgaaaattctcactagctacttggatgtactgagggtaaatcacgttccatcaattctggtgcataaactcttcactcagatattctcattgattgatgttcaactatttaaccggttacttttgcggcgtgagtgctgttcttttagtaacggggaatatgtcagagctggactaactgaactaaaacattggtccgacaatgctacaagagagtttgcaggttcagcgtgggaggcattgaggcatattagacaagctgtcgatttcctggtgatttctcttaaaccaatgaggacattaagagagatacacactgatgtgtgccctgccctcagcatacaacagctagagcgaatagttagtatgtactgggatgatgtgaatggaacaaacactatttcagcagagtttacatcaagcttgaaatctgcggtgcgtgatgaatcgaatatggccacaagtttttctatattgctagatgatgattccagtatacctttttcacttgatgatattacaaagacactgccagtcattgaggtggctgatgacgactttgtgccttttgtccatgaaaacccaagctttgcgtttttattgcaaagaggggagtagtccatttttcctcaccatggtgacttcacccacctgtggataagtcaggattcctgcctaggatgtacagtacgcgtgattctttttgtaccaggtagcaaggcattaaagattagatgctaggtgagcttataggattctggttttattgatttgtgtgttgattgtccatttgtattcaggttttccttgccattttttttctgtttgtagttatttttttgggcttgtatactaggggctaagggcagaaggccctgtcctgtaagcaaagtagcacaaggttttgctgtaggtgggaaagctgtacatgtgttgtaggagggggagtagcggttatcctgctggtcagggctaagaacgacagttgttgagaaggcaacggttatgccgtttttcctggatgagcagaatatcttgtcctggactgctggacagcagagcagtgcccacggaggtctctgcgcgctcgatcgcgacgatgcggccactatggtagtagatgcactcattacctgttatactagtaatttgctcgcgcctcgcgcaagtcgttaaccgatgagtttatacaattaaaagagtgttgctttagccatataaatacagaagtagtaatatatgtggatacataaacatagaagtgacaaaattatataaacatacaattgtttgcgttggtagataagttcagtagcatcgtgagcagcctagatgtcaaaattttgaagacaacaaaatactggtcttgaaggccacaaaatgcagagcaacattacaatgcacggatccttttcatgatcgtgctcactttttatgaaattcattgcttgttgtattgaatgtatatgtatacattaaggtacaattattagaattgtctcaatatgtaacgaagtaacatgaatagatagctttgcttagcacagaatgtcatgtgaatgtagcaaaaaataagtcagttttat

SEQ ID NO: 1943 - DNA, 1200 bp, Zea Mays
accgtcaacccgcatctgcagcacgtctcctccttttcctcgtccacccggccatctccgcatccactaccgcaggccgcagcccagcaccggccgctctacgccggcacgtcctcgtttctgtccgaggtcatcgcctccgcaacttcgtggccggtgaggtcgcaccaccatggcgtcgctcctagcccggcaggcagcgcaggcgctccgcgcgaggcaaacggcgcagctcgggccggccgcgtcggcgatgcaagggcacctccgtacctacatgaacgcggggattcccaagcggttcaaagaggatgaggagaaagaacagcttgcaaaagatctcgcaaaagattggaatgctgtgtttgaaaggagcatcaatacattgtttttgactgaaatggtccgtggcttgatgctaactctcaagtacttctttgatagaaatgtcacaattaactatccgtttgagaagggtcctctgagcccccgcttccgtggtgagcacgctctcagacgttatgaatctggggaagagcgctgcattgcttgtaaactatgcgaagctgcaattacaattgaggctgaagaacgtgaagatggcagtcgccgaaccacaagatatgatattgacatgaccaaatgcatttactgtgggttctgtcaagaggcttgcccagtcgatgctattgttgaggggcctaactttgagtttgccactgagacacacgaggaactactgtacgacaaggagaaattgcttgagaatggtgatcgctgggagactgagattgctgagaacttgagatctgagagcctctatcgctgaatctgtcttccattatggttgataaactgggttcttccattttccatattttgctcaactagctgatgaataagcaaacgatgtatcataacttaggtacgatgtttttgtaccttggcaccatctgtgtgttttgttcattgccttgctaaaggtggcaccagatgttctttgatgggaaaattccttttgtagcactgagctgttttcagtcaccttattttgtatacaatgaaacagaacgctgtgttcatggcacagtgatttggtgaatgttcacatgcttgtttccgactccgttttaaaacaaaacaaggtttgaactgattagcttgttgtaaatgtcgtttattttgaaaattgaaacaaac

SEQ ID NO: 1944 - DNA, 621 bp, Zea Mays
atggccgcctccagcgccgacccggctcagcaccacgcctcctcgaggccgccactcctcctcgccgtacgccacctgcccttcccgggcgtcccccgaacacgcacgttccccgtccccggccccgacgtcctcgcccctctcgcccgccgcctcgaggagctcgcgtccgcggcggccgcccacccgctcctgaagccgctcttcgccgcccactcccacctctcctccttctcccagggcaggaggcgtctggtggcggcgcggcgtgccacggtgctgtcgtccggggagctctgcttcgcggcggtgctcggggactcggtggccgggacggtggtggccagcggcatcaataacttcctcaacctttacaacacggtgctcgtcgtcaggctcgtgctcacctggttccccaacacgccgcccgccatcgtcgcgcctctcagcacggccgccgcgcttcccgcggagctgccaagctgctcggcaacggcgcagcatcaccagaggactgctgtctcaccctgctcggcgccgcatgaggcgacgctcagccagaggaaatggatgcggagaatgcggtcacagaagccacagggagacgatggtgatcactag

SEQ ID NO: 1945 - DNA, 970 bp, Zea Mays
acagtgacaaggaccattatcatagaagatctcagcgacaaaacaatgaagatcactttatgggcagattaggcgataatgttcaatcttcatgacgtgtacgatgcaaatacaaataaaccgattcttgtgctattcgtcgggtgcttaccaaaatttttcaaaggtgtctacctaagtggtggtcctgcctgtagatggtacttcaatccaacaattccagaggcagaaccttatcttaccagccagtctacaaaaagaattgtgttacagcttccccaaaatttacaacatcctccagcgatggaaacgaagccaattgtcgaacataaatccctctatgaacttcttacagttaacccatatgatttcccggaaacaggatttgaatgtactatcacaatagcagaaataccagctgaacacaaatggtggtttccatcttgcacaaaatgcaataaagcaacaatccctcacactacaggttatcactgtgaatcatgcaattgggatggatacaaatttaagaatttctgatcaacaaggaccatcaacacctcaaaacaaatcaaaaccgatgttattggaagactctccatctacaactttggaaaaattatctactacaactcctacaactgtagtaaggaagcttctatattccgaaactgacaacacgccgaaaacgcactcaatttcttttactcaattatcttttattcattttaagatttatgcaaacaagagtaatatcaatagcccagaaaaagatgatggcgataaggaaaccgcacagaacttcgatatatgcagcttgatacaatacccactaacaaaggaaaaggaccagcagatacaattgaatcgccacctaaaaggttcaaacaagggacgatacgcatcggaaaagaaatggacatcaaatcctccgagaactaaagtttcactcagatcttcgtcgaccttttga

SEQ ID NO: 1946 - DNA, 1000 bp, Zea Mays
cagtgacaaggaccattatcatagaagatctcagcgacaaaacaatgaagatcactttatgggcagattaggcgataatgttcaatcttcatgacgtgtacgatgcaaatacaaataaaccgattcttgtgctattcgtcgggtgcttaccaaaatttttcaaaggtgtctacctaagtggtggtcctgcctgtagatggtacttcaatccaacaattccagaggcagaaccttatcttaccagccagtctacaaaaagaattgtgttacagcttccccaaaatttacaacatcctccagcgatggaaacgaagccaattgtcgaacataaatccctctatgaacttcttacagttaacccatatgatttcccggaaacaggatttgaatgtactatcacaatagcagaaataccagctgaacacaaatggtggtttccatcttgcacaaaatgcaataaagcaacaatccctcacactacagttgcccaaacgtgttccgcattaattctattgttgctgcacatgggagacaacgttctttaccaatgcaaataggaatttctgatcaacaaggaccatcaacacctcaaaacaaatcaaaaccgatgttattggaagactctccatctacaactttggaaaaattatctactacaactcctacaactgtagtaaggaagcttctatattccgaaactgacaacacgccgaaaacgcactcaatttcttttactcaattatcttttattcattttaagatttatgcaaacaagagtaatatcaatagcccagaaaaagatgatggcgataaggaaaccgcacagaacttcgatatatgcagcttgatacaatacccactaacaaaggaaaaggaccagcagatacaattgaatcgccacctaaaaggttcaaacaagggacgatacgcatcggaaaagaaatggacatcaaatcctccgagaactaaagtttcactcagatcttcgtcgaccttttga

SEQ ID NO: 1947 - DNA, 1296 bp, Zea Mays
atggaatacactttattacctgatttagcaccgcataagatacatgcaaagattcaagtacatgtatctagaaagtggcttttccgaggtgctactgatagtggaccactacaacatgttgatatggttttgtctgatcgagagggtaatgctatttatgctgaaatccctggaaatttagctgaacaaaaagcaacaaatattgaagaaggaggagtttatgatatcaacagattcagagtgtgcgcagcaaaaactgttttcaaaatagtggatggggacaaaatgatccaattcacatttcataccatagtaaaatgtgccacaagccctccaacaacatttccattatatgtttatcggctaacatcatttgatctaattgagcctcatgttcaaactacaaataactttgttggtgtctacctaagtggtggtcctgcctgtagatggtacttcaatccaacaattccagaggcagaaccttatcttaccagccagtctacaaaaagaattgtgttacagcttccccaaaatttacaacatcctccagcgatggaaacgaagccaattgtcgaacataaatccctctatgaacttcttacagttaacccatatgatttcccggaaacaggatttgaatgtactatcacaatagcagaaataccagctgaacacaaatggtggtttccatcttgcacaaaatgcaataaagcaacaatccctcacactacaggttatcactgtgaatcatgcaattgggatggatacaaatttaattgcccaaacgtgttccgcattaattctattgttgctgcacatgggagacaacgttctttaccaatgcaaataggaatttctgatcaacaaggaccatcaacacctcaaaacaaatcaaaaccgatgttattggaagactctccatctacaactttggaaaaattatctactacaactcctacaactgtagtaaggaagcttctatattccgaaactgacaacacgccgaaaacgcactcaatttcttttactcaattatcttttattcattttaagatttatgcaaacaagagtaatatcaatagcccagaaaaagatgatggcgataaggaaaccgcacagaacttcgatatatgcagcttgatacaatacccactaacaaaggaaaaggaccagcagatacaattgaatcgccacctaaaaggttcaaacaagggacgatacgcatcggaaaagaaatggacatcaaatcctccgagaactaaagtttcactcagatcttcgtcgaccttttga

SEQ ID NO: 1948 - DNA, 1793 bp, Zea Mays
ccaggtccttggactccttgcatatcggtcagtttgccatcagaacaaggagaaaaaaaggttccggtcttcatcccttccatttccaaaggacgacgctctcaccattcacgaacggcgactgcggatcgatcgtgcgtcgtctcctgcgccggcctctcttcaagtcagccaagggtcgttttcctcgcttcactgagtctctcacaaacactaatcgaaatttgatttattaacacacatggcgtcattttcaagttcccaagcagcccacagattctattgattgtgggtgtctttcagcatctgagggtttctaccagtccaggttacacacaagcttcaaattatcgcaaaattcctcttacatatctacatctcataccggaccaggtctcataccggaccagaaaaatggaatacactttattacctgatttagcaccgcataagatacatgcaaagattcaagtacatgtatctagaaagtggcttttccgaggtgctactgatagtggaccactacaacatgttgatatggttttgtctgatcgagagggtaatgctatttatgctgaaatccctggaaatttagctgaacaaaaagcaacaaatattgaagaaggaggagtttatgatatcaacagattcagagtgtgcgcagcaaaaactgttttcaaaatagtggatggggacaaaatgatccaattcacatttcataccatagtaaaatgtgccacaagccctccaacaacatttccattatatgtttatcggctaacatcatttgatctaattgagcctcatgttcaaactacaaataactttgttggtgtctacctaagtggtggtcctgcctgtagatggtacttcaatccaacaattccagaggcagaaccttatcttaccagccagtctacaaaaagaattgtgttacagcttccccaaaatttacaacatcctccagcgatggaaacgaagccaattgtcgaacataaatccctctatgaacttcttacagttaacccatatgatttcccggaaacaggatttgaatgtactatcacaatagcagaaataccagctgaacacaaatggtggtttccatcttgcacaaaatgcaataaagcaacaatccctcacactacaggttatcactgtgaatcatgcaattgggatggatacaaatttaaatacaagctcaaattcctggcatctgatgaaacagatattgcagaaatgttttgttttgacactgtagcaaggcacatcgttgttgcccaaacgtgttccgcattaattctattgttgctgcacatgggagacaacgttctttaccaatgcaaataggaatttctgatcaacaaggaccatcaacacctcaaaacaaatcaaaaccgatgttattggaagactctccatctacaactttggaaaaattatctactacaactcctacaactgtagtaaggaagcttctatattccgaaactgacaacacgccgaaaacgcactcaatttcttttactcaattatcttttattcattttaagatttatgcaaacaagagtaatatcaatagcccagaaaaagatgatggcgataaggaaaccgcacagaacttcgatatatgcagcttgatacaatacccactaacaaaggaaaaggaccagcagatacaattgaatcgccacctaaaaggttcaaacaagggacgatacgcatcggaaaagaaatggacatcaaatcctccgagaactaaagtttcactcagatcttcgtcgaccttttga

SEQ ID NO: 1949 - DNA, 1638 bp, Zea Mays
atggcgggaactccccagtttcagtccccgcacttcccgcctccctctccccctctcggtcccaccttcgtccctccggcgatgaactcaggcggacgcggcggcaagcggcggggtcccccgcccctcgctccctccggtgcggcggcgaagagggtcaatcccagccccggcacgccgcatgtgcctcctcccgcgtcggcggcggccgccgtggaggaggacatgatggacgaggacgtgttcctggatgagtccatcctggcggaggacgaggcggcgctgctgatgctccagcgcgacgaggcactcgcgtcccgcctcgcgcggtggaagcgccccgcaatacccaccgacctcgccgccggatgctcccgcactgtcgcttttcagcagttggaaatagattatgttattggtgagagccacaaagaattactccccagctcatctggttcagcagccatactcaggatttttggtgtcaccagagaaggccacagcttatgctgtcaggtgcatggatttgagccatatttctatattggctgtccttcagggatgggtcctgatgatatatcacgctttcatcaaacactagaggggaggatgaaggagtcaaatagaagcagcaatgttccaaggttcgtgaagagagttgagcttgtgcagaagcagacaattatgcattaccaaacacaacaatctcaacctttcctcaagatagtagtcgctctgcctaccatggttgctagctgtcgtggtatcctggaaaggggcataacaattgaaggccttggttcaaagagttttctgacatatgaaagcaacattctttttgcccttcgtttcatgattgattgcaatattgttggtggcaactggattgagcttcctgctgggaaatacaggaaagcagcctgtatcatgtcctattgtcagctagagctagattgcttatactcagatctggtaagccatgcggctgaaggagaatattctaagatggccccgtttcgcatattaagttttgatattgaatgtgctggtcgcaaaggtcatttcccagaaccaactcatgatcctgttattcaggttgagttcattattcatgtatctgatactcgttaccatttagtttcaatacagatagctaatttggttacacatcaaggagaagaccaaccttttgtacggaatgtcatgactcttaaatcctgctctcccattgtgggagtcgaggttatgtcatttgatgcagagagagatattctacttgcatggagggatttcatacgtgaagtggatcctgatatcataattggatacaacatttgcaaatttgacatgccctatcttattgagagggctgaggttctcaagatagcggagtttccaatacttggccgaatcagaaatagtcgtgttcgtgtccgtgatacgaccttttcctcgaggcaatatggtgtgcgtgaaagtaaggatgttactattgaaggaagagtgcaatttgatctcctgcaggctatgcaacgggattacaagttgagttcttattcattaaactctgtatcagcacactttcttggggagcaaggggcagccaaggagagccctttggctccaacaatttcctag

SEQ ID NO: 1950 - DNA, 2987 bp, Zea Mays
ccataccccatgctcttctgcttttcgaaaattacaatcacccaccttccaataaaagcgcacacgccttcgtgcacctccccggtctctccccctttcctctcccttcccccttcccccgcctccgccatcgccgacgccgacccccacaccggccgacgcgcgagccccggcaccatcttcacacgagcataaatgggtgatgcgtgtttctcaacacagctaattgatggagatgggatcttcaacgtctccggattggagaacttcatgaaggatgtcagattgggtgaatgcgggctgtcctatgctgttgtatcaataatgggcccgcaaagtagtggtcacagactaccaaaggatgatacagcatttgagaagcaaagtgcattgtttgctttggccgtttcggacattgtgttgattaatatgtggtgtcatgacattggcagagaacaggctgcaaacaagcctcttttgaagactgttttccaggtcatgatgaggttgttcagtcctcgcaaaacaacattgttgtttgttatacgtgacaaatcaaggacacccctagaaaatcttgagccaattctaagggaagacattcagaagatatgggatgctgttccgaaaccccatgcccataaagaaactccaattagtgaatttttcgatgttcaagttgtcgcactgtcgagttatgaagaaaaagaagagttattcaaacagcaggtttctgatttaagagataggtttcagcattcaattgcccctggtggacttgctggggatcgtcgtggtgttgtcccagcttcaggtttctcatttagttcccagcaattttggaaagtcatcaaggagaacaaagatcttgatttgcctgctcataaagttatggtggctactgtacgttgtgaggaaattggtaatgagaaagttaccagctttatagctgatgaggaatggcaacaatttgaggaggctgtccaacatgactttgttactgggtttgggaagaagctcagcagccttctggatagatgtttatcagagtatgacatggaggctatttattttgatgaaggtgtcagaagctcgaaaagacaacaacttgagtctaaactgttacagcttgtcaatcctgcctatcaatctcttctaggtcacttacacactagaactttagaagcatttaaggagtactttggcaaggccctagaaaaggagggatttgctgttgcagcttgcaattgtactgaaactttcttggagaagtttgatagaggatctgaagatgctgctattcaacaagtgaattgggacacctcaaaagtgagggataagcttagacgtgacattgaggctcatgtagcttcagttcgggctgctaaattgtctgaactttgtgcgaaatatgaggcacaacttaccaaagctctggtggaaccagttgaatctcttctagattcagccagtgaagacacgtggccagctattagaaagcttcttcaacgcgagacaaaaactgctgttttaggtcttgaatctgctgtgtcagcttttgaactcgatgaagcaactgagaaagaactgcttgcgaagctggagaagcatggaaggagtgttgttgagtcaaaggcaaaagaagaagctggaagggttttgattcgcatgaaggacaggttctcaacattgttcagccgagatgctgactctatgcccaggtctgtgaagttgctttctacaatggctgcaattcggttggaggaggatggtgataacattgagaacactctttcccttgctcttgttgacacttcaagacatgggactacagataggagtatccaattgtccgatccactagcctccagctcatgggaaagggttgctgaggagaagactttaattacccctgtgcagtgcaaaaatttgtggaggcaattcaaagctgaaactgaatatacagtcactcaagccatagctgctcaggaagcaaataagaggaacaacaactggctcccacctccatgggcacttgctgcaatggctatccttggattcaacgagtttatgacattactgaggaatccgctttacctgtttgccatatttgtgatttatcttgttggaaaagccctttgggtgcaatcagaaattggcagggaattccaacatggatttcttcctgccatcctttcactgtcgacgaaatttgttcccactgtaatgaacatcctgaagagattagctgacgcgggtcaagaacctgcagcagcccccgagaggcaaagagagatggagctccaaccaaaatccaccaggaacggttccttatacagcaatgtgacatcggcagggtcatctagcgtaaccacttcggagattggacctgaatattcaagcccggttgtgcaatgattttgctgatctttagctttttggctggaaacatactctagcagttgagaaaaacagggtgcctcaagaacgtacgaagattttggtgccttgcagtttttgtaagcttgcccttcccagactgattcaaggtggcactgcccctcgttgttattcaaggaattttggggctggcggggttgtttgtaagagcattgtaaaataacttgtttcattttttggtttctgtaacatgaatacatgacatgtgatagttgtatataagatctgtggactgggggcgtatcagcgcattctacacagctaagggttgcatagttgcgagaactgaagcatgtaaatgtctttaaactgccatctgattgagatgcagtagtactgctgttctggaataagacatgtctgcttttggggaaaatgattcaaaaaatgtttcgtttgaactcagcgtctgctgaaaatgaatttggttcccgacccctgttctggttggccgaaattcacaagtttggtgttctttttgtgtactgtccgtacaataatacagtccaggcaaaggacaccagacg

SEQ ID NO: 1951 - DNA, 3085 bp, Zea Mays
ccataccccatgctcttctgcttttcgaaaattacaatcacccaccttccaataaaagcgcacacgccttcgtgcacctccccggtctctccccctttcctctcccttcccccttcccccgcctccgccatcgccgacgccgacccccacaccggccgacgcgcgagccccggcaccatcttcacacgagcataaatgggtgatgcgtgtttctcaacacagctaattgatggagatgggatcttcaacgtctccggattggagaacttcatgaaggatgtcagattgggtgaatgcgggctgtcctatgctgttgtatcaataatgggcccgcaaagtagtggtcacagactaccaaaggtatatggctagcgaaggcccagaatattgaaccgtgcacccttgtaatggatttggaaggaactgatggaagagagaggggagaggatgatacagcatttgagaagcaaagtgcattgtttgctttggccgtttcggacattgtgttgattaatatgtggtgtcatgacattggcagagaacaggctgcaaacaagcctcttttgaagactgttttccaggcaacatttgaggtcatgatgaggttgttcagtcctcgcaaaacaacattgttgtttgttatacgtgacaaatcaaggacacccctagaaaatcttgagccaattctaagggaagacattcagaagatatgggatgctgttccgaaaccccatgcccataaagaaactccaattagtgaatttttcgatgttcaagttgtcgcactgtcgagttatgaagaaaaagaagagttattcaaacagcaggtttctgatttaagagataggtttcagcattcaattgcccctggtggacttgctggggatcgtcgtggtgttgtcccagcttcaggtttctcatttagttcccagcaattttggaaagtcatcaaggagaacaaagatcttgatttgcctgctcataaagttatggtggctactgtacgttgtgaggaaattggtaatgagaaagttaccagctttatagctgatgaggaatggcaacaatttgaggaggctgtccaacatgactttgttactgggtttgggaagaagctcagcagccttctggatagatgtttatcagagtatgacatggaggctatttattttgatgaaggtgtcagaagctcgaaaagacaacaacttgagtctaaactgttacagcttgtcaatcctgcctatcaatctcttctaggtcacttacacactagaactttagaagcatttaaggagtactttggcaaggccctagaaaaggagggatttgctgttgcagcttgcaattgtactgaaactttcttggagaagtttgatagaggatctgaagatgctgctattcaacaagtgaattgggacacctcaaaagtgagggataagcttagacgtgacattgaggctcatgtagcttcagttcgggctgctaaattgtctgaactttgtgcgaaatatgaggcacaacttaccaaagctctggtggaaccagttgaatctcttctagattcagccagtgaagacacgtggccagctattagaaagcttcttcaacgcgagacaaaaactgctgttttaggtcttgaatctgctgtgtcagcttttgaactcgatgaagcaactgagaaagaactgcttgcgaagctggagaagcatggaaggagtgttgttgagtcaaaggcaaaagaagaagctggaagggttttgattcgcatgaaggacaggttctcaacattgttcagccgagatgctgactctatgcccaggtctgtgaagttgctttctacaatggctgcaattcggttggaggaggatggtgataacattgagaacactctttcccttgctcttgttgacacttcaagacatgggactacagataggagtatccaattgtccgatccactagcctccagctcatgggaaagggttgctgaggagaagactttaattacccctgtgcagtgcaaaaatttgtggaggcaattcaaagctgaaactgaatatacagtcactcaagccatagctgctcaggaagcaaataagaggaacaacaactggctcccacctccatgggcacttgctgcaatggctatccttggattcaacgagtttatgacattactgaggaatccgctttacctgtttgccatatttgtgatttatcttgttggaaaagccctttgggtgcaatcagaaattggcagggaattccaacatggatttcttcctgccatcctttcactgtcgacgaaatttgttcccactgtaatgaacatcctgaagagattagctgacgcgggtcaagaacctgcagcagcccccgagaggcaaagagagatggagctccaaccaaaatccaccaggaacggttccttatacagcaatgtgacatcggcagggtcatctagcgtaaccacttcggagattggacctgaatattcaagcccggttgtgcaatgattttgctgatctttagctttttggctggaaacatactctagcagttgagaaaaacagggtgcctcaagaacgtacgaagattttggtgccttgcagtttttgtaagcttgcccttcccagactgattcaaggtggcactgcccctcgttgttattcaaggaattttggggctggcggggttgtttgtaagagcattgtaaaataacttgtttcattttttggtttctgtaacatgaatacatgacatgtgatagttgtatataagatctgtggactgggggcgtatcagcgcattctacacagctaagggttgcatagttgcgagaactgaagcatgtaaatgtctttaaactgccatctgattgagatgcagtagtactgctgttctggaataagacatgtctgcttttggggaaaatgattcaaaaaatgtttcgtttgaactcagcgtctgctgaaaatgaatttggttcccgacccctgttctggttggccgaaattcacaagtttggtgttctttttgtgtactgtccgtacaataatacagtccaggcaaaggacaccagacg

SEQ ID NO: 1952 - DNA, 1044 bp, Zea Mays
tttgccaaactccattcagccattcgccgactgaaggtactatctcaaggacgcggtgctggacggcggcatcccgttcaacaaggcgtacgggatgacggcgttcgagtaccacggcacggactcgcgcttcaaccgcgtgttcaacgagggcatgaagaaccactcggtgatcatcaccaagaagctgctggacttctacacgggcttcgagggcgtgtcgacgctggtggacgtgggcggcggcgtgggcgccacgctgcacgccatcacgtcccgccacccgcacatctccggggtcaacttcgacctgccgcacgtcatctccgaggcgccgccgttccccggcgtgcgccacgtgggcggggacatgttcgcgtccgtgcccgccggcgacgccatcctcatgaagtggatcctccacgactggagcgacgcgcagggcgtcttccacgtcgacatgatcatgctcgcgcacaaccccggcggcaaggagcggtacgagcgcgagttccgcgagctcgcaaagggcgccggcttctccgggttcaaggccacctacatctacgccaacgcctgggccatcgagttcatcaagtgaaccaccgtcgccgcgatgagatggcatggctgccacatgctttgcttgcttggtcctcgtatcgtacgtcgccgtcgtcgtcttcttctggttattgcgctgctacctcgctgctctcgcgtatgcatgtacttttgcttaattttctttcttcatatcatgcactctggctggcctagactgcccccgatccatggtggccggtacgtcttgtcgagctcttgcatgtcgtggattctaaattcttcttctgcgtcgaattgtctctgccatgtgcgagtaataacaatcaaggttatacttacgatacaattacatggcggtttaattgctctctattaatttggtgaatcgaatcgattctactgaattcttctctgtcgtttaatgaaatttcctttgtcttttggattatataatataacacagacactcgatcacaa

SEQ ID NO: 1953 - DNA, 926 bp, Zea Mays
caaacccccaaaatttcaaagccccgcactcgagagcgggtgtctccaaccattccccattcgatccagcttgacgccgctccccgacgacgtggacgcccgtggagccctagaaccaagccatgcgacgggacgacgccggcggaggaaccgggttccacgacttgtttgactcggtgcgccgctccatctccttccggcccaccgcccccgccccggaagcccccgcgggcccattcggcgcgggggcaggggggatcggcgtgcggatcagctcttgcctccggaagtcgcgggggatggggctgctaggtctcatcactaaaagcccctcgccgccgcgccgcatgctaccgccgatgcccgatcagtcggacggcggcagcggagggggtggggccaacggcggagtcggagaggagaacccactgatccggtggcgtaagggggagctcatcggggccggtgcgttcgggcaggttttgatcggcacgagcaacgcgacacgggagaaggctcaagctcatattaaagagctcgaagaagaagtgaagctactcaagaacctgtctcaccccaacattgttaggtaccttgggactgttcgtgaggaagacacactaaacattttgctggaatttgtccctggagggtctattcagtcacttttggggaagcttggttcattcccagagcctgtcattaagaaatacactaagcaaattttgcaaggattggagtatctgcatagcaatgcaataatacatagagatataaagggtgcaaacattcttgtagataataaagggtgcatcaaacttgctgattttggggcatctaagcaagtggcaaagttggctaggttcagggatgtaaaatttatacaaagtaggatgaaggggctgaatttccaagcgaaggcttaa

SEQ ID NO: 1954 - DNA, 1757 bp, Zea Mays
caggcacggccgaggaaaaccgaaacccgtcccaaatccgttgctctttcccccttgcccccttcccagtctccactctgagcactctcctccgctctgctcctttgctccccacggcaaaccgtaaaccctagcctgaggggcacccctgtcgcagccatgggcgccagccggaagctgcagggcgagatcgaccgcgtcctgaagaaggtctacgacactgagaatgccaaccagaaggagaagttcgaggcggacctcaagaaggagatcaagaagctgcagcggtacagggaccagatcaagacgtggattcagtccagcgagatcaaggacaagaaggctctgatggatgctcgaaagcagattgaacgagagatggaacgatttaaagtatgtgagaaggaaacaaaaactaaggccttctcaaaagaagggttaggtcagcaaccaaaaacagatcccaaagaaaaggccaaagctgaaacaagagactggcttaataatgtggttagcgatttggaaagccagattgataacttcgaagcagagattgaagggctttcaattaaaaagggaaagcaaagaccgcctcgattggtacatttagagacgtctattacgagacataaagctcatataaagaaattggagtcaatcttgcggcttttggataatgatgagttgagtcctgagcaagtcaatgatgttaaagattttcttgatgactatgttgaacgtaatcaggaagactttgatgaattcagtgatgttgaggacctctatagcacattgcccatggagaaggttgaagcacttgaagacatggtttcacttgctccttctagtcttgtgaagggtgttgctcctgtttcgactactgcagttttgagcacaaagagttctgttgcaacttcacctactcagcctacagtatcaacagcttcttcacaaagtacatcacaggatcaaacagaggagacagcttcccaagaaagcaatcctgaacctacgccacaaacaccacctccaaaaggtggaaaccctggaccttcagtaccagctgtgcccattgttgtcagtactggtagtgcggctgtttctgtacctgcagaaacaattagttcccctgtgcgactaactgtacccgccacagcagccacagtgctttcttctgctattccacgaagtgctcctgagaatacacttgctgttacctcaattcctgcaaacttatctaccactttgaaggatgatgaaagcatgagtgttcctccacgacgaccatctcctgctactgaaattggaattggcaggggcataactcgaggaacaactagtcaggcattaggtacagctcccataactattggtccagtttcaggaaatggatcgttggttatgcctcttggtagtaaagttcaaccccagcaggttcccaggactaatgatgcaatcggctctgattctgctaacacaaatgaaaaccctattcttggtggaagagtattttctcctccagttgtttctggggttcaatggagacctcaagctgctgctgcatttcaaaatcaaattgaaactaatcagtaccgtggaaggcctgagatttctgctgatcacagggagaagtacatacagagactgcagcaagtacagcagcaaggtggcagccttctgaatgtttcccatataactggcataaatcagaagcaatttccaacaccacagccaaatccccttctacaacagtttaa

SEQ ID NO: 1955 - DNA, 1771 bp, Zea Mays
ccaaatccgttgctctttcccccttgcccccttcccagtctccactctgagcactctcctccgctctgctcctttgctccccacggcaaaccgtaaaccctagcctgaggggcacccctgtcgcagccatgggcgccagccggaagctgcagggcgagatcgaccgcgtcctgaagaaggtccaggagggcgtcgatgtctttgacagcatctggaataaggtctacgacactgagaatgccaaccagaaggagaagttcgaggcggacctcaagaaggagatcaagaagctgcagcggtacagggaccagatcaagacgtggattcagtccagcgagatcaaggacaagaaggctctgatggatgctcgaaagcagattgaacgagagatggaacgatttaaagtatgtgagaaggaaacaaaaactaaggccttctcaaaagaagggttaggtcagcaaccaaaaacagatcccaaagaaaaggccaaagctgaaacaagagactggcttaataatgtggttagcgatttggaaagccagattgataacttcgaagcagagattgaagggctttcaattaaaaagggaaagcaaagaccgcctcgattggtacatttagagacgtctattacgagacataaagctcatataaagaaattggagtcaatcttgcggcttttggataatgatgagttgagtcctgagcaagtcaatgatgttaaagattttcttgatgactatgttgaacgtaatcaggaagactttgatgaattcagtgatgttgaggacctctatagcacattgcccatggagaaggttgaagcacttgaagacatggtttcacttgctccttctagtcttgtgaagggtgttgctcctgtttcgactactgcagttttgagcacaaagagttctgttgcaacttcacctactcagcctacagtatcaacagcttcttcacaaagtacatcacaggatcaaacagaggagacagcttcccaagaaagcaatcctgaacctacgccacaaacaccacctccaaaaggtggaaaccctggaccttcagtaccagctgtgcccattgttgtcagtactggtagtgcggctgtttctgtacctgcagaaacaattagttcccctgtgcgactaactgtacccgccacagcagccacagtgctttcttctgctattccacgaagtgctcctgagaatacacttgctgttacctcaattcctgcaaacttatctaccactttgaaggatgatgaaagcatgagtgttcctccacgacgaccatctcctgctactgaaattggaattggcaggggcataactcgaggaacaactagtcaggcattaggtacagctcccataactattggtccagtttcaggaaatggatcgcagttggttatgcctcttggtagtaaagttcaaccccagcaggttcccaggactaatgatgcaatcggctctgattctgctaacacaaatgaaaaccctattcttggtggaagagtattttctcctccagttgtttctggggttcaatggagacctcaagctgctgctgcatttcaaaatcaaattgaaactaatcagtaccgtggaaggcctgagatttctgctgatcacagggagaagtacatacagagactgcagcaagtacagcagcaaggtggcagccttctgaatgtttcccatataactggcataaatcagaagcaatttccaacaccacagccaaatccccttctacaacagtttaa

SEQ ID NO: 1956 - DNA, 1789 bp, Zea Mays
ccaaatccgttgctctttcccccttgcccccttcccagtctccactctgagcactctcctccgctctgctcctttgctccccacggcaaaccgtaaaccctagcctgaggggcacccctgtcgcagccatgggcgccagccggaagctgcagggcgagatcgaccgcgtcctgaagaaggtccaggagggcgtcgatgtctttgacagcatctggaataaggtctacgacactgagaatgccaaccagaaggagaagttcgaggcggacctcaagaaggagatcaagaagctgcagcggtacagggaccagatcaagacgtggattcagtccagcgagatcaaggacaagaaggttagtgcctcttatgagcaggctctgatggatgctcgaaagcagattgaacgagagatggaacgatttaaagtatgtgagaaggaaacaaaaactaaggccttctcaaaagaagggttaggtcagcaaccaaaaacagatcccaaagaaaaggccaaagctgaaacaagagactggcttaataatgtggttagcgatttggaaagccagattgataacttcgaagcagagattgaagggctttcaattaaaaagggaaagcaaagaccgcctcgattggtacatttagagacgtctattacgagacataaagctcatataaagaaattggagtcaatcttgcggcttttggataatgatgagttgagtcctgagcaagtcaatgatgttaaagattttcttgatgactatgttgaacgtaatcaggaagactttgatgaattcagtgatgttgaggacctctatagcacattgcccatggagaaggttgaagcacttgaagacatggtttcacttgctccttctagtcttgtgaagggtgttgctcctgtttcgactactgcagttttgagcacaaagagttctgttgcaacttcacctactcagcctacagtatcaacagcttcttcacaaagtacatcacaggatcaaacagaggagacagcttcccaagaaagcaatcctgaacctacgccacaaacaccacctccaaaaggtggaaaccctggaccttcagtaccagctgtgcccattgttgtcagtactggtagtgcggctgtttctgtacctgcagaaacaattagttcccctgtgcgactaactgtacccgccacagcagccacagtgctttcttctgctattccacgaagtgctcctgagaatacacttgctgttacctcaattcctgcaaacttatctaccactttgaaggatgatgaaagcatgagtgttcctccacgacgaccatctcctgctactgaaattggaattggcaggggcataactcgaggaacaactagtcaggcattaggtacagctcccataactattggtccagtttcaggaaatggatcgttggttatgcctcttggtagtaaagttcaaccccagcaggttcccaggactaatgatgcaatcggctctgattctgctaacacaaatgaaaaccctattcttggtggaagagtattttctcctccagttgtttctggggttcaatggagacctcaagctgctgctgcatttcaaaatcaaattgaaactaatcagtaccgtggaaggcctgagatttctgctgatcacagggagaagtacatacagagactgcagcaagtacagcagcaaggtggcagccttctgaatgtttcccatataactggcataaatcagaagcaatttccaacaccacagccaaatccccttctacaacagtttaa

SEQ ID NO: 1957 - DNA, 1859 bp, Zea Mays
ccaaatccgttgctctttcccccttgcccccttcccagtctccactctgagcactctcctccgctctgctcctttgctccccacggcaaaccgtaaaccctagcctgaggggcacccctgtcgcagccatgggcgccagccggaagctgcagggcgagatcgaccgcgtcctgaagaaggtccaggagggcgtcgatgtctttgacagcatctggaataaggtctacgacactgagaatgccaaccagaaggagaagttcgaggcggacctcaagaaggagatcaagaagctgcagcggtacagggaccagatcaagacgtggattcagtccagcgagatcaaggacaagaaggctctgatggatgctcgaaagcagattgaacgagagatggaacgatttaaagtatgtgagaaggaaacaaaaactaaggccttctcaaaagaagggttaggtcagcaaccaaaaacagatcccaaagaaaaggccaaagctgaaacaagagactggcttaataatgtggttagcgatttggaaagccagattgataacttcgaagcagagattgaagggctttcaattaaaaagggaaagcaaagaccgcctcgattggtacatttagagacgtctattacgagacataaagctcatataaagaaattggagtcaatcttgcggcttttggataatgatgagttgagtcctgagcaagtcaatgatgttaaagattttcttgatgactatgttgaacgtaatcaggaagactttgatgaattcagtgatgttgaggacctctatagcacattgcccatggagaaggttgaagcacttgaagacatggtttcacttgctccttctagtcttgtgaagggtgttgctcctgtttcgactactgcagttttgagcacaaagagttctgttgcaacttcacctactcagcctacagtatcaacagcttcttcacaaagtacatcacaggatcaaacagaggagacagcttcccaagaaagcaatcctgaacctacgccacaaacaccacctccaaaaggtggaaaccctggaccttcagtaccagctgtgcccattgttgtcagtactggtagtgcggctgtttctgtacctgcagaaacaattagttcccctgtgcgactaactgtacccgccacagcagccacagtgctttcttctgctattccacgaagtgctcctgagaatacacttgctgttacctcaattcctgcaaacttatctaccactttgaaggatgatgaaagcatgagtgttcctccacgacgaccatctcctgctactgaaattggaattggcaggggcataactcgaggaacaactagtcaggcattaggtacagctcccataactattggtccagtttcaggaaatggatcggttagtgcacttcctgcaataaatgacttgtccaaaataaatatattgaacactgacgagaagattaacagtgatggtctttctcagcagttggttatgcctcttggtagtaaagttcaaccccagcaggttcccaggactaatgatgcaatcggctctgattctgctaacacaaatgaaaaccctattcttggtggaagagtattttctcctccagttgtttctggggttcaatggagacctcaagctgctgctgcatttcaaaatcaaattgaaactaatcagtaccgtggaaggcctgagatttctgctgatcacagggagaagtacatacagagactgcagcaagtacagcagcaaggtggcagccttctgaatgtttcccatataactggcataaatcagaagcaatttccaacaccacagccaaatccccttctacaacagctttaa

SEQ ID NO: 1958 - DNA, 2940 bp, Zea Mays
cgtcccaaatccgttgctctttcccccttgcccccttcccagtctccactctgagcactctcctccgctctgctcctttgctccccacggcaaaccgtaaaccctagcctgaggggcacccctgtcgcagccatgggcgccagccggaagctgcagggcgagatcgaccgcgtcctgaagaaggtccaggagggcgtcgatgtctttgacagcatctggaataaggtctacgacactgagaatgccaaccagaaggagaagttcgaggcggacctcaagaaggagatcaagaagctgcagcggtacagggaccagatcaagacgtggattcagtccagcgagatcaaggacaagaaggctctgatggatgctcgaaagcagattgaacgagagatggaacgatttaaagtatgtgagaaggaaacaaaaactaaggccttctcaaaagaagggttaggtcagcaaccaaaaacagatcccaaagaaaaggccaaagctgaaacaagagactggcttaataatgtggttagcgatttggaaagccagattgataacttcgaagcagagattgaagggctttcaattaaaaagggaaagcaaagaccgcctcgattggtacatttagagacgtctattacgagacataaagctcatataaagaaattggagtcaatcttgcggcttttggataatgatgagttgagtcctgagcaagtcaatgatgttaaagattttcttgatgactatgttgaacgtaatcaggaagactttgatgaattcagtgatgttgaggacctctatagcacattgcccatggagaaggttgaagcacttgaagacatggtttcacttgctccttctagtcttgtgaagcctacagtatcaacagcttcttcacaaagtacatcacaggatcaaacagaggagacagcttcccaagaaagcaatcctgaacctacgccacaaacaccacctccaaaaggtggaaaccctggaccttcagtaccagctgtgcccattgttgtcagtactggtagtgcggctgtttctgtacctgcagaaacaattagttcccctgtgcgactaactgtacccgccacagcagccacagtgctttcttctgctattccacgaagtgctcctgagaatacacttgctgttacctcaattcctgcaaacttatctaccactttgaaggatgatgaaagcatgagtgttcctccacgacgaccatctcctgctactgaaattggaattggcaggggcataactcgaggaacaactagtcaggcattagttggttatgcctcttggtagtaaagttcaaccccagcaggttcccaggactaatgatgcaatcggctctgattctgctaacacaaatgaaaaccctattcttggtggaagagtattttctcctccagttgtttctggggttcaatggagacctcaagctgctgctgcatttcaaaatcaaattgaaactaatcagtaccgtggaaggcctgagatttctgctgatcacagggagaagtacatacagagactgcagcaagtacagcagcaaggtggcagccttctgaatgtttcccatataactggcataaatcagaagcaatttccaacaccacagccaaatccccttctacaacagagttcctctatatcttcccaagtgaatcttgggcttggagttcaaggatcagacgcggggcatataaaaagtgaagatcaacaaattttggctgaagatgttggtgtggaatcttccgcaacaacaggagcaaataaacaaacaagtgaagatgacacaaagattccatattcgaatccttcagcacctgcagcagaaaacactcagctgcctagggatactgatctatcacctggacagcctttgcaacctggaatgccatcatctggtgttggtgttatcggccgaagaagtgtatctgatcttggtacaatcggagataaccttactggaacttctggtagttctggtcatgatcagaattattatctgcaaatgcttgaagctgcattccacaagcttccacagcccaaggactctgagcgtgctaaaacttacattccgcggcaccctgcagttacccctgctagctacccccaagttcaggcatcaattgtatcgaatcccaccttttgggaaagaattggtagcgacacattagctaccgacatgctgttctttgcgttctactaccaacagaacacatatcaacaatacttggctgctagagaactgaagaagcaatcatggagatttcaccggaggtacaatacctggttccagcggcatgtggagccacaggtcacgactgatgagtatgagcggggatcatatgtatactttgatttccatgtcactgaggatggctcaggatggtgccaaagaatcaagaatgacttcacatttgagtacaactacctggaggatgagctatcagtacaaacaaactaaagtgccatggcagtaggtctggtcaaacctttatgtccaatttgaattttgtagttctcataagagcttgttcggttgcttctggatcaaagaaggttggaggggattaaattccttctagtcaaaattgaatagaaattgatttaacccccctcaatctcctttatccagacgcaaccgaacaatgcctaaggtgactgactgactgttataatctggacccttgacaaaatctccagctgtaaactaatgtgtgaagttggatgcaccgaacatgctgaaattataatcgtgttatgccagccgaatctgtttgacgcagctgtacattgtcgttattatctggatgcgcctgaaaaatattttggatctttcttggcgcctacctgtttatttttagctaactcctggctggcgctttcgatctttctggttcgtttttttatcaaaaaaaa

SEQ ID NO: 1959 - DNA, 3082 bp, Zea Mays
ccaaatccgttgctctttcccccttgcccccttcccagtctccactctgagcactctcctccgctctgctcctttgctccccacggcaaaccgtaaaccctagcctgaggggcacccctgtcgcagccatgggcgccagccggaagctgcagggcgagatcgaccgcgtcctgaagaaggtccaggagggcgtcgatgtctttgacagcatctggaataaggtctacgacactgagaatgccaaccagaaggagaagttcgaggcggacctcaagaaggagatcaagaagctgcagcggtacagggaccagatcaagacgtggattcagtccagcgagatcaaggacaagaaggctctgatggatgctcgaaagcagattgaacgagagatggaacgatttaaagtatgtgagaaggaaacaaaaactaaggccttctcaaaagaagggttaggtcagcaaccaaaaacagatcccaaagaaaaggccaaagctgaaacaagagactggcttaataatgtggttagcgatttggaaagccagattgataacttcgaagcagagattgaagggctttcaattaaaaagggaaagcaaagaccgcctcgattggtacatttagagacgtctattacgagacataaagctcatataaagaaattggagtcaatcttgcggcttttggataatgatgagttgagtcctgagcaagtcaatgatgttaaagattttcttgatgactatgttgaacgtaatcaggaagactttgatgaattcagtgatgttgaggacctctatagcacattgcccatggagaaggttgaagcacttgaagacatggtttcacttgctccttctagtcttgtgaagcctacagtatcaacagcttcttcacaaagtacatcacaggatcaaacagaggagacagcttcccaagaaagcaatcctgaacctacgccacaaacaccacctccaaaaggtggaaaccctggaccttcagtaccagctgtgcccattgttgtcagtactggtagtgcggctgtttctgtacctgcagaaacaattagttcccctgtgcgactaactgtacccgccacagcagccacagtgctttcttctgctattccacgaagtgctcctgagaatacacttgctgttacctcaattcctgcaaacttatctaccactttgaaggatgatgaaagcatgagtgttcctccacgacgaccatctcctgctactgaaattggaattggcaggggcataactcgaggaacaactagtcaggcattaggtacagctcccataactattggtccagtttcaggaaatggatcggttagtgcacttcctgcaataaatgacttgtccaaaataaatatattgaacactgacgagaagattaacagtgatggtctttctcagcagttggttatgcctcttggtagtaaagttcaaccccagcaggttcccaggactaatgatgcaatcggctctgattctgctaacacaaatgaaaaccctattcttggtggaagagtattttctcctccagttgtttctggggttcaatggagacctcaagctgctgctgcatttcaaaatcaaattgaaactaatcagtaccgtggaaggcctgagatttctgctgatcacagggagaagtacatacagagactgcagcaagtacagcagcaaggtggcagccttctgaatgtttcccatataactggcataaatcagaagcaatttccaacaccacagccaaatccccttctacaacagtttaattcacagagttcctctatatcttcccaagtgaatcttgggcttggagttcaaggatcagacgcggggcatataaaaagtgaagatcaacaaattttggctgaagatgttggtgtggaatcttccgcaacaacaggagcaaataaacaaacaagtgaagatgacacaaagattccatattcgaatccttcagcacctgcagcagaaaacactcagctgcctagggatactgatctatcacctggacagcctttgcaacctggaatgccatcatctggtgttggtgttatcggccgaagaagtgtatctgatcttggtacaatcggagataaccttactggaacttctggtagttctggtcatgatcagaattattatctgcaaatgcttgaagctgcattccacaagcttccacagcccaaggactctgagcgtgctaaaacttacattccgcggcaccctgcagttacccctgctagctacccccaagttcaggcatcaattgtatcgaatcccaccttttgggaaagaattggtagcgacacattagctaccgacatgctgttctttgcgttctactaccaacagaacacatatcaacaatacttggctgctagagaactgaagaagcaatcatggagatttcaccggaggtacaatacctggttccagcggcatgtggagccacaggtcacgactgatgagtatgagcggggatcatatgtatactttgatttccatgtcactgaggatggctcaggatggtgccaaagaatcaagaatgacttcacatttgagtacaactacctggaggatgagctatcagtacaaacaaactaaagtgccatggcagtaggtctggtcaaacctttatgtccaatttgaattttgtagttctcataagagcttgttcggttgcttctggatcaaagaaggttggaggggattaaattccttctagtcaaaattgaatagaaattgatttaacccccctcaatctcctttatccagacgcaaccgaacaatgcctaaggtgactgactgactgttataatctggacccttgacaaaatctccagctgtaaactaatgtgtgaagttggatgcaccgaacatgctgaaattataatcgtgttatgccagccgaatctgtttgacgcagctgtacattgtcgttattatctggatgcgcctgaaaaatattttggatctttcttggcgcctacctgtttatttttagctaactcctggctggcgctttcgatctttctggttcgtttttttatcaaaaaaaa

SEQ ID NO: 1960 - DNA, 2976 bp, Zea Mays
agatcatcgtcaaaccctttccttagacgatcttacgatgtcttatgtttccgtttacgaaacagtaatccacgtgtcggtccatgggccttcgcgttgatttcgcccagcagattacgtgtatcgggcccacgaatccagcaaccaagcacgcagtttttccagctctcctcacccgtaacgctcgcggcggccgaaccctagctttatcgccgccatctgcttcttctccactgcggttgccgaaccctagagattctccccccgtcgcccgaacgtcgtcgcattcaccttctccaccgcatagagggagacgatgtcgccttgttcttcttcaccggtgagggacccagaatcgcagagaaggtggcgctgcccccttgttcttctccaccgcagagaacgagccgcatttgatccaccgcggcgccgaaccctaggcaatccacccgccgtcgcgagcaccgtctccaacgctgagtccgacccgccgtcaacttcagcgtcccctacgcattgaccaagccgcacgtcgccttgggcttctccactgcagagggtcccgaaatcggccggccttcaggcacctccacacacgggaacatcatacatgaagaacgtagaccgacctccatctaatccaaagcggattataattcagtctactcaagagtgctttagtgtcgacataccccgtgttccggcgaaaactgttagacacaaaccaatgcaggctggtgatgaggacgataactttatgccattatcgaagaagcggaaggagctcaaaattacaaaggagacggtgcaacttattttggggttaccaaatgctggtggagaaacggcattaggcattgatgaagctgttgctgcaaacaatttaagggctaaacttggtttatcaaaagaagattttagtgttgcagctcttcaagatcgtttaaggaaagggtttgacgatgatctaagcagcagatccttcttcctgatactgtgcaataggttgttgttccctactgccagctggggaataactaaccatgaggttcttttaactgaggaaatgtatcgtttccacgagatagactggtaccagctaatattcaatgatttatgccaaactgccaagaagtgacatactaggagcgttacaaatgtttctacaacaatttacggatgttccatcatcattcttgtaagcatgtcactttttgtcttttatatgtagccatatttttttatgcaaaattcatatacatttagattatattttgttatgtctcacaatgattcatgttatgcttttgcagctgtattatttggatcatcttcatgattcagctacacctcagaataaacgtggaacaccacgcatcaaatattttgataggaatattattcaagcattgacaagagctgacaagggcaagatacgccaaggacaagaaccatttgtacattgttcggtatttttttatgcgtttatcatattttttttatcaatttaatttgtcttatatatggtatatggatagaagcagtgtcgtttatatttacaaatgaaactccactttatatgatgtgcagtgtcatttaaattttatgttgtcaacaatctcgtgttatgcttgttttctctcaagtttatgatataattatcaccgctgtacagtcataaacttcactgtgtgaccagtttatgcagtaaacaacgtcgtgttatgcattgttgcccatacttttataatacaattatcactgttttatgcttgttttgtctcaagtttatgatacaattatcaccgttttatactggaaacatctctttgtacagtcatgcttcacaggctgaccagtttatacaataaacaacgccatgttatgcatagttgcacatatatgtatgctacattcgacaatgttctatgctttataagtttcacaatctgaacaattcaacgctatgttttgaacatgtgttatgtatccttggatttccagctaccctttcagcattctttccttccattgaacaattcaaccatttacaattcttacgctccctatatttcttcaacgaaaatccaacctcgtatgcatattgactataaaaattatacgcctcgtccacgttactaaatgtcataccgactttaggtatcaatcttatatcaatattgtccggctgcgcacaaaaatttaacgtttacgattcaatagcgattaaatctaacgtaatataggtacaacattaaaaaaagtatgtaagaaaataatagtatcataattgggagaacttacatggctttgaagaatatgaggtgtatcctgttcatgcgccccaatatgtctcatgggaatgtgcttatctgcgccgaccacgtctaccgattttgtgtgctcatcaatatgtcaaggtgccctcaatgtcgcggggggagtaacagatacaccctctgtgtaactggtgatcgcagacgctacaggatgcatgtccattgaaatagacgtacatgttgatctatgcacagacgctacaggttgcatgtcatcgccagcgccgatgctggacattttctcgccgttaatcgccacccggtgctctcccttccgccgccgttaaccgccgccaatatcaaagatacgaacgtggacgagcggctgtaaattagaatttgtttcctcccgtaactgtgcctttatttacgcgaacgtggagcacgtctttccttatctcaaagcggtggagatttaaatgttgcatggtttatactatcatgttacacagcgttatgcagtcgtaaacggtgtgcacatggtaatatttgttcccgtgattcgtggcacaaaagattccttctatacatgatttatgcacattactacatatttttatgcgtgcgtaaaacgcctgtcacgtatcatccgggattcatggctatcatatgcatgactgacgcagcttgcgtacag

SEQ ID NO: 1961 - DNA, 513 bp, Zea Mays
gttcaggacaggaggacctctgaagcaaaacttgacttctcatgttggccctactatactggttatgtctcttagtgcacattatgcaggggatgacctctcaccaaagttcacgaatggagagtactggaaaaaggtccatggaccgatattcatgtatcttaattccagttgggatgcaagtgacccaactatgctatgggaagatgcaaaagttcaggtgattatatttctgacacgtaagtgctcgaggatagtacaaccagagccagcgagtaactactgcggtgctgcctatctatatgcatgtcatgagtattactgaactgtggaagtcactttgttttctctatttatgttttgccttgtgtaatcagatgatgattgagaaaggaaactggtcatactgttttgcactttcagaggattttcagaagacagagcaaaggggttgtgtctctggtagattaatttgttggtcaaacacgaatttggacagtcaaaacatgccct

SEQ ID NO: 1962 - DNA, 2031 bp, Zea Mays
gcagagtacatgaagtacaaggatccaaagcaacctattaactctagaatcagggatcttatcggtaggatgacccttgctgaaaaaattggccaaatgacacagatagaacgccaggttgcatctgcaaatgtcatgaaacagtactttataggaagcatcttaagtggtggtggaagtgttccttctccccaggccagtcctgcaatttgggtgaacatggtcaatgaatttcagaaaggtgccttgtcaacgcgtctaggaattccattgatttatggaattgatgctgttcatggtaataacaatgtctacaacgccactttattccctcataacattggacttggagctacaagggatcctggcctcataaaaagaattggtgaagcaactgctcttgaagtgcgtgcgacaggcattcaatatacttttgctccatgtattgcagtttgcagagatccaagatggggtcggtgctatgagagctacagtgaggatcacaaggttgtgcagcagatgacagatattatccttggtttgcaggggataaggttgctgcttgtgctaaacactatgttggtgatggtggaactcataatggaatcaatgagaataatacaatcattgatgagcatgggctgctaagcattcacatgccaccatattatgactctatcataaagggtgttgctactgttatgggtttcgtgatatctgactggctaggagtggaccgtatcacctcacctcctggcgcaaactatacttattctgtgcaagctggaattaatgctggcattgatatggtgatggtgccatacaattacactgattacattaatgatctcacttctctcgttcacaagggtgtcatcaatataagcagaattgatgatgctgtgaagcggatccttcgagtcaaatttacaatgggcctgtttgagaaccctttagctgatcttagttttgcagagcagcttggaaagaaggagcatagggaactggctagagaagctgtcaggaaatcacttgttctgttaaaaaatgggaactctcccgatcagcaattcctacctctccctaagagagctagaagtatcctggtagctggaagtcatgctagcaatttggggtaccagtgtggtggatggtcaatccaatggatgggggacagtggtaatatcacaactgggacaacaattcttgatgcgataaagtctaccgttgctgactcgacgtctgttgtctactctgagaaccccgatgacagtttcatgaagcacaatgacttctcattcgctatcgtcgttgttggcgagccaccatacgctgaaacagttggcgatagcaccgacctcactatgctagaccctggtccagacacgatcagaactgtgtgtgctgcagttaaatgtgcagtagtcatcatttctggtcgtcccattgtgattgagccgtatgttccattagtggaagcgcttgttgcagcttggcttccgggaaccgaaggtcagggtgtcgcagatgtactctttggagactacggtttcacaggcaagctcccgcacacctggttcaagtctgtcgaccaactgcccatgaatgtgggagacctacagtacgatccactctaccctttcggcttcggtttgatgataaattcatcattgccagggttctctggtgttgacaatctgggatataggaagcaaagagtgctatttgctgtgctgtgttctctactgtcattggttctaatcagttaatgaattgggcgtagatagtatttcaacacatagctgcccttttgtagttctcatatgattagagtgttactaatctagctttagcgattgttagctgccaaatgagtcactggacgtcaatcaatctattatctatctatctactagatgattccccgcgttttgccgagatgctgccattgattatattcctcctgctctgattatcactttggttaccttgtgcaaattgattgttcatgatgatccaactgaggtcccc

SEQ ID NO: 1963 - DNA, 581 bp, Zea Mays
gtcccttaatgttctgcagatacaatggtgcgccaaactgctatggttgtcaaatgtttactgctgatgtactataagaacagcagaggccgtagctatcgtaggcagggtcaaatgttgacgattgtggaatattttctacttttgtaccgtgcattattgcctacacctgtgtggtaccgttttttcctgaacaaggagtatggaagcctattttcgtctctaaccactggcttgtatctcactttcaagttgacatctgttgtggaaaagattggaaaaggatggtgcgtagctgcaaaagagaggacatcttgcttgtgtgctcgcaagaaggatgcaaaggatctgtgatgatcagctgctgttttgggttcttgtcatgtaacatctcctatttttaaagagcaaaactgaaaatgcagttccggtcttgttgatgaaccgctagagacttaatgattttatatggtgctgtcggttgtctgttgtcttatatcttactgtatatggtaatcatctttgtttttctagatcttcatgtaattgttgctattcaattgttttttaaatggttgaaa

SEQ ID NO: 1964 - DNA, 7519 bp, Zea Mays
ctgggccacggaacggcaatgtcgcagcttggattagctgcaactgcctcgaaggccttgccactactccctaatcgccagagaagtccagctgggactacatttccatcatctgcattgccgaggccctcaaaccgaaggaaaagccatactcgttcacttcgtgatggtggaaatgaggtatcagatgccaaaaagcacagccagtcagttcgtcaaggtcttgctggcattatcgacatcccaagtgacgcagtttcggaagtcgatatttcacatggacctaaggatcctagggggccaacagattcctatcaaatgaatgggattatcaatgaaacacataatggaagacatgcctcagggtccatggttgttgaattttgtgcagcactaggtggcaaaacaccaattcacagtatattagtggccaacaatggaatggcggcaacaaagttcatgaggagtgtccgtacatgggctaatgatacttttggatctgagaaggcaattcatctcatagctatggcaactccggaagacatgaggataaatgcagaacacatcagacttgctgatcaattcgtagaggtgcctggtggaacaaacaataataactatgccaacgttcaactcatagtggagatagcagaaagagtaggtgtttctgctgtttggcctggttggggtcatgcttctgagaatcctgagctgccggatgcattgaccgcaaaaggaatcgtttttcttgggccaccagcaacatcaatgaatgcattgggagataaggttggttcagctctcattgctcaagcagccggggtcccaactcttgcttggagtggatcgcatttccattagagtgctgcttagacgcgatacctgaggagatgtatagaaaagcttgtgttactaccacagaggaggcagttgcaagttgtcaagtggttggttatcctgccatgattaaggcatcctggggaggtggtggtaaaggaataagaaaggttcataatgatgatgaggttagagcgctgtttaagcaagtacaaggtgaagtccctggctccccaatatttatcatgaggcttgcatcccagagtcggcatcttgaagttcagttgctttgtgatcaatatggcaatgtagcagcacttcacagtcgtgattgcagtgtacaacggcgacaccagaagattattgaagaaggcccagttactgttgctcctcgtgaaacagttaaagcacttgagcaggcagcaaggaggcttgctaaggctgtgggttatgttggtgcggctactgttgagtatctttacagcatggagactggagaatactattttctggagcttaatccccgactacaggttgagcatccagtcactgagtggatagctgaagtaaatctgcctgcagctcaagttgcagttggaatgggcatacctctttggcagattccagaaatcagacgtttttatggaatggactatggaggagggtatgacatttggaggaaaacagcagctcttgctgcaccatttaattttgatgaagtagattctctatggccaaagggccattgtgtagcagttagaattactagtgaggacccagatgatggtttcaaacctactggcgggaaagtgaaggagataagttttaaaagcaagcctaatgtttgggcctacttctcagtaaagtctggtggaggcattcatgaatttgctgattctcagtttggacatgtttttgcatatggactctctagaccagcagctataacaaacatgtctcttgcattaaaagagattcagattcgtggagaaattcattcaaatgttgattacacagttgacctcttaaacgcttcagacttcagagaaaacaagatccacactggttggctggatacaagaatagctatgcgtgttcaagctgagaggcccccatggtatatctcagtggttggaggtgctttatataaaacagtaaccaccaatgcagccactgtttctgaatatgttagttatctcaccaaaggccagattccaccaaagcatatatcccttgtcaattcaacagttaatttgaatatagaagggagcaaatacacaattgaaactgtcaggactgggcatggtaggtacaagttgcgaatgaatgattcaacagttgaggcgaatgtacaatctttatgtgatggtggcctcttaatgcagttggatggaaacagccatgtgatttatgcagaagaagaagctggcggtacacggcttcagattaatggaaagacatgcttgttgcagaatgaccatgatccatcaaagttattagctgagactccctgcaaacttcttcgctttttggttgctgatggtgctcatgttggtgcggatgtgccatatgcggaagttgaggttatgaagatgtgcatgcctctcttgtcacctgcttctggtgtcattcattgtatgatgtctgagggccaggcgttgcaggctggtgatcttatagcaaggctggatcttgatgacccttctgctgtgaaaagagctgaaccatttgatggaatgtttccactaatggacctccctgttgctgcctctagtcaagtacacaaaagatatgctgcaagtttgaatgctgctcgaatggtccttgcaggatatgagcacaatatcaatgaagtcgttcaagatttggtatgctgcctggacaatcctgagcttccttttctacagtgggatgaactaatgtctgttctagcaacgaggcttccaagaaatctcaagagtgagttagaggataaatacaaggaatacaagttgaatttttaccatgggaaaaacaaggacttcccatccaagttgctaagagacatcgtcgaggaaaatcttgcatatggttcagagaaggaaaaggctacaaatgagcgacttgttgagcctcttatgaacctactgaagtcatatgagggtgggagagaaagccatgcacattttgttgtcaagtctctttttgaggagtatcttaccgtggaagaacttttcagtgatggcattcagtctgacgtgattgaaaccttgcgtcatcagcacagtaaagacctgcagaaggttgtagacatcgtgctgtctcaccagggtgtgaggaacaaagctaagcttgtaacagcacttatggaaaagctggtttatccaaatcctggtgcgtacagggatctgttggttcgcttttcgtccctcaatcataaaagatattataagttggcccttaaagcaagtgaacttcttgaacaaaccaaactaagtgaactctgttccagcattgcaagaagcctttcagatctggggatgcataagggagaaatgactattaaggatagcatggaagatttagtctctgccccattgcctgttgaagatgctcttatttctttgtttgattacagtgatccaactgttcagcagaaagtgattgtgacatacatatcacgattgtaccagcctcatcttgtgaaggatagcatccaaatgaaattcaaagaatctggtgctattgttttttgggaattttctgaagggcatgttgatactagaaatggacaaggggctattcttggtgggaagagatggggtgccatggtcgttctcagatcacttgaatctgcatcaacagccattatggctgcattaaaagattctgtacagtacaacaactctgaggtcaacacaatgcacattgtgttattgaatgctgaaactgaaagtaatataagtgggacaagtgatgaccaagctcaacataggatggaaaagcttaccaagatactgaaggatagtagtgttgcaagtgatctccaagctgctggtttgaaggttataagttgcattgttcaaagagatgcaggtcgcatgccaatgcgccacacattcctctggtttgatgaaaagaactgttatgaagaagagcatattctccggcatgtggagcctcccctctctgcacttcttgaattgggtaagttgaaagtgaaaggatacaacgaaatgaagtatactccatcacgtgatcgtcaatggcatatctacacactaagaaatactgaaaaccccaaaatgttgcatagggtatttttccgaactattgtcaggcaacccaatgcaggcaacaagtttacgtcggcacaggtcagcgacactggattaggatgtcctgaagaatctctgtcatttacatcgaatagcatcttaagatcactgatgactgctatagaagaattagagcttcatgcgattaggacaggtcattctcacatgtttttgtgcatactgaaagaacaaaagcttcttgatctcgtcccattttcagggagtacaattgttgacgttggccaagatgaagctactgcttgttcacttttaagatcaatggctttgaagatacatgaacttgttggtgcaaggatgcatcatctttctgtatgccagtgggaggtgaaactcaagttggactgtgatggacctgcaagtggtacctggagagtcgtaactacaaatgtcactagtcacacctgcaccattgatatctaccgagaagtggaagatacagaatcgcagaagttactataccattcagctacttcgtcagctggtccaatgcatggtgttgcactgaataatccttatcaacctttgagtgtgattgatctaaagcgctgctctgctaggaacaacagaacaacatattgctacgattttccgctggcatttgaaactgcactgcagaagtcatggcaatccaactgttctagtgttcctgaaggcagtgaaaatagtaaatcctacgtgaaatcaactgagctggtgtttgctgaaaaacatgggtcctggggcactcctataattcccatggaacgtcctgctgggctcaatgacattggtatggtcgcttggatcttggaaatgtcaacacctgaatttcccaatggcaggcagattattgttgtagcaaatgatattactttcagagctggatcattcggcccaagggaagatgcattttttgaagctgtcaccaacctggcttgcgaaaggaagcttccccttatatacttggcagcaaactctggtgctaggattggcatagctgatgaagtgaaatcttgcttccgtgttgggtggtctgatgaacgcagccctgaacgagggtttcagtacatctatctgactgaagaagactatgctcgtattagctcttctgttatagcacataagctgcagctagataatggtgaaattaggtggattattgactctgttgtgggcaaggaggatgggcttggtgttgagaacatacatggaagtgctgctattgccagtgcttattctagggcatatgaggagacatttacacttacatttgtgactgggcggactgtaggaataggagcctatcttgctcgacttggtatacggtgcatacagcgccttgaccagcctattattttaacagggttttctgccctgaacaagctccttgggcgagaagtgtacagctcccacatgcagctgggtggtcctaagatcatggcgaccaatggtgttgtccacttgaccgtttcagatgatcttgaaggtgtttccaatatattgaggtggctcagctatgttcctgcaaacattggtggacctcttcctattaccaaacctttggaccctccagatagacctgtcgcatacatccctgagaacacatgcgatccgcgtgcagccatccgtggtgtagatgacagccaagggaaatggttgggtggtatgtttgacaaagacagctttgtggagacatttgaaggatgggcaaaaacagtggttactggcagagcaaagcttggaggaattcctgtgggtgttatagctgtggagacacagaccatgatgcagctcatccctgctgatccaggtcaacttgattcccatgagcgatctgttcctcgggctggacaagtgtggttcccagattctgcaaccaagacagctcaggcattattagacttcaaccgtgaaggattgcctctgttcatcctggctaactggagaggcttttctgggggacagagagatctctttgaaggtattcttcaggctgggtcagcaattgttgagaaccttaggacatataatcagcctgcgtttgtctacattcctatggctggagagcttcgtggaggagcttgggttgtgatcgatagcaaaataaatccagaccgcattgagtgttatgctgagaggactgccaaaggtaatgtgctcgaacctcaagggttaattgaaattaagttcaggtcagaggaactccaagactgtatgggcaggcttgacccagagttgataaatctgaaagcaaaacttcaagatgcaaagcatggaaatggaagtctaccagacatagaatcgcttcagaagagtatagaagcgcgtacaaaacagttgttacctttatatacccagattgcagtacgctttgctgaattgcatgatacttccctgagaatggcagctaaaggcgtgattaagaaagttgtagactgggaagaatcacgctctttcttctataaaaggctacggaggaggatctctgaagatcttcttgcaaaagaaataagacgaataattggtgacaacttcacgcaccaatcggcgatggagcttatcaatgaatggtacctggcttctcaggccacaacaggaagcactgctggatgggatgatgatgatgcttttgttgcctggaaggacagtcctgaaaactacaagggatatatccaagagctaagggctcaaaaagtatctcagtcgctctctgatcttgctgactccagttcagatctacaagcattctcgcagggtctttctacactattagataagatggatccttctcagagagtgaagtttgttcaggaagtcaagaaggttcttggatgatgatatgataccaacacatccaacacaatatgcgcatgctacatgttatttttcaagtacatacatagaaggatattgcttggccttgattgatcatgtctgatctaagtcgatcattattttcttgaaacttcctttcggacgtggtgctatggttgatgaatttggatgtgtgcgttctgccaggtgtaagcccaaaggtttatacagaccgagttaaggttaggaagagcacgagtgaacttgttctggttttgcagtggttaaggcagaaagttgtttcactgtagttctgagatgtattaccagcggcgctgtaattttagggtgtataatgcggatgctagtaaacaattgagtggttcattaaattttgaactcgaataatatgtttctgtaggcacatgtgacgtaccactacatgaaataaatgtcgctgaactagggcaccagagttttggtaggactaaggttttgtttggttatgggataaggtgagcatctccagcgttcccaaacttgaatttccc

SEQ ID NO: 1965 - DNA, 7832 bp, Zea Mays
cacgcgtccacgcgcgcacacgggccctccacttgtcccccaccgtcatctccatcaccctcctctgtcacgtgcctctgcgctccaccgcggcggagtccccgatgctgattgtgggccgcgaaatttcattataggccccacccccgtcgctcgcccgtcgcccccacccctcggtatatccgcctccgcccggcgcctccctctgcctcctctgctccgccctgccgccgcaaggatccaaaccccgaattttgctctctttttatggcactgtgcttttgagaaggcctttaattgtgctgtctgggccacggaacggcaatgtcgcagcttggattagctgcaactgcctcgaaggccttgccactactccctaatcgccagagaagtccagctgggactacatttccatcatctgcattgccgaggccctcaaaccgaaggaaaagccatactcgttcacttcgtgatggtggaaatgaggtatcagatgccaaaaagcacagccagtcagttcgtcaaggtcttgctggcattatcgacatcccaagtgacgcagtttcggaagtcgatatttcacatggacctaaggatcctagggggccaacagattcctatcaaatgaatgggattatcaatgaaacacataatggaagacatgcctcagggtccatggttgttgaattttgtgcagcactaggtggcaaaacaccaattcacagtatattagtggccaacaatggaatggcggcaacaaagttcatgaggagtgtccgtacatgggctaatgatacttttggatctgagaaggcaattcatctcatagctatggcaactccggaagacatgaggataaatgcagaacacatcagacttgctgatcaattcgtagaggtgcctggtggaacaaacaataataactatgccaacgttcaactcatagtggagatagcagaaagagtaggtgtttctgctgtttggcctggttggggtcatgcttctgagaatcctgagctgccggatgcattgaccgcaaaaggaatcgtttttcttgggccaccagcaacatcaatgaatgcattgggagataaggttggttcagctctcattgctcaagcagccggggtcccaactcttgcttggagtggatcgcatgttgaagttccattagagtgctgcttagacgcgatacctgaggagatgtatagaaaagcttgtgttactaccacagaggaggcagttgcaagttgtcaagtggttggttatcctgccatgattaaggcatcctggggaggtggtggtaaaggaataagaaaggttcataatgatgatgaggttagagcgctgtttaagcaagtacaaggtgaagtccctggctccccaatatttatcatgaggcttgcatcccagagtcggcatcttgaagttcagttgctttgtgatcaatatggcaatgtagcagcacttcacagtcgtgattgcagtgtacaacggcgacaccagaagattattgaagaaggcccagttactgttgctcctcgtgaaacagttaaagcacttgagcaggcagcaaggaggcttgctaaggctgtgggttatgttggtgcggctactgttgagtatctttacagcatggagactggagaatactattttctggagcttaatccccgactacaggttgagcatccagtcactgagtggatagctgaagtaaatctgcctgcagctcaagttgcagttggaatgggcatacctctttggcagattccagaaatcagacgtttttatggaatggactatggaggagggtatgacatttggaggaaaacagcagctcttgctgcaccatttaattttgatgaagtagattctctatggccaaagggccattgtgtagcagttagaattactagtgaggacccagatgatggtttcaaacctactggcgggaaagtgaaggagataagttttaaaagcaagcctaatgtttgggcctacttctcagtaaagtctggtggaggcattcatgaatttgctgattctcagtttggacatgtttttgcatatggactctctagaccagcagctataacaaacatgtctcttgcattaaaagagattcagattcgtggagaaattcattcaaatgttgattacacagttgacctcttaaacgcttcagacttcagagaaaacaagatccacactggttggctggatacaagaatagctatgcgtgttcaagctgagaggcccccatggtatatctcagtggttggaggtgctttatataaaacagtaaccaccaatgcagccactgtttctgaatatgttagttatctcaccaaaggccagattccaccaaagcatatatcccttgtcaattcaacagttaatttgaatatagaagggagcaaatacacaattgaaactgtcaggactgggcatggtaggtacaagttgcgaatgaatgattcaacagttgaggcgaatgtacaatctttatgtgatggtggcctcttaatgcagttggatggaaacagccatgtgatttatgcagaagaagaagctggcggtacacggcttcagattaatggaaagacatgcttgttgcagaatgaccatgatccatcaaagttattagctgagactccctgcaaacttcttcgctttttggttgctgatggtgctcatgttggtgcggatgtgccatatgcggaagttgaggttatgaagatgtgcatgcctctcttgtcacctgcttctggtgtcattcattgtatgatgtctgagggccaggcgttgcaggctggtgatcttatagcaaggctggatcttgatgacccttctgctgtgaaaagagctgaaccatttgatggaatgtttccactaatggacctccctgttgctgcctctagtcaagtacacaaaagatatgctgcaagtttgaatgctgctcgaatggtccttgcaggatatgagcacaatatcaatgaagtcgttcaagatttggtatgctgcctggacaatcctgagcttccttttctacagtgggatgaactaatgtctgttctagcaacgaggcttccaagaaatctcaagagtgagttagaggataaatacaaggaatacaagttgaatttttaccatgggaaaaacaaggacttcccatccaagttgctaagagacatcgtcgaggaaaatcttgcatatggttcagagaaggaaaaggctacaaatgagcgacttgttgagcctcttatgaacctactgaagtcatatgagggtgggagagaaagccatgcacattttgttgtcaagtctctttttgaggagtatcttaccgtggaagaacttttcagtgatggcattcagtctgacgtgattgaaaccttgcgtcatcagcacagtaaagacctgcagaaggttgtagacatcgtgctgtctcaccagggtgtgaggaacaaagctaagcttgtaacagcacttatggaaaagctggtttatccaaatcctggtgcgtacagggatctgttggttcgcttttcgtccctcaatcataaaagatattataagttggcccttaaagcaagtgaacttcttgaacaaaccaaactaagtgaactctgttccagcattgcaagaagcctttcagatctggggatgcataagggagaaatgactattaaggatagcatggaagatttagtctctgccccattgcctgttgaagatgctcttatttctttgtttgattacagtgatccaactgttcagcagaaagtgattgtgacatacatatcacgattgtaccagcctcatcttgtgaaggatagcatccaaatgaaattcaaagaatctggtgctattgttttttgggaattttctgaagggcatgttgatactagaaatggacaaggggctattcttggtgggaagagatggggtgccatggtcgttctcagatcacttgaatctgcatcaacagccattatggctgcattaaaagattctgtacagtacaacaactctgaggtcaacacaatgcacattgtgttattgaatgctgaaactgaaagtaatataagtgggacaagtgatgaccaagctcaacataggatggaaaagcttaccaagatactgaaggatagtagtgttgcaagtgatctccaagctgctggtttgaaggttataagttgcattgttcaaagagatgcaggtcgcatgccaatgcgccacacattcctctggtttgatgaaaagaactgttatgaagaagagcatattctccggcatgtggagcctcccctctctgcacttcttgaattgggtaagttgaaagtgaaaggatacaacgaaatgaagtatactccatcacgtgatcgtcaatggcatatctacacactaagaaatactgaaaaccccaaaatgttgcatagggtatttttccgaactattgtcaggcaacccaatgcaggcaacaagtttacgtcggcacaggtcagcgacactggattaggatgtcctgaagaatctctgtcatttacatcgaatagcatcttaagatcactgatgactgctatagaagaattagagcttcatgcgattaggacaggtcattctcacatgtttttgtgcatactgaaagaacaaaagcttcttgatctcgtcccattttcagggagtacaattgttgacgttggccaagatgaagctactgcttgttcacttttaagatcaatggctttgaagatacatgaacttgttggtgcaaggatgcatcatctttctgtatgccagtgggaggtgaaactcaagttggactgtgatggacctgcaagtggtacctggagagtcgtaactacaaatgtcactagtcacacctgcaccattgatatctaccgagaagtggaagatacagaatcgcagaagttactataccattcagctacttcgtcagctggtccaatgcatggtgttgcactgaataatccttatcaacctttgagtgtgattgatctaaagcgctgctctgctaggaacaacagaacaacatattgctacgattttccgctggcatttgaaactgcactgcagaagtcatggcaatccaactgttctagtgttcctgaaggcagtgaaaatagtaaatcctacgtgaaatcaactgagctggtgtttgctgaaaaacatgggtcctggggcactcctataattcccatggaacgtcctgctgggctcaatgacattggtatggtcgcttggatcttggaaatgtcaacacctgaatttcccaatggcaggcagattattgttgtagcaaatgatattactttcagagctggatcattcggcccaagggaagatgcattttttgaagctgtcaccaacctggcttgcgaaaggaagcttccccttatatacttggcagcaaactctggtgctaggattggcatagctgatgaagtgaaatcttgcttccgtgttgggtggtctgatgaacgcagccctgaacgagggtttcagtacatctatctgactgaagaagactatgctcgtattagctcttctgttatagcacataagctgcagctagataatggtgaaattaggtggattattgactctgttgtgggcaaggaggatgggcttggtgttgagaacatacatggaagtgctgctattgccagtgcttattctagggcatatgaggagacatttacacttacatttgtgactgggcggactgtaggaataggagcctatcttgctcgacttggtatacggtgcatacagcgccttgaccagcctattattttaacagggttttctgccctgaacaagctccttgggcgagaagtgtacagctcccacatgcagctgggtggtcctaagatcatggcgaccaatggtgttgtccacttgaccgtttcagatgatcttgaaggtgtttccaatatattgaggtggctcagctatgttcctgcaaacattggtggacctcttcctattaccaaacctttggaccctccagatagacctgtcgcatacatccctgagaacacatgcgatccgcgtgcagccatccgtggtgtagatgacagccaagggaaatggttgggtggtatgtttgacaaagacagctttgtggagacatttgaaggatgggcaaaaacagtggttactggcagagcaaagcttggaggaattcctgtgggtgttatagctgtggagacacagaccatgatgcagctcatccctgctgatccaggtcaacttgattcccatgagcgatctgttcctcgggctggacaagtgtggttcccagattctgcaaccaagacagctcaggcattattagacttcaaccgtgaaggattgcctctgttcatcctggctaactggagaggcttttctgggggacagagagatctctttgaaggtattcttcaggctgggtcagcaattgttgagaaccttaggacatataatcagcctgcgtttgtctacattcctatggctggagagcttcgtggaggagcttgggttgtgatcgatagcaaaataaatccagaccgcattgagtgttatgctgagaggactgccaaaggtaatgtgctcgaacctcaagggttaattgaaattaagttcaggtcagaggaactccaagactgtatgggcaggcttgacccagagttgataaatctgaaagcaaaacttcaagatgcaaagcatggaaatggaagtctaccagacatagaatcgcttcagaagagtatagaagcgcgtacaaaacagttgttacctttatatacccagattgcagtacgctttgctgaattgcatgatacttccctgagaatggcagctaaaggcgtgattaagaaagttgtagactgggaagaatcacgctctttcttctataaaaggctacggaggaggatctctgaagatcttcttgcaaaagaaataagacgaataattggtgacaacttcacgcaccaatcggcgatggagcttatcaatgaatggtacctggcttctcaggccacaacaggaagcactgctggatgggatgatgatgatgcttttgttgcctggaaggacagtcctgaaaactacaagggatatatccaagagctaagggctcaaaaagtatctcagtcgctctctgatcttgctgactccagttcagatctacaagcattctcgcagggtctttctacactattagataagatggatccttctcagagagtgaagtttgttcaggaagtcaagaaggttcttggatgatgatatgataccaacacatccaacacaatatgcgcatgctacatgttatttttcaagtacatacatagaaggatattgcttggccttgattgatcatgtctgatctaagtcgatcattattttcttgaaacttcctttcggacgtggtgctatggttgatgaatttggatgtgtgcgttctgccaggtgtaagcccaaaggtttatacagaccgagttaaggttaggaagagcacgagtgaacttgttctggttttgcagtggttaaggcagaaagttgtttcactgtagttctgagatgtattaccagcggcgctgtaattttagggtgtataatgcggatgctagtaaacaattgagtggttcattaaattttgaactcgaataatatgtttctgtaggcacatgtgacgtaccactacatgaaataaatgtcgctgaactagggcaccagagttttggtaggactaaggttttgtttggttatgggataaggtgagcatctccagcgttcccaaacttgaatttccc

SEQ ID NO: 1966 - DNA, 2655 bp, Zea Mays
atggagcagttccccgacggggcgcacgtgcggctgcggagccgcgtgcacgcagggtacctccacgccgacgaggacggggtgggggtgtccctgcgccgctggcgccgcaggtcgatgaacgtggcgtggaaggtgcaccgcatcctgcacgacggctccaccagcgtcctcctccacagcgccgcctatggccggtacctcgcggcgtcccacgacccggcgccgccgggccacctcggcctccgcgtcgacctgggcgactacgaccaggacgtggaccccatcctgtggaaggccgtcggctccggggacgccggctacgtcctcctgcgccacgtctccaaccgcctcctccgcgccaacggaaggtaccgcctctggcaccgtggcgtctccgtcgacgacgtcgacaaccagagcacgatgatgcattggaaggtcgagaccatccccaccagccccaggccgccagcacttccagcgccgactcggaggaaccgaggcagcttccgcggcctgttcctcctgcacgaggagcccgtggtgctgcagcggacggtacggttcgtgcgggcggacaactacggcaacttcccggacaactggggcacgctccagttccagggccgctccgtctttgagctgagagcggagatggcgcgtcgcttaaactatgcgctcttcttcttccgcctcctgatgtgcgtccggggcggccgctacgggcgcctgaccccgctactcatcgacctgcctcgcaacgaggagaccctggacatcatcgtcctcttcatcgggacacaaggacctgaaaattgcatcacttgtgtgctgattgctgaagctctccacatgattttgttaactgacagccccatgaggccgcatgtggacatgtctactcggaccactgcgtttaccattacctacacggctacaccgtcgcctaatttgccaacgcccgccgccgttccgatggaaaccgccgcgccggcgcgcgtccaagccctcgctgaggccggcgtgtcccgcctcccggcgcagtacatccagccgcctgagcaccgaccaaccccctcgccttctcctattgccgcggcgctctccgtgccggtcgtcgacctctcaacctccaccgccgacgacgccgtccgcgccgcgtgcgcggactggggcgcctttcacgtggtcggccacggcgtgccggtggatctcctcgacgcggtgcgcgcggcagggctcgccttcttccgcgcgcccatggaggacaaactccggttcgcctgcgacccggccaggggcgccgcctcggaagggtacggcagccgcatgctcgccaacgacgactccgtgctcgactggcgcgactactttgaccaccacacgctcccggagtcccgctgtgatcccgcccgctggcccgacttcgtccccggttacagcatgttacttttgcctataacacgggagataacaccatgtaccttttacagagatactattgcaaaatacagcaacagcatgaaggatcttgctcaaaaattgttgtgcatcatctcagaaaatctgagcctaccaccatcttatatacaagaggcggttggagaagttttccagaacattactattagctactattctccgtgtccacaacctgatcttgctcttggattacaatctcattctgatatgggcgcaataacacttctgatacaagatgatgttggtgggcttgaagtattaaaggatggaatgtggatacctgtgcctgctttgcgtgatggcatccttgtgattctcgctgatcagacagagatcatcaccaatggaagatacaagagttcagttcatcgagctgttgtcaatgctgagcatgcccgcttatcagtagcaacattttatgatccatcaaaatcaaggaaaatatgcactgccccgcagcttgtgagtgagaatgaaccacaaaagtatcgggatgtaatttatggtgactatgtctcatcttggtatagcaaaggtccagagggcaagcgaaacatcgacgccctcctgattcagcactagagccataggtatgccttaaaacagggttggaccactcatctgttttgtaaacttctaatgcatgtacaacatatcagtttccaactttaaacaatcaggataaggaaaccaacttgtatactgaatgcagtgcaataaagtaccttttcattgtcagtcttttagttaagatactttcatctgactgaaagagtaaatgagacagaatcttgacattttttttctctaacattgttttttgtttttttcttgttttagtttctctaaaaaaacttcgtattgatgtaatacctgattatggtcttaaagacaaccttttctaggttggaacctggcatgtgtagtcgattttattcccagttataaagataaattgttaatcttgggtccccagcatctattgcagttttttttcctgctcatgtgttgaggccgagtgggcatagtagtgtgcaaggcggatggaagcagccaaccaacttgacaatgaaactcttggctctgtcacctggttgcatcaccaatggttctgcgagacttacgatattgagagcaaatgcagccagcgttgcgtagggctgtccatca

SEQ ID NO: 1967 - DNA, 1442 bp, Zea Mays
tatctcctcttggctcagtgtataggcaagatcttggtcgctggaagggtcacttaagttgaagaacttgtttggctatggtgacatctgggatgcatcaggatcctttggttgggaccaaacaacagaggttggtgttggagtctgcctaccgaggtttaaatcaataccaacaccattgatggctcgggcatctttgtcatcacaagattggctgaagttttcatcatacaaggagcgcctacttggcctttcatttggtttgctgtcaacaaggaaccatgacttgtcatacaaccttgcgtggcgtaccttaactgatccatcacgtgtctcatcaaaggccataaggaggcagttagggcataaccttctttctgcattgaagtacacatacaagattgataagagggattcacatcttaggccaacgaaaggatatgcgtttcagtcaacttctcaagttggtggtctatggaatagcaaaggattgagatatttccggcaggagttcgatgtacgtggtgctgtgcctttgggattttatagtgctgctctcaacgttggtgtaggagcgggtgtcattttaccgcttgcagggggattcatgaattcgacttcatcagtgccagagaggttttatcttggaggtaattcttctccagtgtgcagcttgggcggaccgtcatctctgctgggtttcagattaaggggagttggcccaacagaggcgcggaggcatgtccttaataactcggagagtggctcggctgaccctggaagggattacttgggaggtgatctggccgtgtctgccttcgctgacctttcttttgatctgcccctcaagatattcagagacgctggaatccatggccacgcattccttactgctggaaaccttgcgaaactgtcggagggtgagtacaagaacttttcggcttctgaatttcggcaaacgttccggagctctgctggcgttgggattattttgcctaccaaacttttccgggtagaggtgaactattgccgcatcctaaagcaagctgagcatgacagcgcgaagactggaatccagttcagcttttcctcgcccatgtaggaacttgccatggcagccgaaacagctgcactttcctctgtagacttgcatttcttcccgttcttttcatgctgaagcaattgaagaggttatttacgtgctcccttttcttgtgacgcttgttcattgacacgaggagctgctccttttttttggtgtcttcaggagatgggtttattatttgctgtttttgacctcacgagggatttgtcctcgcacaactcaaataccgatgctgtggctacacaatggtggatagaataatattttggcccataatgttgtataattcataccacatcagctttccgtgtcattcgctcgtttattcgcgtgtgtt

SEQ ID NO: 1968 - DNA, 2939 bp, Zea Mays
ccctccctccccaagtccccagtccgcactgaccactgccaccaccaaaaactcatggcctctcgcgcacccatccctcctgctccgccccacctccgcctccacgccgcgtccctcttctcgcagcgcctcccactccctcgcgcgcgtgccccgcgatgccgcggcggacggagccgcctcctctcagcgctgccgtcgccgcccccctcgccagcctcgcgctcgcagggcgtctccaccgctccgatcgagcgcgaaccaccgggactcgcgcccacgcccgcgcctacccccgctcagcagccgcaccaggatccagcgatcgccgcggaggtcgctcgcctctccgccgcccgcgagaggctccgcgcggcgcacacgctccacgagaaactccgcgcgctcgacgctgagccccgcgtcgcggcgttcttcggcgaggagtccagccgcggggtgttgggcgtgctcgagccccgcgaggtgctcctgctgaaatgcctcgtcgcggcaggacaggagcacgtgctcggccatgagctcgattggtacggcggcgacggcggccatcacgagcaccaccaccgcaacggggtcagtggtgggagtgccctgcgggatgcgctgtatagcctggccggtttggtcgggaagtggacctcggagggagtggtggctgccaaggagagaagggaggaaatggaggtgctacctagactgctcaagttcctcgacaacgtcgaggagttctacgactgcattggtggcatcatcggtcatacaagaagctatcaaattatggtattggagctcctttcagcctctaaggatcgcatgcaccgacctagcaaagacaagtttgttgatttccatgttcccagtggacttaatttattgaaggataaagaatatgcatctcaagcagctctgtggggaattgagggtctgccagaattaggtgaaatttacccaattggtggtgcgggtgatcgtcttggtttagtggactcagatactggtgagtcccttcctgctgcgttgctcccttactgtgggagatccctgttggaagggctgatacgggatctgcaggctagagagtttctccacttcaagatctttggaggtcaatgtataaccccagttgcaatcatgaccagttctgtgaaggataatcatgaacatataattgcgatatgcgaaagacttgattggtttggtagaggccgtgacaatttccggttgtttgaacagcctttggtacctgtagtaaatgccaaagatggtaaatggttaatcagcaaatcacttttccctgttggtaaacctggtggtcatggtgctatttggaaacttgcatatgatagaggtgtactccaatggttacaaaattgtggcaggaaaggtgcaactgtacgccaagtcagcaatgtggttgctgcaactgatttgaccatgatggcattggcaggaataggccttcgatgcaacaagaaattaggttttgcatcttgtgagcgaagacctggggctactgaaggagtgaatgtccttattgagaaacaaaatcttgaggggctatggtcatatggcatcacttgtatcgagtacactgagtttgaaaagtatggcatcccagaacctacactaaccaacagttcgcaggttagctttccagcaaatacgaacattctctatgttgatctacaagcggtacaggaagttggatctcgcaaaaatgctagttgcttaccagggatggtgctgaatttgaaaaaggcagtatcgtaccccaaccatcttggctttgagtgtagtgctgctggaggcaggctagagtgcacaatgcaaaacattgcagatgattttatgaacacttttaactacagatgcagcaaaggaatagaaagtgagcttaacactttcattgtatataatgaaaggaaaagagtcacttcatcagctaaaaggaagctgaaatcagaagacagatcattgcaccagttactttgtattcctgagttgtgttcgactccggagggttcactccttgatattatgcgtaatgctcatgacctcctttccagttgcggcatagatattcccatggttcaagacaacagtgaatatatgcattctggaccgccgtttctcatatttcttcatcctgctttaggcccattttgggatatcatacgacaaaagttcgtaggtggttctgtttctaaaggttcagagttgcaaatagaggtggctgagtttctatggaaagatgttgagctggatggaagctttattattctagctgacaacgtcatgggttcaaccaagaatagcaaaaatggtgaacagatactgcactatggttccaggtgtgggagatgcagactgcaaagtgttaaaattgttaatgaagggatcaattggacttctcccaataatgtctattggaagcatgatgtagagagatcagaatctgtaaagattattcttcatggaaacgcagaatttgaggcaaaagatgtagtcttgaagggtaaccatgtatttgaagttcctgatggtcatagaatgtgcatcattcaggacagagcaggatttgttgttaaattggatcttatacgtgacgaattgatggacagtggaacctggcattggaagtatgcagttgatggtgtccatgtaaagttgaacatggtagaactataaggggtatcaactatagattcttgattcattgatttgtggccagcttaattttattgaggacacacttgacgttggttgactttagtctagattgtaggcgatgacatgttgtaaagataagggagctttgttttcgtacattaggtctgaactgttcccttcattgaagaggtgatgtactagaatatgtatttttcaaatatatggagaatgcttgttctccgaag

SEQ ID NO: 1969 - DNA, 3582 bp, Zea Mays
caagtccccagtccgcactgaccactgccaccaccaaaaactcatggcctctcgcgcacccatccctcctgctccgccccacctccgcctccacgccgcgtccctcttctcgcagcgcctcccactccctcgcgcgcgtgccccgcgatgccgcggcggacggagccgcctcctctcagcgctgccgtcgccgcccccctcgccagcctcgcgctcgcagggcgtctccaccgctccgatcgagcgcgaaccaccgggactcgcgcccacgcccgcgcctacccccgctcagcagccgcaccaggatccagcgatcgccgcggaggtcgctcgcctctccgccgcccgcgagaggctccgcgcggcgcacacgctccacgagaaactccgcgcgctcgacgctgagccccgcgtcgcggcgttcttcggcgaggagtccagccgcggggtgttgggcgtgctcgagccccgcgaggtgctcctgctgaaatgcctcgtcgcggcaggacaggagcacgtgctcggccatgagctcgattggtacggcggcgacggcggccatcacgagcaccaccaccgcaacggggtcagtggtgggagtgccctgcgggatgcgctgtatagcctggccggtttggtcgggaagtggacctcggagggagtggtggctgccaaggagagaagggaggaaatggaggtgctacctagactgctcaagttcctcgacaacgtcgaggagttctacgactgcattggtggcatcatcggtcatacaagaagctatcaaattatggtattggagctcctttcagcctctaaggatcgcatgcaccgacctagcaaagacaagtttgttgatttccatgttcccagtggacttaatttattgaaggataaagaatatgcatctcaagcagctctgtggggaattgagggtctgccagaattaggtgaaatttacccaattggtggtgcgggtgatcgtcttggtttagtggactcagatactggtgagtcccttcctgctgcgttgctcccttactgtgggagatccctgttggaagggctgatacgggatctgcaggctagagagtttctccacttcaagatctttggaggtcaatgtataaccccagttgcaatcatgaccagttctgtgaaggataatcatgaacatataattgcgatatgcgaaagacttgattggtttggtagaggccgtgacaatttccggttgtttgaacagcctttggtacctgtagtaaatgccaaagatggtaaatggttaatcagcaaatcacttttccctgttggtaaacctggtggtcatggtgctatttggaaacttgcatatgatagaggtgtactccaatggttacaaaattgtggcaggaaaggtgcaactgtacgccaagtcagcaatgtggttgctgcaactgatttgaccatgatggcattggcaggaataggccttcgatgcaacaagaaattaggttttgcatcttgtgagcgaagacctggggctactgaaggagtgaatgtccttattgagaaacaaaatcttgaggggctatggtcatatggcatcacttgtatcgagtacactgagtttgaaaagtatggcatcccagaacctacactaaccaacagttcgcaggttagctttccagcaaatacgaacattctctatgttgatctacaagcggtacaggaagttggatctcgcaaaaatgctagttgcttaccagggatggtgctgaatttgaaaaaggcagtatcgtaccccaaccatcttggctttgagtgtagtgctgctggaggcaggctagagtgcacaatgcaaaacattgcagatgattttatgaacacttttaactacagatgcagcaaaggaatagaaagtgagcttaacactttcattgtatataatgaaaggaaaagagtcacttcatcagctaaaaggaagctgaaatcagaagacagatcattgcaccagactccggagggttcactccttgatattatgcgtaatgctcatgacctcctttccagttgcggcatagatattcccatggttcaagacaacagtgaatatatgcattctggaccgccgtttctcatatttcttcatcctgctttaggcccattttgggatatcatacgacaaaagttcgtaggtggttctgtttctaaaggttcagagttgcaaatagaggtggctgagtttctatggaaagatgttgagctggatggaagctttattattctagctgacaacgtcatgggttcaaccaagaatagcaaaaatggtgaacagatactgcactatggttccaggtgtgggagatgcagactgcaaagtgttaaaattgttaatgaagggatcaattggacttctcccaataatgtctattggaagcatgatgtagagagatcagaatctgtaaagattattcttcatggaaacgcagaatttgaggcaaaagatgtagtcttgaagggtaaccatgtatttgaagttcctgatggtcatagaatgtgcatcattcaggacagagcaggatttgttgttaaattggatcttatacgtgacgaattgatggacagtggaacctggcattggaagtatgcagttgatggtgtccatgtaaagttgaacatggtagaactataaggggtatcaactatagattcttgattcattgatttgtggccagcttaattttattgaggacacacttgacgttggttgactttagtctagattgtaggcgatgacatgttgtaaagataagggagctttgttttcgtacattaggtctgaactgttcccttcattgaagaggtgatgtactagaatatgtatttttcaaatatatggagaatgcttgttctccgaagttatcaaagaacattggtcttgtttgcttccaatgttgtatttgtgttagtttgtgggtgtcagactgtcagtggcacccggtagtaggtttcagcatcgtaatcgatctggaacatggtgatgaaacctgaaactggctacttcaaaggtaaggagaactatgtactgtaccaaataatgggtctgaggcaactgaatagtgttagcacttagcaaagttagggtcttagggaactcaacatggtgtttacatttgagcttcatcaacacaggtttgtgtattgtctgcatgccattgttgttttgtactccatccgttccaaactatagttctttctagttcacttttttcagtccacattcattcgaatgataataaatatagacatacatacaaactacattcatatgttacttaatgaatatatgattaatctaaaacgaattatgttttgggatggagagagtattgaatagcagtcactttcggattctcctctaatcgctgttcaaagatgttgacttatatttgacaaacaaaattgatttgccaaaatgtattctttgaatgaatggcatctgtatagtcatattagacattctattaccaatggctgagatatcaatttgcaattgtgcattttgtaacatgcaaacaggattgtcttagactatctcca

SEQ ID NO: 1970 - DNA, 1793 bp, Zea Mays
ctgccccaacatcatcacctattagagcttcagcattgcctccacctccaccacctggaacgagctccagtccacgtccaccccctccaccatgctattcatcaaaacaatcatccagccccatgggcaaatcgatgccatcacctcctgttccgccaccaccctcccatggaggacgcaatggagcttctggtaacattgtacccccgccagcaccccctggcagtaatgctaaactgtttggtcctcaggggcgtggacctgcacctccttcaggtccaatgtcaaagagctttcaatctggccaggctgtgttgagaaggtctaatttgaagccacttcattgggtgaaagtaacaagagcaatgcatggtagtctgtgggcggagtcacagaagcctgacgaaactttaaaagctcctgtgtttgatatgtcagaattagaaaatcttttctcagctgcactgccaagttcagattcaaggcgttcagataagtcaggcagtcgtgcatctgggtcgaaaccagagaaaattcatcttattgatcttcgccgggctaacaattgtggaatcatgcttaccaaagtcaaaatgccactgcctgacctaatgagtgcaattctggctctggatgatactgttctggatgctgaccaggtggagaaccttattaagttcactccaactaaagatgaaattgaacttctaaagggttacaaaggagacaagcaagttcttggagaatgtgagcagttctttatggagcttatgaaattaccacgtgtagaatctaagctgagagttttctcatttaagattcaattccgttcccaggtttctgaccttaagcggaacctgaacattgttaattcttcagcagaagagatacgaggttcagtcaagttgaaaaggattatgcagacaattctttctctcggaaatgcattgaaccaaggcactgctagaggttctgctgttggtttcaggttggatagcttgcttaaacttagtgacacccgtgctcgtaacaataagatgactttaatgcactatttatctaagacactgaaggatttcctcattggtgcagaagctgaagttaggtctttgacttcactttattctaatgtgggccgaaatgcagatgcgttagcgctttattttggagaagatccagcacgatgtccatttgagcaagtagttacaacactccaaaattttgtgagattgttcacgcgttcccatgaagagaactgtaagcaactggatcttgaaaagaagaaagctctgaaggaagcagaagacaatagtaaacaactggaccttgaaaagaagaaaacccagaaggaagcagaaacagagaaaataaagaagaaatctgacagtgagaaagcttgtaagaaagaactggaaaatgataaatcttctaagaaggattcagcaaatgagaaaggcaagcttaacaatcccatcaaagagctagatatatcacttcaatcacctgcacaaactgccagtgccaaatgacgaccgtaccagatgaactaacagtagcttttccgaaagaggaaaactagttttggctgctcccaacagtgcttccttttgacgaatcatgcaggataaggaagccgaaaactgcacttttaatacgttctcaggggattgtcgaagaaattaacctggcgacaagctgtacagatctgacataataatagccttttcttttgggtaataatagattattcttacaatttttctgtcttcttgattatatgtagctaatgtctg

SEQ ID NO: 1971 - DNA, 3884 bp, Zea Mays
ccgaaagatcaaacgccccacctaaaacaccattaaagaaacgcgcacagacacaaaaaaaaaactctctccgttcctcttcacaccaaagcacgggaggcgaagaagaggacaaggggcggaaggctgcaaaccctagcgctgggtcgaagcaacgtcgtgcgccagccacaggcgccagacccgcgcgcacctgcattcgcgattcctttaccttcacgccgcggcaactccgcattgtgttgtgccgtgctttgtgccaggacggggatccatggcgttgtcggcgcgacgaggctcgtggtggtagggccgcgcgggtgccggatccgggagacgcggcatggcgctcttccgcaagttcttctaccgcaagccgcccgatgggctccttgagatcaccgaacgcgtctatgtgttcgattcttgcttcacaactgatgtcttcgatgatgataaataccgggattatattggtgacattgttgcacaacttcagagccacttcgctgatgcttcatttatggtcttcaactttcgggatggagacagtcaaagtttactggcgaatatattatcaagttatgatatggtagttatggactaccccagacaatacgagggatgccctctccttacaatagaaatgattcatcattacttgaggtcaggggagagttggctctctctgggccagcaaaatgtcctaataatgcattgtgagcgtggtggctgggctgtacttgcattcatgttagcaggactgctgttgtatagaaagcagttcattggtgagcagaggacactggaaatgatttacaggcaagctcctcatgaactggttcagttgtggtcaccattgaatcctatgccttctcagataagatacttacattacatatctcggaggaacgtgagttcagagtggccacctcaggaccgggcccttactttagactgtgttatactaagaaacattccaggcttcaatgaagagggaggatgtagaccaatattccgtatttatggacaggatcctttacctgctacaaataacacacctaaggtgctgtttgcaacaccaaaaaggagcaaatatgttaggctttacaagaaggcagactgtgaactgattaagattgacatccattgccatattcaaggtgatgttgtccttgaatgcattagcattgatgttgatcaagaacgagaagagatgatgttccgagtcatgttcaatacagcctttatcagatctaacattctgatgttaaaccgtgatgaaatcgatatattgtgggatgccaaagatcgattcccgaaggaattcagagctgaggttcttctttcagaaatggacactgccaatcagttaggtcccatggaggtggcaggtataggagagaaggggggtttaccagttgaagcatttgcaaaggttcaagagatgttcagcaatgtggactggctagatccaactggggatgctgcagtccagcttttccagcgacttacttcatcagaaaatattcagctgaggcaaggattcttgtccccaagtaagaaagaagcagaatcgttagagcttggttcaatctctccaatagacaagcattttgacaatgttcaacaagaaccaagcaaagttgaacaccccacagtctatgtgaacaaactggaaaatgttggccaagagagattggtcttgttggagcaaaccactaattctgaagttaaaactggaatttctgttgtccaagaaaatcctggctctctagttcacaaggttgacagtaacgcaaaacagtcaatttcactggaaaaggctgttccctctaccatgaaatctattgatccagttcttaaggatcaaaatgctaaacttgatgagcaacatggttcaggccaacactcttttcccactataattatgtcacagcgatttccaatttctagttcatgccctgctctttctggctactccagtcctagattactttcagcttgtccaagatttaatagtgcaccttcagcccttggaattacagctctgttggaagaccatgctggaagtgctgagaatcgttgtggttcaactactttgacctttgacacaacaggtactcctgttgtaacaaagggtatgccactgctacgccctccaccatcgccactagatttgctggtatcagattctactatgatgtcagaagcaaaaggctcatcccaacctaccctcaacaattcaggccttccatctcatccagagagacaattgacatttcagtcacttggaactactactccggccacaaatcatcagaaatcctcaactactgtcacaattgaattgttgccaacttctgctccacccccacccccactgcccccaccatcatcagttttcagttctaggatttatcatctgcctccatctccaacttctttcagatctccagcgccagctgcaccacaacctccacctgtgccacccccacctccacctatgcctaggccttttcctgtaaggtctcatgcaccacaaccgctgaccccccaaccacctgctttgagttcatctcttatactgtcagggacacctcaatccccaccttccccaccgccttctaggtgctctctcagtaaacctcctgcaccaccaccaccaccaccaccacctccactacttgcttctacttcatctaccattagacctgctgcatcacatctgcctctatttgcatctacttcatctcctgttaggcctgctgcaccccctccaccgcctgccccaacatcatcacctattagagcttcagcattgcctccacctccaccacctggaacgagctccagtccacgtccaccccctccaccatgctattcatcaaaacaatcatccagccccatgggcaaatcgatgccatcacctcctgttccgccaccaccctcccatggaggacgcaatggagcttctggtaacattgtacccccgccagcaccccctggcagtaatgctaaactgtttggtcctcaggggcgtggacctgcacctccttcaggtccaatgtcaaagagctttcaatctggccaggctgtgttgagaaggtctaatttgaagccacttcattgggtgaaagtaacaagagcaatgcatggtagtctgtgggcggagtcacagaagcctgacgaaactttaaaagctcctgtgtttgatatgtcagaattagaaaatcttttctcagctgcactgccaagttcagattcaaggcgttcagataagtcaggcagtcgtgcatctgggtcgaaaccagagaaaattcatcttattgatcttcgccgggctaacaattgtggaatcatgcttaccaaagtcaaaatgccactgcctgacctaatgagtgcaattctggctctggatgatactgttctggatgctgaccaggtggagaaccttattaagttcactccaactaaagatgaaattgaacttctaaagggttacaaaggagacaagcaagttcttggagaatgtgagcagttctttatggagcttatgaaattaccacgtgtagaatctaagctgagagttttctcatttaagattcaattccgttcccaggtttctgaccttaagcggaacctgaacattgttaattcttcagcagaagagatacgaggttcagtcaagttgaaaaggattatgcagacaattctttctctcggaaatgcattgaaccaaggcactgctagaggttctgctgttggtttcaggttggatagcttgcttaaacttagtgacacccgtgctcgtaacaataagatgactttaatgcactatttatctaagcatattcatcttgctttcgaaagagaagctgcaa

SEQ ID NO: 1972 - DNA, 4020 bp, Zea Mays
atctcgcccaatctagctcactccgaaagatcaaacgccccacctaaaacaccattaaagaaacgcgcacagacacaaaaaaaaaactctctccgttcctcttcacaccaaagcacgggaggcgaagaagaggacaaggggcggaaggctgcaaaccctagcgctgggtcgaagcaacgtcgtgcgccagccacaggcgccagacccgcgcgcacctgcattcgcgattcctttaccttcacgccgcggcaactccgcattgtgttgtgccgtgctttgtgccaggacggggatccatggcgttgtcggcgcgacgaggctcgtggtggtagggccgcgcgggtgccggatccgggagacgcggcatggcgctcttccgcaagttcttctaccgcaagccgcccgatgggctccttgagatcaccgaacgcgtctatgtgttcgattcttgcttcacaactgatgtcttcgatgatgataaataccgggattatattggtgacattgttgcacaacttcagagccacttcgctgatgcttcatttatggtcttcaactttcgggatggagacagtcaaagtttactggcgaatatattatcaagttatgatatggtagttatggactaccccagacaatacgagggatgccctctccttacaatagaaatgattcatcattacttgaggtcaggggagagttggctctctctgggccagcaaaatgtcctaataatgcattgtgagcgtggtggctgggctgtacttgcattcatgttagcaggactgctgttgtatagaaagcagttcattggtgagcagaggacactggaaatgatttacaggcaagctcctcatgaactggttcagttgtggtcaccattgaatcctatgccttctcagataagatacttacattacatatctcggaggaacgtgagttcagagtggccacctcaggaccgggcccttactttagactgtgttatactaagaaacattccaggcttcaatgaagagggaggatgtagaccaatattccgtatttatggacaggatcctttacctgctacaaataacacacctaaggtgctgtttgcaacaccaaaaaggagcaaatatgttaggctttacaagaaggcagactgtgaactgattaagattgacatccattgccatattcaaggtgatgttgtccttgaatgcattagcattgatgttgatcaagaacgagaagagatgatgttccgagtcatgttcaatacagcctttatcagatctaacattctgatgttaaaccgtgatgaaatcgatatattgtgggatgccaaagatcgattcccgaaggaattcagagctgaggttcttctttcagaaatggacactgccaatcagttaggtcccatggaggtggcaggtataggagagaaggggggtttaccagttgaagcatttgcaaaggttcaagagatgttcagcaatgtggactggctagatccaactggggatgctgcagtccagcttttccagcgacttacttcatcagaaaatattcagctgaggcaaggattcttgtccccaagtaagaaagaagcagaatcgttagagcttggttcaatctctccaatagacaagcattttgacaatgttcaacaagaaccaagcaaagttgaacaccccacagtctatgtgaacaaactggaaaatgttggccaagagagattggtcttgttggagcaaaccactaattctgaagttaaaactggaatttctgttgtccaagaaaatcctggctctctagttcacaaggttgacagtaacgcaaaacagtcaatttcactggaaaaggctgttccctctaccatgaaatctattgatccagttcttaaggatcaaaatgctaaacttgatgagcaacatggttcaggccaacactcttttcccactataattatgtcacagcgatttccaatttctagttcatgccctgctctttctggctactccagtcctagattactttcagcttgtccaagatttaatagtgcaccttcagcccttggaattacagctctgttggaagaccatgctggaagtgctgagaatcgttgtggttcaactactttgacctttgacacaacaggtactcctgttgtaacaaagggtatgccactgctacgccctccaccatcgccactagatttgctggtatcagattctactatgatgtcagaagcaaaaggctcatcccaacctaccctcaacaattcaggccttccatctcatccagagagacaattgacatttcagtcacttggaactactactccggccacaaatcatcagaaatcctcaactactgtcacaattgaattgttgccaacttctgctccacccccacccccactgcccccaccatcatcagttttcagttctaggatttatcatctgcctccatctccaacttctttcagatctccagcgccagctgcaccacaacctccacctgtgccacccccacctccacctatgcctaggccttttcctgtaaggtctcatgcaccacaaccgctgaccccccaaccacctgctttgagttcatctcttatactgtcagggacacctcaatccccaccttccccaccgccttctaggtgctctctcagtaaacctcctgcaccaccaccaccaccaccaccacctccactacttgcttctacttcatctaccattagacctgctgcatcacatctgcctctatttgcatctacttcatctcctgttaggcctgctgcaccccctccaccgcctgccccaacatcatcacctattagagcttcagcattgcctccacctccaccacctggaacgagctccagtccacgtccaccccctccaccatgctattcatcaaaacaatcatccagccccatgggcaaatcgatgccatcacctcctgttccgccaccaccctcccatggaggacgcaatggagcttctggtaacattgtacccccgccagcaccccctggcagtaatgctaaactgtttggtcctcaggggcgtggacctgcacctccttcaggtccaatgtcaaagagctttcaatctggccaggctgtgttgagaaggtctaatttgaagccacttcattgggtgaaagtaacaagagcaatgcatggtagtctgtgggcggagtcacagaagcctgacgaaactttaaaagctcctgtgtttgatatgtcagaattagaaaatcttttctcagctgcactgccaagttcagattcaaggcgttcagataagtcaggcagtcgtgcatctgggtcgaaaccagagaaaattcatcttattgatcttcgccgggctaacaattgtggaatcatgcttaccaaagtcaaaatgccactgcctgacctaatgagtgcaattctggctctggatgatactgttctggatgctgaccaggtggagaaccttattaagttcactccaactaaagatgaaattgaacttctaaagggttacaaaggagacaagcaagttcttggagaatgtgagcagttctttatggagcttatgaaattaccacgtgtagaatctaagctgagagttttctcatttaagattcaattccgttcccaggtttctgaccttaagcggaacctgaacattgttaattcttcagcagaagagatacgaggttcagtcaagttgaaaaggattatgcagacaattctttctctcggaaatgcattgaaccaaggcactgctagaggtgctttctgagaaacttccagaacttctagatttcccgaaagacttgtctagcttagagctggcagcaaagatacaattgaagtctttagcagaggaaatgcaggctgtcaacaaaggactcgagaaagttgagcaagagcttactacatctgaaaatgatggtcctgtgtcagagatcttccgcaaggcactctgatttggggagacaagctcattcagatgaccagcaagcctattggcc

SEQ ID NO: 1973 - DNA, 568 bp, Zea Mays
cggaagcttgcgaggtaggagtacgcttgggcttggaggcctggagcctcagggtttaccaattaagggtggttggtgtaggggatcaaaatactaatcagcatcaaccatttttttcgatgtgccaaccacttcgcactgttagctactcgaattcgtgggatgggacttgtgttgctgctgccaatgaaaatgaccacactggcatatctggtacattggacagggaagacgattcatgttcacgacattcaatcaataaggaagtcagtttggtgcaaggtgttatgaaaatggaacaatcaatggtacaaagcattcagtttgtcagtttttatctgcaaaatcatctcaggaacttcatgtatatatacctgttccgttctcttttacaacaacaacaacaacaacaacaacaacaacaacaaagccttttgtcccaagcacgttggggtaggctagagatgaaaccccgtatgaaaacctcagagctcaacccccaaagaaaaaaaggggaaacaaaggcaaaggagaaccgaaaacgacgaaacgggggaacacataaaag

SEQ ID NO: 1974 - DNA, 1609 bp, Zea Mays
cacacacttcatcgtggagatatggtggggaacaatactgttgcttccctcttctactattctttgctcatcatctgcgccgctgcttggcacgcggatgcgtcccaagcggatcgactgagagaattcatcaggtctaggaggaacagtcctagtgaggctgctgataagggcacgtttgaggttgccaacatagggcacagcgtagctagcagcctcctgagcacaagcagctactccgacagtgaacagagcgccctgaaggcagctgacaagatcactgcgctgccggggcaaccggacggcggcgtcgacttcgaccagtacgccggggcccggatgctcatcgcttggctacggagcaatgcaagagctcggtccgttccgcgtaaacagcgacaacaaaacgctgagcagaaacaaggcggcttggaataacgtggctaatgtgatcttcttggagtcgccggcgggtgttggattctcctactccaacacatcctccgactacggcctcagcggagaccgaaggacagctgctgatgcgtacttgtttttggctaactggctggagcgctttcctgaatacaaaagccgtccgttctacatctccggggagagctacgccggacactacgtacccgaacttgctgccaccatcttaacccagaattcctacaacagcaggacggccataaacctccggggcatcttggttggaaatccacttctggattcgtatatgaacttgaagggtgcagttgcctactactggagccatgggttgatgtcggacgaggtctttgacaacataaccaggcactgcaagtatgacagttcagatggtgtggcatgcagtggcgctttggaggcggtagatcctggacagattgatccttacaacgtatatgctccgatctgtgttgatgcggccaacggagcatactaccccactggctacctacctggatatgatccatgcagcgattactacacctattcctacctcaatgacccagcagtgcagaatgctttccacgctaggacgacaagttggtcagcgtgcgcgaacttgaactggacggacgcaccgatttccatggtgccaacagtcgcagggctgattgagaagaagctgcctgtttggatttttagtggcgattttgattccgtgtgcccacttcctgctacgaggttttccatccatgatcttaacctgcacgtcaccactccatggcgcccgtggacagtaaacatggaggtcggaggatatgttcaacaataccagggaggattcacgtttgcctctgtcagaggagctggtcatatggttccgtcttcccaggctgatagagcattagtattattggactcctttctgaaaggggtgctcccaccatacgtacaggagcagtaataattcctaaatatgtagagtgtcttgtcaatggcaaactcaataaaaactatccgtttttgtattacttgaattgatgttggttttgcattagctggtttgtggttataattaaaaggtccatctttccccttagggaccgtttgtatccgctcgttttagagaaattgaaatctatacttaacagaggag

SEQ ID NO: 1975 - DNA, 1529 bp, Zea Mays
ggtctatcagtcatcctggtccttttattttctttcttctctcacccggttcttcctcctcccgagtcccgaactctcgatccactcatccgctgagggcgtcggccttctggcccttctccccccggccgacctcgcccctccggcgctccgtccgcttcctgaactcgtctccctcacggacgttctcctccctccgctcgccgcgccgcaacccggagaggagaccgccgctcggtcgagcaccacctggggcccagcgtcctcgcgaccagctctagcgcggcgtccgccctctgcagccctggtgtccccgcgactggcttcggccggcacacaactccacagttaggtctccgtctgcacagcgcggcgatcttctctctccttcccgccctctgcagtccctctcagtccctctccgtctgcttgattctgctccaacctcagactaccctcgctctgaaaatgtcattacgcacccaatgcgcttgtagctgtatgctgcaaccctactctgcctcgtcttcttccatcaccctaagcatgcgcgcaacccccactcaccaacgacgggcccggccgccgccgccgtcctgcctcgccacccgccaccttcgccggcgacgagcaccagcaggaattaatagagttccaaacctcggttctgcagtttctactaaaaaagcagtcatttatgttatctgtccccgaagcagttgcagtggtgaggttgctaagaatcgagaaggggaaagcatttgtagaccttttgaacgagaaagcaaatgattctggagataaagagataggatatgtgcagaggacactaggtttcagcacacgctatttggaggacagggatataagactggttaccgtcatagttgctggaacagtgcgctggaaacgctaccttgattatctaatcatgtcactatgcagtgaggagaaggttttcagggagatggagccactgcttctacagatattgagaattggctttttcgaaattctcaagcttgatgtacctgcttatgctgccgttgatgagaatgtaaggcttgctaaagtagctttaaggcctggtgctgggaatatggtgaatgcaattctgcgtaaacttgtattgctaaaggagacagactctcttcctcttccaaagatagaaggtgatgatcgtgcccaagctcgtgctctttctataatttattctcatcctgtttggatggtgagacgatggatacggtttcatggaaaagatgaagctctaagattgatgaattggaacaacagtgatcctcatttcagtctaagggtgaacacatcaaaaggctatactagggctgaccttgtaaaacgattggaaagtttacaggttcattatgaagaatcaattatggatgaatttgttcgcattcgggaagggatgcagcaagtcttaaaagctggattactgaaagatggcatttgtgctgtgcaagatgagagtgcagggaagactgcgaactatagacccaaatgggtct

SEQ ID NO: 1976 - DNA, 1622 bp, Zea Mays
atggcctcccacggaattcatgggggagcaggatacaccttttttaaaacgacttactgggagaagcacataaaagccagattcatttttgtattacggagaaaaaaggaattaatagagttccaaacctcggttctgcagtttctactaaaaaagcagttgcagtggtgaggttgctaagaatcgagaaggggaaagcatttgtagaccttttgaacgagaaagcaaatgattctggagataaagagataggatatgtgcagaggacactaggtttcagcacacgctatttggaggacagggatataagactggttaccgtcatagttgctggaacagtgcgctggaaacgctaccttgattatctaatcatgtcactatgcagtgaggagaaggttttcagggagatggagccactgcttctacagatattgagaattggctttttcgaaattctcaagcttgatgtacctgcttatgctgccgttgatgagaatgtaaggcttgctaaagtagctttaaggcctggtgctgggaatatggtgaatgcaattctgcgtaaacttgtattgctaaaggagacagactctcttcctcttccaaagatagaaggtgatgatcgtgcccaagctcgtgctctttctataatttattctcatcctgtttggatggtgagacgatggatacggtttcatggaaaagatgaagctctaagattgatgaattggaacaacagtgatcctcatttcagtctaagggtgaacacatcaaaaggctatactagggctgaccttgtaaaacgattggaaagtttacaggttcattatgaagaatcaattatggatgaatttgttcgcattcgggaagggatgcagcaagtcttaaaagctggattactgaaagatggcatttgtgctgtgcaagatgagagtgcaggtcttgtagtgtctgtggttgatccacaacccggggaaacgattgttgattgctgtgctgcacctggtggaaagactcttttcatggcatcacggttgtcaggagaagggaagatatgggctctggacataaacaaaggtcgtttgagaatactcatggacgcagcaaagttacacggtctagatgatatgatcactgacatccatgctgatcttcgactatatgctaaggaaaccacagttaaatatgacaaagtattgttggacgctccatgctctggtctgggagtgctttccaagagggcggacttacgctggaatagacaatttgaaaatttggaagagttgatgtgtttacaagacgagcttcttgattcggcatcaatgtgagatcccttgctctgtaaaataatgcaagaaaatttgtctggaaaacatctgacgttacttgcaggttggtaaagccaggtggtatactaatttacagtacgtgttcgattgaccctgaagaaaatgaagagaggattactgcttttgttcagaggcatccggccaatatttttgcatcatacagcatacaacatagcaagtctaatcacctcccataaaacttatcttttagcttatacggtaccctcttgtaaaacgctaaatgcttgacgtcactttatataccatgctttgatt

SEQ ID NO: 1977 - DNA, 1736 bp, Zea Mays
atggcctcccacggaattcatgggggagcaggatacaccttttttaaaacgacttactgggagaagcacataaaagccagattcatttttgtattacggagaaaaaaggaattaatagagttccaaacctcggttctgcagtttctactaaaaaagcagtcatttatgttatctgtccccgaagcagttgcagtggtgaggttgctaagaatcgagaaggggaaagcatttgtagaccttttgaacgagaaagcaaatgattctggagataaagagataggatatgtgcagaggacactaggtttcagcacacgctatttggaggacagggatataagactggttaccgtcatagttgctggaacagtgcgctggaaacgctaccttgattatctaatcatgtcactatgcagtgaggagaaggttttcagggagatggagccactgcttctacagatattgagaattggctttttcgaaattctcaagcttgatgtacctgcttatgctgccgttgatgagaatgtaaggcttgctaaagtagctttaaggcctggtgctgggaatatggtgaatgcaattctgcgtaaacttgtattgctaaaggagacagactctcttcctcttccaaagatagaaggtgatgatcgtgcccaagctcgtgctctttctataatttattctcatcctgtttggatggtgagacgatggatacggtttcatggaaaagatgaagctctaagattgatgaattggaacaacagtgatcctcatttcagtctaagggtgaacacatcaaaaggctatactagggctgaccttgtaaaacgattggaaagtttacaggttcattatgaagaatcaattatggatgaatttgttcgcattcgggaagggatgcagatctctagcaataaaattgtaaaaatggatggttctatgcttctgattgctttagatgttattttgactgttataactgttggtcttgtagtgtctgtggttgatccacaacccggggaaacgattgttgattgctgtgctgcacctggtggaaagactcttttcatggcatcacggttgtcaggagaagggaagatatgggctctggacataaacaaaggtcgtttgagaatactcatggacgcagcaaagttacacggtctagatgatatgatcactgacatccatgctgatcttcgactatatgctaaggaaaccacagttaaatatgacaaagtattgttggacgctccatgctctggtctgggagtgctttccaagagggcggacttacgctggaatagacaatttgaaaatttggaagagttgatgtgtttacaagacgagcttcttgattcggcatcaatgttggtaaagccaggtggtatactaatttacagtacgtgttcgattgaccctgaagaaaatgaagagaggattactgcttttgttcagaggcatccggaatttgctcttcagagtgtatgtggatatgttcctagagaatttatcacagatgaaggtttctattcctcaaatccaactaagcactctatggatggggcatttgctgcacgtcttgtccggtcaacgcactaagattataggagttgccacaaggccacaactaggtgtgaagttgaacaaggaatcacatgtattgccctaagtgcacccagtcattgcttcaatatctttatcttatatattcttgaactttgctgcaaaaaaaa

SEQ ID NO: 1978 - DNA, 1861 bp, Zea Mays
atggcctcccacggaattcatgggggagcaggatacaccttttttaaaacgacttactgggagaagcacataaaagccagattcatttttgtattacggagaaaaaaggaattaatagagttccaaacctcggttctgcagtttctactaaaaaagcagtcatttatgttatctgtccccgaagcagttgcagtggtgaggttgctaagaatcgagaaggggaaagcatttgtagaccttttgaacgagaaagcaaatgattctggagataaagagataggatatgtgcagaggacactaggtttcagcacacgctatttggaggacagggatataagactggttaccgtcatagttgctggaacagtgcgctggaaacgctaccttgattatctaatcatgtcactatgcagtgaggagaaggttttcagggagatggagccactgcttctacagatattgagaattggctttttcgaaattctcaagcttgatgtacctgcttatgctgccgttgatgagaatgtaaggcttgctaaagtagctttaaggcctggtgctgggaatatggtgaatgcaattctgcgtaaacttgtattgctaaaggagacagactctcttcctcttccaaagatagaaggtgatgatcgtgcccaagctcgtgctctttctataatttattctcatcctgtttggatggtgagacgatggatacggtttcatggaaaagatgaagctctaagattgatgaattggaacaacagtgatcctcatttcagtctaagggtgaacacatcaaaaggctatactagggctgaccttgtaaaacgattggaaagtttacaggttcattatgaagaatcaattatggatgaatttgttcgcattcgggaagggatgcagatctctagcaataaaattgtaaaaatggatggttctatgcttctgattgctttagatgttattttgactgttataactgttggtcttgtagtgtctgtggttgatccacaacccggggaaacgattgttgattgctgtgctgcacctggtggaaagactcttttcatggcatcacggttgtcaggagaagggaagatatgggctctggacataaacaaaggtcgtttgagaatactcatggacgcagcaaagttacacggtctagatgatatgatcactgacatccatgctgatcttcgactatatgctaaggaaaccacagttaaatatgacaaagtattgttggacgctccatgctctggtctgggagtgctttccaagagggcggacttacgctggaatagacaatttgaaaatttggaagagttgatgtgtttacaagacgagcttcttgattcggcatcaatgttggtaaagccaggtggtatactaatttacagtacgtgttcgattgaccctgaagaaaatgaagagaggattactgcttttgttcagaggcatccggaatttgctcttcagagtgtatgtggatatgttcctagagaatttatcacagatgaaggtttctattcctcaaatccaactaagcactctatggatggggcatttgctgcacgtcttgtccggtcaacgcactaagattataggagttgccacaaggccacaactaggtgtgaagttgaacaaggaatcacatgtattgccctaagtgcacccagtcattgcttcaatatctttatcttatatattcttgaactttgctgcgttttcctcttacgcttcacaaaaaaaaagcatatccaaacccataccatattgcttcttgtacggcacgcagattttttgaagcgttttcgctttgtattaaagtcatctgtttagactgctcaaaaaaaaa

SEQ ID NO: 1979 - DNA, 3853 bp, Zea Mays
caaaaatatcccacccaaacaactccaccctaccgcaccccaaattcgcaatccctctccacctctcctcccaccgcagcagcaggcaagcgcgaggcggaggcggagagatggagtcggaccagggcaagctcttcatcggcggcatctcctgggaaacaacggaggagaagctgagcgagcacttctccgcctacggagaggttacgcaggccgccgtcatgcgcgacaagacgacgggccgcccccgaggcttcgggtttgtcgtcttcgccgaccccgccgtcgtcgaccgagcgctgcaggacccccacaccctcgacggccgcacggtcgatgtgaagcgggcactctcgcgggaggagcagcaggcctccaaggccgcaaaccctagcggtgggaggaacactggcggaggaaatggcggcggcgatgcaaatggtgctcggacgaagaaaatattcgtgggcgggctgccctctactctgactgaggatgggtttcggcagtatttccagaccttcggcatcgtcactgatgttgttgtcatgtatgaccagaacacgcagcgcccccgtggcttcggattcatcacctttgactcggaggacgcggttgaccacgtgctgcagaagaccttccatgatcttggtgggaagctggttgaggtgaagcgtgcattgccccgtgaggcgaaccctggtggctctggtagtgggcgttctggggtgagtgggggttaccagagcaacaatggccataacaccagctctggtagctatgatggtagaagtgatggtggcaggtacgggcaggcacagcagggtagtggtgtctatcctggctatggtgctggggcagctggatatggatatggtgctaaccctgcaattggatatggaaattatggggctggaggatatggaggtgctcctgctgcttatggtggacattatggaaacccaggtgcagctggttctggttaccaaggtggacccccaggctcaaatagaggaccttggggcagtcaagctccatctgcatatggaactggagggtatggtggcagtgctggctatagtgcttggaacaactcttctggtggtggcaatgctcccactagtcaagcccctggcggacctgcgggctatggaagccagggttttgggtatggtggatatggaggtgatccatcgtatggtagtcatgggggatatggagcttatggagcgcgaagtgatggtgctggcaatcctgctactggtggagcatctggatatggtgcagggtatggaagtgggggtgccaactctggctattcaagtgcttggagtgatccttcacaaggtggtggatttggtggttcagtcaatggaggttctgaagggcaatcaaactatggcactggctatggcagtgtgcagcccagggttgctcagtaaagaaggcattttgagtgtctgaaatgaaccagcacatctgggcagtctatgtattgatttgtcattccagttctgatttgttctcagcattctgaagattgcccatttgctggttaaatcagtatttctccgggttggaatgcttgatcctttagtggcttactactagaacttgtagtcaataagtagctataatgtggagtagcagtatcttgcagaatgcttttattaatttctacatttagctttatctatctgtgtgctttgccatgagtggagtttcaggttccttcatctctagttataagctagagtagcttgactgcttatggacaaaattatctagttgtacctctattctacagatcatacattcgtgtttgatggtagtatttatgctggatattgtacctctattctggaatgttctatatttggtggttgtattgacatatggtattatcaacattcatggtttgaaacagatgcaacccctgaaatatgcagtcatagttggcttgatgctgtagctgcttctaacattatgttcaaactgtagtgcaagtgtttatatagctggaatgctacatccttcaagttgaatgggatgacattccttttcagagatgatacccaagcaaggttatgaaatcaggcatctgaaaaaaaatgtggcagtgattttacatgacgagctggtaaaaagttgcaatattggggtgcagacagaatgcaagataccagcttgagcgtttcattgtctgaagggtcttgtgctgtgctacaagatagtgacgaagtgcaacatgctgactcgagcagtcgagctgctgtagctgggtcttgggaagggtctcggctgtgtgtctgcatactgatgatcggtgatgcttacgatataggaatgccccaatgtataggtgaacttttagtgctatagaggcttccttttgttgtcatgatgtctatgctctttaagtagctgcataacaccatgtatactcagtatagttctacacctgggtatggaagccattcgtgtttttgtttagtatgaatgccatgtaattgtacattaggttgacaattcagttgttgctaaatcacgctccactagtgaattgtgtaaatggaaagaaatgaaatgcatatatataaaactctgatcctttactgctctgatttgacactgatgggttatttgacttgttccttattactctctccggctccagtggcctctggcgttggaagcgaaggggaccggggcatcttgtggctggtgtgtatcatcttcctaccatcctaggacatctaattagtttgattagtttcttccccgttctagtggactcggttgctgcttttggctttcaccgaatcctctccaaaggtggcgctggtgctactgttccttatggtgatgattttacttctgaccatgattgttacagcggtaaggcggtcttaggatcttttaacctttaagcatggagacgactttatatacatgtaagtaaggtgaataataacaaaaaaaaaatgcatagctaagtagatagaccatatatatatcatagaacatacaagccttaatgaatagcataatttataaaatagtataattgatagttcataaaactaacaaacagtagttcataaaactaacaagtccaaaatatatagttcataattttgtaaactaacaagtccataaaagaacacaaggcaacattaaatttagattctcaacacttagggcctgtttggtttgtggctaaatgtgtcatactttgtctaatgttagttgttcgaattgaataactaatcttaggcagaaaagttaggcaaaatgtggtaactgaggtagtgaaccaaacatgtctttagatagatctgggccgcctctcttggacagctgcccctctagggctgctgccagcctaccacccatgtgccgcgtcgccgcaacaaagtgcacatatcttctccctcctcttttatgcatccatgacagggacctcacgcgctcgtgtcaaagaggaggccatggccttccgcaagaagatggcatgcttgttacggctcaaggtgcagacaaggaggctgtcaacgcacacactcgcgcccaagtaggatggcaacgcgcaatcccccgtcggggaatacctccccgtccccgcgacgattttttttccgtagggattcccacgaatacttgtggggaacatttcttctctatccctgtttttcgcgggataaatctccaaaagtgatccctatctctgtttaaattataattaaaatatgcgttatttattattaatattaaacattatcacttatacacattatcagatgtaagaaatcattatgcacacatcaaaataaatatatttgtacaattagtg

SEQ ID NO: 1980 - DNA, 270 bp, Zea Mays
atggagtccccaccccgcaaccccgcttcgtgctgtgcggcgacgcgatccttgccgaccttcgcgagccagcgccgcgccggctcatggagtgggacatctagcagccgaagaagaagttcaagaggggcggcagacgctcgttcgctgcgtaagacgatgaggacttcaaagccgactccagcgatttggatttggagctcacagaaggggctgactccagaagggctttctccagagggccccctcattgaagagcctccatctctg

SEQ ID NO: 1981 - DNA, 1528 bp, Zea Mays
gccacgcacctggtttcgtccccaaatctcactcaatccccagtcccgacacccatcctctccaccgaagtcaccaccgcatggacgacgccgcgaatcccacccctccaccatccacctccgccgcatccgcggcggccgcggcggcgcaacaccagcagctccagcgccaactcttcctaatgcagcaggcgcagtcccatccgcagcagctgtcgcagcaggccatgtcccgcttcccctccaacatcgacgctcacctccgccctctagggccgcttcgcttccaacagccccagccccagccccagccgtcccactcccagggtccatctcagtcgccgtcgcaggccacgcagcaggcgtcaccccagcagcagcagcagcaggcggcggcggcggcggcagcggcgcaggcacaagcacaggcccaggcccaggcggcacgggtacgaagccccgagatggagatggcgctgcaggacgccatgcgggtctgcaatccggacgtcaagacgcccttccagtccatcgaggacgctgtcaacaggaagaagcaacttagctagagcattgagatattgtagcaactactgaatttaataaaggttattaccttaccatgttgttgccgactatgaggctgaagaagatgacaggatccttgatagcgacacaacaggccagatcccttctcgcctgcagcaatgggaccataatattctggtgaagattgctgagttcacgacaacttttgacaagcaagtattggcatataacataatgaccaagaaaagggccatcggtgagttcaggtcggaggagcggctcatgctggagcaagccttattgcaggaggaaaagcaagctatgctgggactgagggcagagatggagtcgagagagaaagctggtcgcgaggctgccgaagtgaagatgcgtttggcaatggagcatgctcgtgctgaggcacaagctcactctgagatgatgaatcatggtcctataagggccagtgctgttgcttcgcaaggggaggatggtccgagtcatgacatggtgcaagaacatggcgaagatgggtggggaaattctcagagggatgatgaagatccatcggaggatttcctcaacgatgagaacgaacctgagaatgggaactcagatgggcaggaggactggcgcagatctggggagtttgatctcaactctaggtaaggcagttggatttccacatgaaggtttctaggtaggctacgacatgctggtattgtatctactattctattgttgtgttcggtgaagatgtctttgtggctgtaaacatggcattcgaacaattcagtttctttgtaatttgactagtaatatttacttgagcactcaatatgtgccatttccaacttggagaaaaaaaattacaataatccacctgcattgcaccaacggaactcagttttctttccttattgttagattcacctagcatggacatgtaattacacatgtacgggatcttgaattttag

SEQ ID NO: 1982 - DNA, 1799 bp, Zea Mays
cacgcacctggtttcgtccccaaatctcactcaatccccagtcccgacacccatcctctccaccgaagtcaccaccgcatggacgacgccgcgaatcccacccctccaccatccacctccgccgcatccgcggcggccgcggcggcgcaacaccagcagctccagcgccaactcttcctaatgcagcaggcgcagtcccatccgcagcagctgtcgcagcaggccatgtcccgcttcccctccaacatcgacgctcacctccgccctctagggccgcttcgcttccaacagccccagccccagccccagccgtcccactcccagggtccatctcagtcgccgtcgcaggccacgcagcaggcgtcaccccagcagcagcagcagcaggcggcggcggcggcggcagcggcgcaggcacaagcacaggcccaggcccaggcggcacgggtacgaagccccgagatggagatggcgctgcaggacgccatgcgggtctgcaatccggacgtcaagacgcccttccagtccatcgaggacgctgtcaacagtcatgcgcccgtcattttctccgcgatctccacttcgcctagtttggcgcatcactgaggaagaggagggagagggcgagtccacgcgcgcagaggagggcgaatctgcgtgaggagaggagggagaaggcgagttggcgcgcgcaagctgttcctcatcggggtgggtcagcgtgcggagaagggagaaggcgagtcggtgcatgcaagctgttcatcatcggattgctccgtcgtggtgccgacgacaacgtgcaggtgatcacgagcgtggggttgctgcagaccacctgccgctttgagtccgaccacctcgacctacagctgaaaggttattaccttaccatgttgttgccgactatgaggctgaagaagatgacaggatccttgatagcgacacaacaggccagatcccttctcgcctgcagcaatgggaccataatattctggtgaagattgctgagttcacgacaacttttgacaagcaagtattggcatataacataatgaccaagaaaagggccatcggtgagttcaggtcggaggagcggctcatgctggagcaagccttattgcaggaggaaaagcaagctatgctgggactgagggcagagatggagtcgagagagaaagctggtcgcgaggctgccgaagtgaagatgcgtttggcaatggagcatgctcgtgctgaggcacaagctcactctgagatgatgaatcatggtcctataagggccagtgctgttgcttcgcaaggggaggatggtccgagtcatgacatggtgcaagaacatggcgaagatgggtggggaaattctcagagggatgatgaagatccatcggaggatttcctcaacgatgagaacgaacctgagaatgggaactcagatgggcaggaggactggcgcagatctggggagtttgatctcaactctaggtaaggcagttggatttccacatgaaggtttctaggtaggctacgacatgctggtattgtatctactattctattgttgtgttcggtgaagatgtctttgtggctgtaaacatggcattcgaacaattcagtttctttgtaatttgactagtaatatttacttgagcactcaatatgtgccatttccaacttggagaaaaaaaattacaataatccacctgcattgcaccaacggaactcagttttctttccttattgttagattcacctagcatggacatgtaattacacatgtacgggatcttgaattttag

SEQ ID NO: 1983 - DNA, 2570 bp, Zea Mays
tccgctttgtctcagcctctctcttccgtactgcttctcctctacctccgtcgccagccagccactacctcgattcgctcccctccggccctcctgtcgcgcgcgctctgcctcactggcgccacggtcgcccgcgccggcaggctcgagtccctcgacgccatcgcctagattgtctactagctggcccccgctcgccgcgaggtggtgcttgcggaggtggcggcgatcgtgcctgcatggtgctcgacaaaaaggtgctctacgagacgacatctgcttccgcgcgcacaagctcaccatgcgcagcttcggtgacgtttagccacgtcatctccgccaccatgagcggcgtcacctgctgcctttgcttctccgatatgggacgccaagaacatgatgtgcatcgtggacccgcgccacggttgctacctgacggcgtccgccatgttctgcgacaagatgagcaacagggaggtggacgagcagatgcttaacgtgccaaacaatgactcctacttcgtggactcgatctccaacaacgttcagtccacggatgtgcctcttttgagagtgaattatacttttactcaattaggatattgtgtttctttggatctttgtttgattaatgatttttttggatgagagtgtggctacaggatgaagcaatgcattttttgatggaacacacatgtgcagtatacaaatggaccatcaggttgcgggtaccctttgttctaagttgttgagtgagcagaatgaaggctagaagtagaagctacactggccggtttcaggtcgcgttgtctttttgtatcattcttgtccaaaagcatgggcaaccagtgacatccatctccatgatctatccacaaaacaaacaatggcgaagcagactgagagctacgagctgcacaaactgcggccccaggtggatgacctgttcaaggagttcgacgccctggtcgacagacctctggatgagagggaggacctggctgcaatcttcaaggtcctcgaagagatcagggacaagatcaagatcaaacacggtggcaagaaagtagacgacgacgagctccttccgcggagcaagaggggggacctggccaacctgctccccctcatcaggactgcactggagctacgcagcaagccgccgccgccgcctgtgcagcaggacgccacgggcggtgcccacgacagcaagccgaccggctgcatcccctgcaagccccggccgtcgcagcagcacaaggaagaaaaagaaggcagcaaggaagtcgtgtcactcaagctgctgctccggctgacccagaacgtgctggagccggagcagtactacgagtggacgaccagctacgtggacgaggagaggatctacgggtgggacaaggaggccggcgaggtgatcgacgccctcgtggccgccgccgacggctcgggggcgcggatgttccgggccgcgggcatcgcgggcatccacggcagcggcaagacggcgctggcgcggaaggtgttcgtgcacgacaaggccaaggacaacttcgcgctccgcctgtgggtgtgcgtcggcccgccggactcggaggaccgcttcaacctcctctaccggatgctcgacaacctcggcctcgacaccgacaaggtcgaggaggtcgtcgacaagtccagcgtcgtcagagacgccaggggcagaacggaggcggagctccggaaggccgcagccagacctgccgagcagaagaaggcgagggcagcgtcgtcgtcaccgaggccggcgccggtggagatgccaacaggcaggcaaaggacgaggagctgctcaaggagaaggtagagaacagccgcgccgtcgagaaatccaaaatcggagtgctgctctacatcctcaacatggtcctgtccaagacgtcgtacatgatcgtgttcgacgacatccgggcgtaccgccacgacgacgacgacgcacagggatgctggtacagcaacctcacgctgctgccgccggcggagggcgagtggggggaccgcctcgcctacggcctgcccaagacgaaacacaggggcgccgtgctggtgacctgccgcaaggaagacgacgccaagaccatggcgcgcacgggcctcgtggtccgcccgcccaagctcgaaggtgatgacgcctggaagctcttcagaagagagtacgaccaggccaaggacgacaagcgcaacaaggacggcggcggcaaagaaggcagcaagggggaggaggaggacctgctcctcaagcagctgcaggagatgaagaaggagatcgtgggcaagtgcctcggcctgccggtggccatcatcgaggcggctaggggcttcgccgacctcgagcccttgccggatgatactagtcccctcaaaccggtgaccagcaaggacattgacaaggacaagcagctgtctcaagcaaataagtaacagattagttgaattcgtgctgtgtaatgcttctgcgttgctttggctctcttctaataaaatttaattatgggctataaaagtcaaaaattttaatttgaaatataacaaat

SEQ ID NO: 1984 - DNA, 2584 bp, Zea Mays
tccgctttgtctcagcctctctcttccgtactgcttctcctctacctccgtcgccagccagccactacctcgattcgctcccctccggccctcctgtcgcgcgcgctctgcctcactggcgccacggtcgcccgcgccggcaggctcgagtccctcgacgccatcgcctagattgtctactagctggcccccgctcgccgcgaggtggtgcttgcggaggtggcggcgatcgtgcctgcatggtgctcgacaaaaaggtgctctacgagacgacatctgcttccgcgcgcacaagctcaccatgcgcagcttcggtgacgtttagccacgtcatctccgccaccatgagcggcgtcacctgctgcctttgcttctccgatatgggacgccaagaacatgatgtgcatcgtggacccgcgccacggttgctacctgacggcgtccgccatgttctgcgacaagatgagcaacagggaggtggacgagcagatgcttaacgtgccaaacaatgactcctacttcgtggactcgatctccaacaacgttcagtccacggatgtgcctcttttgagagtgaattatacttttactcaattaggatattgtgtttctttggatctttgtttgattaatgatttttttggatgagagtgtggctacaggatgaagcaatgcattttttgatggaacacacatgtgcagtatacaaatggaccatcaggttgcgggtaccctttgttctaagttgttgagtgagcagaatgaaggctagaagtagaagctacactggccggtttcaggtcgcgttgtctttttgtatcattcttgtccaaaagctatataaaagaagcatgggcaaccagtgacatccatctccatgatctatccacaaaacaaacaatggcgaagcagactgagagctacgagctgcacaaactgcggccccaggtggatgacctgttcaaggagttcgacgccctggtcgacagacctctggatgagagggaggacctggctgcaatcttcaaggtcctcgaagagatcagggacaagatcaagatcaaacacggtggcaagaaagtagacgacgacgagctccttccgcggagcaagaggggggacctggccaacctgctccccctcatcaggactgcactggagctacgcagcaagccgccgccgccgcctgtgcagcaggacgccacgggcggtgcccacgacagcaagccgaccggctgcatcccctgcaagccccggccgtcgcagcagcacaaggaagaaaaagaaggcagcaaggaagtcgtgtcactcaagctgctgctccggctgacccagaacgtgctggagccggagcagtactacgagtggacgaccagctacgtggacgaggagaggatctacgggtgggacaaggaggccggcgaggtgatcgacgccctcgtggccgccgccgacggctcgggggcgcggatgttccgggccgcgggcatcgcgggcatccacggcagcggcaagacggcgctggcgcggaaggtgttcgtgcacgacaaggccaaggacaacttcgcgctccgcctgtgggtgtgcgtcggcccgccggactcggaggaccgcttcaacctcctctaccggatgctcgacaacctcggcctcgacaccgacaaggtcgaggaggtcgtcgacaagtccagcgtcgtcagagacgccaggggcagaacggaggcggagctccggaaggccgcagccagacctgccgagcagaagaaggcgagggcagcgtcgtcgtcaccgaggccggcgccggtggagatgccaacaggcaggcaaaggacgaggagctgctcaaggagaaggtagagaacagccgcgccgtcgagaaatccaaaatcggagtgctgctctacatcctcaacatggtcctgtccaagacgtcgtacatgatcgtgttcgacgacatccgggcgtaccgccacgacgacgacgacgcacagggatgctggtacagcaacctcacgctgctgccgccggcggagggcgagtggggggaccgcctcgcctacggcctgcccaagacgaaacacaggggcgccgtgctggtgacctgccgcaaggaagacgacgccaagaccatggcgcgcacgggcctcgtggtccgcccgcccaagctcgaaggtgatgacgcctggaagctcttcagaagagagtacgaccaggccaaggacgacaagcgcaacaaggacggcggcggcaaagaaggcagcaagggggaggaggaggacctgctcctcaagcagctgcaggagatgaagaaggagatcgtgggcaagtgcctcggcctgccggtggccatcatcgaggcggctaggggcttcgccgacctcgagcccttgccggatgatactagtcccctcaaaccggtgaccagcaaggacattgacaaggacaagcagctgtctcaagcaaataagtaacagattagttgaattcgtgctgtgtaatgcttctgcgttgctttggctctcttctaataaaatttaattatgggctataaaagtcaaaaattttaatttgaaatataacaaat

SEQ ID NO: 1985 - DNA, 1120 bp, Zea Mays
tttgtgtatcttattgatattttccattggtgaagcctatctattgcaattagtgtaataattgttagaatggatgcactaactaattcaaaccaaaagaaagtaaaggacagttggagaattgtcaaccaccgggatatcattccaacagtgccacgtcttatgggctattgccatgtggaagcaccagtttatcttaaatttggggacgcaaaagatgcaccggtaaataacagcattctagatgatgaagaccaaggtgacgtgataggggagtacacacctgatgttcttgttactgaatttatgaaaggcgagaagcaacttgtggaaaaactactgcaaacagaaataaatttactccgctcaatcagggatggttcggctcttatgcagcacatggaagacttctactatgtcacccttcttgaggtttttgagaactatttctgcttttctcataccaaattgtgtcaaaagctcctcaagaatgtgagatcaagttatcaagtggcagatactgccaatgatgaataccaattgacagcgtgatcctagtaaaactgcacagctgaacatcatggactgtgtttccctgcaaaaacttcatttctgaaggacactgaatggggctatgaaagtgtgcaatccttactcttagtggaaacatgaacaggcagaacagccttggacctcagtcaggatagaggaaatgaaactggtttcactggcggatatacttgtagcaccgtgtcaattggtagatatgttgtttgagctattttccgttgatgtagctagcacactttggaatatattgtatgatgtttgaaattctagaaaagttcatagacacctgggagaataactcaagaaatatccaagtccgttttggccaatattttttttcatggagaaacttgcacaccgtggtaggctaccggctacccaagggctgatagggtgtgttaatcgagtgtacgacctagataaaaatgttcaatgtgatggaactatatatcttgcatggaataaagtagcatcatgtaatttcggcattttttcttgaacatgcatgtgaaccgcgtcattatattaagatagaataagttatctggca

SEQ ID NO: 1986 - DNA, 1717 bp, Zea Mays
cctgcgtctaaggattgtgtttctctagaaattgacggaagtatttggctagatgggtctcatgggtggaattgtcgccacttgttgggaggcacttgaggcccatgatggggcgagcaaagggaagtacaccattgggcttgggcaagattgcatggccttttgcagcgaggtggaggatgtcatctcaatgagtttgacggttgtcaattctctgctgaaaaaatacaagattgatcccaagttaatcggtcgcttggaggttggaagtgaaacagttatagacaaaagtaaatccatcaaaacttggctgatgcagatctttgaggaaagtggtaacagtgacattgaaggtgttgactccagcaatgcatgttatggcgggacagcagccctactgaattgtgtgaattgggtcgaaagtaattcctgggatggccgttatggtcttgtcgtttgcacggatagcgcggtttatgccgaagggccagctcgtccaacaggaggtgctgctgctatagcaatgctcattggtcctaatgctccaatttccttcgagagcaaatatagagcttctcacatggctcatgtctatgatttctacaaacctgatcttgcaagtgaatatccggttgttgatggtaaactatcccaaacatgctacctaatggctctagactcatgctacagacagttctgcaacaagtatgagaagattgcgggtaaacaattctcaatttgtgatgcagaatattttgtgttccattctccatacaacaagctcgtgcagaagagtttcgctcgactttattacaatgactttttgcgcaactgcagctctgttgatgatgatgctaaagagaagctccagtctttttcaaatttgactggtgaagagagctaccagagtcgcgacttggaaaaggcctcacaacaggtcgcgaagcacctccatgacatcaaagttcagccatcgactctgcttccgaaacaaattggtaacatgtatactgcatccctttatgctgcattagcatctgtgctatataacaagcatgatagtctgaatgggcaaagaattgtgatgttctcttacggcagtggtttgacatccactatgttttcattgaggctaaacaatggccagcatcccttcagcctatcaaacattgcttcagttcttgatgtcaccgagaagcttcagtcaagacatgagactttgcctgagaaattcgttgagacactgaagctgatggaacaccgatacggcgcaaaggacttcgagacgagcagagacacgagcctactgcagccgggcacattctacctcaccaaggtcgactccatgtaccggaggttctattcccagaagctgtccgaggaaacaggcggcgggaaaaccaagtgctgcaacggcctcgcaaatggccactagtggtcgcccagcactgttgctcatcattctcagtattttgataatgctcatggttagcgtttagtctagcgtgtttctgaaataatataattgttctttgaagctgtcccaccccacctagatcagctagttttttattttaatattttattcttctgaacattgaaattcatcagtctctacattgtttctctttgtttcttcttttagtactctcttcgttccaaattctaaattacgtacataatgtttgctatgtctaatagtaaaaaaaaagtcaac

SEQ ID NO: 1987 - DNA, 1990 bp, Zea Mays
caagaataggcgtttgtcgtgtctcgtgcccgtgcctgtgaacctctcacgtgccgtgccggaatctcgcagccatcgatcgatccagcagatgtgccagccgccgcggccgcgccaagcccaagccgagctgacgatcctgatgcggttgaaaatttccacgaacatatagatcctcatcgtcgaccccatccgtggtgctcccggtgcgccaggctaccagagtccgacgcagacgtagctcccggccacagcagagcccacgccttgagcccttgacgcgctccgtgtgagtggagcgtacgggcgccggccggcggccagagaggaaacggatctaggaggctcagctgagtcgaggagatggaccgcaaagatgtcgggatcctcgccatggacatctacttcccgccctcctgcgtgcagcaggaggcacttgaggcccatgatggggcgagcaaagggaagtacaccattgggcttgggcaagattgcatggccttttgcagcgaggtggaggatgtcatctcaatgagtttgacggttgtcaattctctgctgaaaaaatacaagattgatcccaagttaatcggtcgcttggaggttggaagtgaaacagttatagacaaaagtaaatccatcaaaacttggctgatgcagatctttgaggaaagtggtaacagtgacattgaaggtgttgactccagcaatgcatgttatggcgggacagcagccctactgaattgtgtgaattgggtcgaaagtaattcctgggatggccgttatggtcttgtcgtttgcacggatagcgcggtttatgccgaagggccagctcgtccaacaggaggtgctgctgctatagcaatgctcattggtcctaatgctccaatttccttcgagagcaaatatagagcttctcacatggctcatgtctatgatttctacaaacctgatcttgcaagtgaatatccggttgttgatggtaaactatcccaaacatgctacctaatggctctagactcatgctacagacagttctgcaacaagtatgagaagattgcgggtaaacaattctcaatttgtgatgcagaatattttgtgttccattctccatacaacaagctcgtgcagaagagtttcgctcgactttattacaatgactttttgcgcaactgcagctctgttgatgatgatgctaaagagaagctccagtctttttcaaatttgactggtgaagagagctaccagagtcgcgacttggaaaaggcctcacaacaggtcgcgaagcacctccatgacatcaaagttcagccatcgactctgcttccgaaacaaattgaatgggcaaagaattgtgatgttctcttacggcagtggtttgacatccactatgttttcattgaggctaaacaatggccagcatcccttcagcctatcaaacattgcttcagttcttgatgtcaccgagaagcttcagtcaagacatgagactttgcctgagaaattcgttgagacactgaagctgatggaacaccgatacggcgcaaaggacttcgagacgagcagagacacgagcctactgcagccgggcacattctacctcaccaaggtcgactccatgtaccggaggttctattcccagaagctgtccgaggaaacaggcggcgggaaaaccaagtgctgcaacggcctcgcaaatggccactagtggtcgcccagcactgttgctcatcattctcagtattttgataatgctcatggttagcgtttagtctagcgtgtttctgaaataatataattgttctttgaagctgtcccaccccacctagatcagctagttttttattttaatattttattcttctgaacattgaaattcatcagtctctacattgtttctctttgtttcttcttttagtactctcttcgttccaaattctaaattacgtacataatgtttgctatgtctaatagtaaaaaaaaagtcaac

SEQ ID NO: 1988 - DNA, 1997 bp, Zea Mays
cagcgtttcgcttcacccgaaaaaattccccaaggatgaagtgacggacaggggaagtagagctcaaatctcaggcaaacgacagggtcactcacaagtcacaactcacaaatactcttctcatttcctctcggttctgctcggtggcaacccagcgcgtagatcttgttcttggacgagaattctcctcaagttctcggatttctgtttttgtgccgcttagcaattcaaccccgaaattgttttgcggcgcagtcttcacccgaatcttgggtcgtagccaagaagatgaacaaggataaggctccgatgccgggagacggcgaccccagcgacggcttgccgccgcagtccacgcgccgtgccggggcgccgccctcgtcgtctaccccgccgcgggagtacgacatcagccgcatgccggactttcctacccggagcaccggccaccggcgtgcgcactccgagatcctgggcctccccgacgacctcgacctcagcgcccctggaggcggcgacggaccgtcgctgtcggacgagaacgacgaggagctcttctctatgttccttgatgtggacaagctgaactcatcgtgcggggcgtcgtcggaggccgaggctgagtcctcgtccgttgcggatggcgtcggtgagggggctgagctgggccacgcgcccaggccaaggcatcagcatagccagtccatggatgagtccatgtcgatcaaggcggaacaactggtgggggcgccggggatggaggggatgtcgtctgcagaggccaagaaagcagtctctgcggcgaaactggctgagcttgctcttgttgacccaaagagggctaaaagggtagtcggtggtctatccaaaacaccccctaggtccgctcctggatggatatgggctaatagacaatctgctgcaagatcaaaggaaaggaagatgcgatatatttctgaacttgagcgcaaggtgcaaaccctgcaaacagaagccacaacattgtcagctcagctaacattgctgcagttgagtagtttatgtaaaaagggatagacccagtgctggaggctcccacatgagttaggtctggagaagggaaaaactgaggcaagtcttcccctcgcaaatgcgaagagactgcttcgaactcgtgacctggtgactcaagagacaccactgggctaacgaccgagaacagtgagctgaagattcgcctgcagaccatggaacagcaagtccacttacaagatgctttgaacgacacactgaaagctgaggtccagcggctgaaggtggcaacagggcaggggccggccaatggtggtggaggcatgatgatgaactttggcgccgtgccacgcgcgtttggaggaggcaaccagcagacgttccacagcagccagagccaagcgatgcaatccatgctggcgacgcaccagctgcagcagctccagctccactcccagcctcagcagcagctgcaggcgcagcatctccagcaggtggcgagagacctcaaaatgaaagggcatctgggcgcccaaggccagtggggcggtgggaagtctgggagcagcggcagctgaggctactactggcactggagttttggtgtatgtggttactggttagctaggagtggagatccccttgttctaggggggggggggggggggggtgctgccgtgcatgtgtagttaccgttagctcgggctatctatctacaggctcagttcagcttcagttttactgttaactcggtggctcagctctcctgcagcgtactgtgtccagaaactcggatggtaacaggtgttttatctgtcggaatctgtctgtatctcttcgctagtttaaagggtaaaaatggttgggatttcagggcttcaaatgaaatctcccgtattgagcaagagtgtgtagttggatgtacaaaaagggatggaaaaaggcaacgtttgatgagagtcacggagtaattttttatggcggcg

SEQ ID NO: 1989 - DNA, 1782 bp, Zea Mays
atactatccataagaagcaccatatggatacccacacgagtatgcaggaagcttccgcccgggacatctttctatggtactggagaagcgagtggcacacttgaacggactgggaaacgagttttcacatggaacacagatgcatggggttacgggccaggaaccacttcattgtatcagtcacacccttgggttttggctatcctccctgatggaaaagcattgggtgtccttgctgataccactcgacgttgtgaaattgatttgaggcaaaaatcgactataaagttctctgccccatctgcctaccctgtcatcacgtttggaccatttaatgctccagctgatgttatgacatctttatcgcatgcaatcggtactgtgtccatgccgccaaagtggtcggttggttatcatcaatgtcgttacagttatgattcttctgagaaagtactcaaggttgttagaacatttagggagaaaggaattccttgtgatgttgtctggatggatattgactatatggatggttttaggtgcttcacgtttgatagtatccgattcccagatccaaaatcactggtggacgatcttcattccattggttgcaaagcagtctggatgcttgatccaggcatcaagaaggagaagggtttcttcgtttttgatagtggctcaaaaaatgatgtttgggttcaaaaggcagatggcagcccgttcgttggaggatatgtctcatacagtttacattcaggggaggtgtggcctggtgattgtgttttccctgattttacatctgaaaaggcacgagcttggtgggctagtttggtaaaggacttcatctccaatggtgttgatggaatatggaatgatatgaatgaacctgctgtttctaaaactgtcacaaagacaatgcctgaaagcaatatccataggggagatgctgatattggtggtgttcaaaatcattcatactatcacaatgtctatggaatgctaatgacaagatctacttataaaggaatggaaatggccaatgcagctaaaaggccatttgttcttacacgagctggttttataggaagccagcgttatgctgcaacatggactggtgataatctttcaacttgggaacatctacacatgagtctaccaatgattcttcagttgggtctcagtggtcaaccattgtcaggtcctgatattggtggttttggtggaaatgctactccaaaactttttggaagatggatgggtttgggtgcattgtttccattttcacgcggccatacagaaactggaagcatcgaccatgagccatggtcctttggtgaagagtgtgaggaagtctgtcgccttgcactactaagacggtaccggctactaccacatatctacactcttttttaccactcacatacaaagggtattccagttgctgctccagttttctttgctgatccacaagaccctgaactgaggaaagttgagacttcctttctcctcggaccactcttagtctgtgcaagcactttacctaataaaggagctcatgaatgtgcacataagttaccaaagggcatatggttgccttttgattttgctgattcacatcctgatctgccactgctgtatctacaaggtggagcaattcttcctgtaggtcttcctattaagcatgtcggtgaagcaagtttggaagatgatctgtcactaattatcgcattgaatgaaaatgccttggtaacagtaacagtaactcgtgacagcaaagcagagtag

SEQ ID NO: 1990 - DNA, 3681 bp, Zea Mays
accgtccatctccaaacaagcgagtcggttagatatttcctcaagccccagtcagccgcctcctctccctcccacagctcctgccgccgcctctccctccgtcggtatctcccacctcgcaatccactcccacctcccccctcgcccctaaaaccctagctaaacccaagccgaaagaaacaatggctctcctcgcctaagcgagctcgcgcccgccccttgctggccatggcgctccagctccgccgcttcctcccgcacggctacggccagcgacaccgcgctgtcacccacgtgctatcaccgccgccgccactcgcgatgcttcagttcgaggtgtttcagagatattcttccgcaccctggcccttgtcacctttccgcccttgtgaaatgtgtggggttgcattcaggagcaattcaacaaggaaaatgtgctcgagaaatatttttggggttgcatcacagcccaaaagtagcaccttttttactactggactctctggcaaccgtagctctgtatgtttcagagcgagggacagccgtggaattgctttaaagactaataatattgttaattcacgaccattctcaactatatacagtaaaaagctaaggtttcttattaaaaataagacttcatgcaataatctaaatgtgagaagggaagatggaagtgttgcacatagtttgttttgtagatctgagaaacgccaaagcacagttgctacgtgtagcaccattgctgacgaggcttcaacatctactagtaacagcagcaagagtgttactgattctaagactgacactgccaagatgaggcgttcaagaggaagcaaaaaagaagttgatggagttatgaaagataaggaagtacataccaagaaaaagagaatatcttctagaacttgtatagctgcaacaaagacgactgagagttctagtgcgaagcaagaaaacaagaagactgataattgtaaactgaaaaagggtactgatagtcctaaagagaaaaaagtgaataataggtcaaagtcaaaagcaaaggtttctgcttcttctgtatcttctgaagctgagatttgtatgaaatcctctatcgatggttctggtattgagaaaaagccactggtgccattgtatcctccgagagccaaatcagtcgtggttgtggaatcagccacgaaagcaaaagttattcagaattatcttggggacatgtatgaagtgttaccaagctatggtcatgtgagagatttagcaggtagatcaaaatctgtccgccctaatgatgacttcagcatggtctgggaggtgcctgctgctgcctggacacaccttaagagcattaaagttgcactgaaaggagcagaaaatttaattcttgcatctgatcctgatcgtgaaggtgaagcgattgcttggcacatcaaagaaatgcttgaacaacaaggtgcattgggctgtgatgtgactgttgcaagagttgttttccatgaaataactgagaatgcaataaaaaaggctttaatgtccccaaggaatactggacaattgcccaaaagctttatgagggtatcaatctttcctcagaagaaacaactgggttaataacatacataagaactgatgggtttcatatttctgatggagccgcagaagacatccgttcattagtcaaagaaagatacggccagaagtacgttttagaggacactaggaagtatttaaagaaggtgaaaaatgctcaagaagcccacgaagcaattaggcccaccagtataaggaggttgccatcatctttggttggaatacttgacgatgattctctaaaactgtacactctaatatggaaaaggacaatggcttgccaaatggaagcttctagaactcagatgattcaagtggatgttggcactcctgaaggagagatgatttttcattcagctgcatcaaagctagacttcaagggataccaatctgtttatgaggacactgagggagattctgtgcatgaggataactttgaggccttgtcaaaattaatggttaaggacttggtgtcccctgttaacgtgcatcttggacagcactttactaagccaccatcacgttattctgagggtgcattgattaaaaagctagaagaacttggaattggaaggccatctacttatgcatctataatgaaagtattacaggataggaagtacgtgacagcaaaaagtcgagttctacaccctgagttccgtggtcgaatggtctcggcattccttttgcaccatttctctgaggttgctgattacagctttacagctaacatggagacagagctagataatgtctctgctgggctaactgaatggaagggtcttctaaaaggctactgggaacgattcagcaaatattgtgcagatgcgagtaatctggatggcagaaaggtagagagaatgctcgaagaaaaatttggtcctatcctcttccctaatgttgacacagacaatagaatttgccctagttgttctgaaggaaccttgagattcaaagttagtaggtatggtgaaggctattttataggctgtgatcgacatccaaaatgcaagtacattgctcgctcattatcacaacaagaagatgaaaccgaacccaccgaagaatgtcaaaaaacttttacacccagattacttggtgtcatgcctgattctgatgaaaaggtttttttgaaacaaggcccatatggccactatgttcagattggagaggacaaaaagggactgtttccgaaaagggcttccctttccaaggtcaaagatatagactctgttactctagaagatgcaatcgagcttttgcaatatcccaaaattttgggaaaacatcctgaagatgattatcctgtacttataacacattctaaagttggatacaacatcaagcataggagatctctagctctagtgccaaagagtgttgacccaaagaagatgacacttgagcgtgcgctcaagctactaagcggtaaaagtgtcagacgaattggtcgaccgaaggggaaggttgaaaacaaggaacccatggaatggcattagctgcctgcactcgttacaagatcctaaacgtgtgtggtttgatagtcagtcagccttatatccatgcaaaaaattcagagagaagtcaatattcatagcatccgaggttcagcctttggtgtgcttaactgcttatgatgagagcggagaaggcaatgtgtgacaaagaatctggtcaacaagaacaaggactgtcctccgctaactgataacttatactccctcagtgccaagtgttgttctcgctttcggagtagtcaaatatatacaacgacaacatagtcttttgtcccactgcaagaaaaaggatagaaaaaaacgctgaaaaggtaaatgaaagacggtagagttaatggtaaccctgcctatgagttgtcaggttattctcattctttaacagccatgcggttagagatcactttctcctttctcctactgcttggaaactcagcatggcttcgtgttctattttactgccattggggtccacatttgggactcatgtttgtccggtgaattgagtttctatttttttacacttataaatctcactctatcttgttttttgatactatctaaaataatcgatgaa

SEQ ID NO: 1991 - DNA, 1478 bp, Zea Mays
gcaccgtgcccctctcgagttccgactcccgcagtccgcacctctcgcgctcgccttcgctttgtcgccacggcgagccccacgccgccgatcggggcgccgcaagcggcggcgcccgttccgatggacgcggatgtgggggcgggggcgacgaatcaaccgtggccggagcccgacgacgcgcacctctccccgcctccgcctccgcctccgcctcccgcctccgccccgactccagccgccgaggctgccgcgcccaccgcctccgcggccgtatcgccgccagcgccggcggaggcgaacggcaactccgacaggaagaggagttattgcgtgtgctatgcttccgggtcacattgtactgaattatgtggatgcgaaccttgtcataacaagccacctcaaggtgctccatggactgcaccagttttacctctgaaacctgtccaaacattggaggctggtcaagaaatagtggaacaactcataaggtcccctatggatcttattagaagaaaatgcacctgcaagaagtcaggctgccttaagaagtactgtgactgctaccagggaggggcaggatgctctatcaactgtaagtgcgatgattgtagaaacccatttgggagaaaagtcggcgttattttggatggtaaaagcagcggtcttcccgcgcccgtacatgtgcatgaaagaaacgggactgaagctgactcgagcggcgacgacgaggaagacgacgacttgtacatgaaccgacagctctccccgtctccggtgtcaagggagtcgtcgttccagcaggagactctggtcggcgtggaagtccagacgatgaacgggcacctgtacccgaagccgctgacccaggtgcgtcccgagccgtcctcctggcagctctccgccgccaggaggccggccgaggaaccgcgcggagaggtgtggcgcttctcggggaggcccggcgaggacggggcctccgacgccgtggaagcagcgcgtgccgtcgcggtcgctcccccgagggagagcaggagaccggggacccgcggtggggacaggctcaggttcagcatcccgcggtgcgtcgaggcgatgagcgccatggcggagctgtcgcccgtggagaagtcgcttgcgcccgacgtgttcttggacgagagcaaccgcgagatcttcctctcgctgagcgtagatgttaggcccatctggctgaggcgtaagatgaagagccttgtctagctctagttttttttaaatttttaattgtacccagtgctaatttatggtgcatgttatattttcgagtcctgcatatcgttagcagtaataagttggttacgatttcagctagaagaagaggagaaattgtctctgccccttgagtaaacgtgcgacaagacgatgtgtccagtgtccccctgaacagtggcagcaacgtggtgtggcaacaacgaaaacagacagctcaggcgacg

SEQ ID NO: 1992 - DNA, 1334 bp, Zea Mays
cctcctccatggcgacgaagcccttcttcctctggggggacacgcacgccacctccaccgcggccccggactccgacgacgtcggggtcttcaggtcgagcgctacgcaggcgacggccgcgggggacgcgccggagcttggcgccgcggcggcggtggcgcggccgcgtctgcgccgggcggacgctgcttccgggcccagcgggaagaagaagcagcaggcgggcgccggcggtggtgtcggggccaacaagaagccgcagcgcgggctcggcgtggcggagctcgagcggctccgctgcgggggtgacccgctgctcgagctctccaccgtggtcggggatcctgccgccgccgcgcagggccacccgatgctccactacccccaccgccacccgcactccgcgttcgaagccgccggcgcgcgctactgctcgcagctgctagccccggcgccgccgggaggaccagtctgcgcgctccactcgcccccggcggcggccgggtgccagagggcgcccgtggcgccggagcagcagtacttcagggaccggtggacgagccgcgtcgggggtttcacctcgtctggcggtggagctgaccaccagccccagtgccagtcccagtcccagctgctgccgccggcgacactggaaccagagcacccttcaagccaaagcaccatctggcgtcccgctgtgtcctcctcctcctcctgcctccacaccggccaccgctgtggcatctgctccaggaggatgagagcattggcagagaacaacggaggagcactggcgctggcgccggcgccgacgcctccagactactccatctacgaccttgccacagccatggccaccgctcgccagggagacgcgcccttggccgagccgcccgcgaagaaggaggtgagggagatcgagttcttcccggcggcaagcgcgcaccaccgcgctggcggcggcggcggcggccgagtctcggtccccgacgagccggcggagctcgcagcgtccttctcttccccgtacggcgccgccagccacaccgcaccgcagcttgacctctcactgagactgtagtagcggggctcgatcgtatcgttatgcctgatccacaatgtagggttctctaggcttatgttgctgcttttatgtcggtcatcatgcatggatgtgccatctagatcgctgggttttgagttttagacacacttggtagtagttgttgctgttctttctacttattattcgctgatgaaatgccgccctatttgtgaacactggagatccatcagaatcagataactgcgtgcggatggcgttgtaattctg

SEQ ID NO: 1993 - DNA, 1275 bp, Zea Mays
ggagggagaaaagaatagagaggaggcttgacaccatgatagagttgccttttgtgagcaaacagagggtcaaaagttgctggaagatttaccagtgcaggcgatgttggagactctcacaaagagatacgagaaggaattgatacacccaattcaaaacctgttcagtggagaattagcccgtgctatgcttattcagattcaaaagcttaaactggaccttgaatcgggactactggaaatggatcagattctaagggcaaatgctataaactttgctgttcttgcagcgcttcctgcttttggtctttcacttctgttgcttgtgttactgcgagcatgggttcagcgtgaccatggtgctgagggaagaggtaatattgcacgatgtcaacggaggctgcttcttgttgatgtagagagaaggcttatggagtttcaacattacagggataatggaatggaggaagaggcacggtgcaagtttggcttagtactttacacgcttgatagactctgcaaagctgttgagtcacacgcaaaagaaacaggcgaatggttaagcttgagacaagatatttttgatctgtcgaagctcgacatgggaatgccagataagatgattgtcgtttcacggttgaagtggatgtataactgcttgcttccattctcatcgagccgtttgccacgcctctagagcagtgagcaactggacgtcgtgtgttgcattttggataaagattttgacacggatacctggaactctatgtcggaaggatggttctttcatgcccacaagatgttctgtagattttagcagagctggatgaagcatatcggaagggggcagattgggtggatgcagtatccatcgagccctccgttgacaattcttgcattgctaggcatgttgatttggattggctgttgcaccgaatggtttgcgtcgatgggctacatctacatgtgtgcgagcattgtaccctttggccttgttccacttgcaattccaattccaatggttgttccatatcccatactagttcataagtcataacatgacaacagaatgctcttcttttatctattccgcagagatgggtacaatcttatttaactgtttcatttgaaagaacgtgttattattcatgtggccacacgacaccctgggttcctttcacttgccgatgatggcgagcagcgcttccttgtagtggccatgggtgttcttggccacggcgtcggcgagctttgtcccgtactgcctggtgtagg

SEQ ID NO: 1994 - DNA, 2445 bp, Zea Mays
tttcaaacccgaaacccactagtaccgccacacgaattcccgaccccgatggcgacatcgccaccgcagaaccctagctccggcgagccctccgatgcgtcgagcctcgcagccgcggcgctcgaggcgcccgtgcgcgtatggagatccctcgtcgcgcgcttccctcccctcccggactcctccagcttccttgctggcgtctccgacctccagctccgctacttcggcaacagccggccccgccgccgcaggcgctccgctctacctctccctctccgcccggtggccgcgcactctgctcggattgctggtgagatgcccaaagcctttgtgatcttagatgatgttgtgcaacacaccctgactaatttgcacagtattcacaaaagcttactattttggcaggccaaggctgagggaacaaattctcagaaagtgtactttatgatatttgagagaggtccaagggcctttgttgatgcaacatatcaaacactcactagactcgggagcaatggacgccctgtccaatacattttgcattctgcatctgatatggtgtcaacaaaactcgctgccctgacaagtatgcaacactgcttggccgcttttcttgcagaggttcattctgaagttgataaatgcagggaaggattaactgaaaactcagataaatcgctacatacattattcattgttttgaataccacattctccaagttggaggtatcacttagaaatgcttgtgagggtcaagatgaactatttatagatgatggaaacttgcatgaactgtttgggaaattaccagaagttgatgtagagagttcagaatggacagaggccttggcaacagatggtacaagtttaatctatcaaaaccttcagaagctagatagttttctgtcctctcagctctcaagccataaaagaccaaacaaattgaccatatattggttaccctatacatgtggagcagtaggtctctctgtgtgttctctgtggcttttacgccatagcagtttgatgggaagccctgatatcgacaattggattcgagatgctaaggagtctgtggctggattttgggatgaacatgttgagaaaccaatcatttccattagagatgagcttttcgagacattcaagcaaagagataaaggtgtaatggaaaagcaagaggtccaactaactgaagattcattgcgcagttgccttttgtgagcaaacagagggtcaaaagttgctggaagatttaccagtgcaggcgatgttggagactctcacaaagagatacgagaaggaattgatacacccaattcaaaacctgttcagtggagaattagcccgtgctatgcttattcagattcaaaagcttaaactggaccttgaatcgggactactggaaatggatcagattctaagggcaaatgctataaactttgctgttcttgcagcgcttcctgcttttggtctttcacttctgttgcttgtgttactgcgagcatgggttcagcgtgaccatggtgctgagggaagaggtaatattgcacgatgtcaacggaggctgcttcttgttgatgtagagagaaggcttatggagtttcaacattacagggataatggaatggaggaagaggcacggtgcaagtttggcttagtactttacacgcttgatagactctgcaaagctgttgagtcacacgcaaaagaaacaggcgaatggttaagcttgagacaagatatttttgatctgtcgaagctcgacatgggaatgccagataagatgattgtcgtttcacggttgaagtggatgtataactgcttgcttccattctcatcgagccgtttgccacgcctctagagcagtgagcaactggacgtcgtgtgttgcattttggataaagattttgacacggatacctggaactctatgtcggaaggatggttctttcatgcccacaagatgttctgtagattttagcagagctggatgaagcatatcggaagggggcagattgggtggatgcagtatccatcgagccctccgttgacaattcttgcattgctaggcatgttgatttggattggctgttgcaccgaatggtttgcgtcgatgggctacatctacatgtgtgcgagcattgtaccctttggccttgttccacttgcaattccaattccaatggttgttccatatcccatactagttcataagtcataacatgacaacagaatgctcttcttttatctattccgcagagatgggtacaatcttatttaactgtttcatttgaaagaacgtgttattattcatgtggccacacgacaccctgggttcctttcacttgccgatgatggcgagcagcgcttccttgtagtggccatgggtgttcttggccacggcgtcggcgagctttgtcccgtactgcctggtgtagg

SEQ ID NO: 1995 - DNA, 1786 bp, Zea Mays
ggggcgtccgggccaccgggattcgcacgcggacatgggcgaaacggctgggtgaaaatcgacgggccagaaagcgcacacgtgaaggcgaagatactgaccgtggagaacgcagcgtcgcagtgcgtcggcaccgctatcgcgcgcaacgactgctggtcttttctcaagggtggctttactctcaactccacgtctcaaacctcggtgctctatttgcagactgcgagcccaaatgcttctacgatctcaatcagaagcccctccttgcagccattctcacccgatcagtggaatcagcacagggaggagcgtatccaacagattcggaagcgtttcgtgaacctgcatgtctccgacggcaacggcagccgcgtggtcggggcggacgtggccgtgcaccagatcaccagagacttccccttcggctccgccatcagcaagagcatcctcgggaacgggccgtaccaggactggttcaacgcgcggttcaacgcggcggtgttcgagaacgagctcaagtggtacgcgacggagccgtcgccggggaaggaggagtacggggcggcggaccagctgctgcggttcgtgcagtccaacgacgtgacggcgcgcgggcacaacatcttctgggaggaccccaggtacacgccggcgtgggtgaagaacctgacgggcccggagctgcgcgccgcggtggcaggccgcgtccagagcctgctgtcgcggtacaagggcgacttcgtgcactgggacgtgagcaacgagatgctgcacttcgacttctacgaggaccggctgggcggcaacgccacggccgacttcttcagcacggccaggcgcgccgacccgctggccacgctcttcctcaacgacttcaacgtggtggaggcgtgcgacgacctcagctccagcgccgactcctacgtgtccaggctgcgccagctcgccgacgacgccggggtcaccttcgagggcatcgggctggagggccacttcgccaagcccaacgtcccctacgtgcgcgccgtgctcgacaagctgggcacgctccgcctgcccgtctggctcaccgaggtcgacgtcagcgccgccttcgaccacgccacgcaggccgcgtacctagaggacgtcctccgcgaaggcttcgcgcacccggccgtcgacggcatcgtgctgtggacggccatgggcgccaacgccacctgctaccagatgtgcctcacggacgccgacttcaccaacctcccggccggagacgtcgtcgacaggctgctgggggagtggcagaccaaggaggtgctgggcgccaccgatgaccgcggctccttcaacttcagcgccttctacggcgagtacagactctccgtcacctatctcaaccgcactgccgacgccaccttctcgctgcctcgcagcgacgacactaagcacatcaacatccgcctaccgcctggacctgcagcctgatctcatgcatgggatcggtccgtcgagtagaaatgtactactagaatttaagaactaaatatattgtggtgcctcagctgtgttaattggtacgtgtcactaaaaaataagtccgtggactgatacaactactactatacgcgcgcaactatctcctgcttgacctcttatgatgaaactagtgcaatgagtgtgttgtgatggtacacaaattattcgtgttagtgcacctagcgcgtagtatctttaaaaactctgttgtagtcaaccatgcttgtatatgaaagaacgcaagaaacgaaggatgatgtttaag

SEQ ID NO: 1996 - DNA, 592 bp, Zea Mays
atacgaacatgaggtcggccaccctgcttacgatctgcaccttgtccgcgctgctgctggtggcgcgcggctcggagaagccatcggccgcgccgccgccggtggtggccgtgggcgtggcggcagccagcgacctcatccgctccggcggtcaccgctacctggacgtcagaacagaggaggaattcaggagtgggcatgtggaggattcactcaacgtgccctatcttttcttcacttcacaaggaagggagaagaaccccaagttcatcgcacaggtcgcagcgggtttcgacaaagaggacaacatagttgtgggctgcaaaagcggagtgaggtctgaattagcatgtgctgatctcatggcagctggatttagaaatgtgaagaacatagaaggtggttataccgcatgggtggaaagtggtcttgccgtgaagaaatctcaagcacaagatgaactatgatgtgccctatcctgttggttcttccttgctttgacgacaaccttcgaagaaaataatgagatggcagctcggcaccggcacaaatagacctgatggagcttggaaatatatatctatggattgag

SEQ ID NO: 1997 - DNA, 5603 bp, Zea Mays
aagatgtctaaaaactgtgaaccctccaacaaaaagatctgcatacaaagatttttgaactcccataatggaatggttgatttcccatccgagtatatccagcaactgaaagaatcatacactgacagatcataccttggtaaactagaatacaaatgtagacactgcgatgcaattttctggttcaatgaacgcaataaatccatgacgagacacaataatcaggaaccaatatattcgaactgctgcaaaaatggcaaaatcagaataccaaaatataaagaacccccaacttttcttaatgaattaatacaacgaaaaatggacacaagatgtaaacattttctacaaaaaataagacaatataatagcatgtttgcatttacttccatggggggaaatattgataaaaaaataaatgatggtgagggaccatatgtgtttcgtgtcaatggccaaatacatcatcgaataggatcattactacccttaccagacaattgccccaaatttgcagaactatatatttttgatacaaagaatgaaattgaaaatagaattagggctctaacaaatgaagaaccaggtgagcaagacatagatccagaaatagtgagagggctaaaaaaatgctcgacgaatataatccattagtaaaaatattccgccaagctcgtgattttctcgaagaacacaaaggcatagatgtaagcattagaatagtaggcgctgacgaaactgatagaattcaatatgagatgccacatcaggaagaattagctatgctgattgtaggtgatttatcacttgagaactacaaacgggacatcattgttagcacacaccaaaatagccttcaaaggatatctattttccatccagcatatatgcctctacaatacccgctcctatttccatatggcgaacgaggctttcaactaggtattaaataccatggacaacacattagtcaaaacagagatgactccaaaagagatagagtaactttgcatgaatttttgaaatatcatgtgcactatagacctaatcagcctaatccctggttatgttatggccgattatcaaaacaagtagtagtagacggtcgagcaatggaggatgaagacaggcttgattatattgttagaaatcaatcaaaattacgagctgaatatgtacaaggtatttttgatgcagtagaaaaaggaatatatgacgccagtcgaataggaaaaaaggtgttattaccatctagccatgttggatcaaaacggtatatgatacaaaattaccatgatggcattgctatttgttgtgcctatgggccaccagatctttttattacatgcacttgtaaccctaaatggcctaaaataacaacatgtttattaccaggtgagcatccaaatgatagacctgatattattgtccgtgtttttcatatgaaactacaacaacttttggatgacttacaatcaggaaaggtatttggccttgtactagcactactatattctatagaattccaaaaacgaggtctaccacatgtgcacacattaatttggttagacaagaaaggttgtgaaataactacagaaacaatagattcgtggatatctgctgaaataccagatcccgagttagatcctttgggatatgctcttgttgctgaacatatgatgcatggaccgtgcggagataaaaattggaattgtccatgcatgaaaaaaggcaaatgctccaaaatttaccccaaagattttgaagaaaacactacattctctgaaaatggctttacaatatatcgaaggaggaacaatgggattttcatcagaagagaacaacacaacttagacaacaaatgggttgtgccacataatttaaaactattaaaaagataccaagctcatataaatgttgaatatgtaaacaagagtacagtcttgaaatatttatgcaaatatgtaaacaaaggacctgatagagcaaaggttatattcaaaaaaatccaaaaaggagaagaatcacatgtaaacaaagaagcagaaactatagatgagatacaagaatatctagactgcagatatatatgcgagcaagatgctctttggagattattaggatacgagatacattaccattggccacctatagaaagactgccagttcatctaccattgatgaatataattaagatgaaatcaaatgataaattgatagacatagctaaagatctaaagtatagaaagacaatgctaactgaatggtttaatgcaaataagcaatatgaagatgcaaaagaattaacatactatgagtttcccaaacaatggcgttgggatggagaaaaaagacaatggaagaaaagacaacatggtttcaaatttggaaggctctattatgtaaaccctgctgaaggtgaaagattctatttaagaatgcttctaatgattgttaaaggtgctaaaaactatgaagatatacgaacgtataatggtgttttataccaaacctttaaagaggcttgcgcagctagaggattactagacgatgacaatgagtggtatcgcacatatcaagaagcaactaattgggcaacatcatttgaactacgcaatctatttgtcataatgctaacatattgccaaataaaagatgaaaaagaatttttcaacaccacatggcacacaatggtcgatgacattcacaaacatcttatccaaaaataccaccctatcaaatatacaccctctgaattagaactacaacattatttacttgaagaactagaagagctattctctaagaatgggcaggaaataaataactacaatttacccaggcgacaacacacaaaacatattgataacataaacagactaatccaagaagaaatgagttatgatataaattacttagaagaagaagcaaacaaattatatatacaactaaacaaagatcaaaagaatgcttttcataccatagttagttctgtgcttagcaacaatccaaacttctattttgtctcaggacatggaggaactgggaaaacatttctatggaatgccattgtatcataccttagagctataagaaagattgtccttacagttgcatcatcaggagttgcttctttgctacttccaaatggacgtacagctcactcaagatttcgtatacctatagatttggatcaattgtcaatgtgtgatataaaaagaggaacaaatcttgcaaaacttcttattgacacagatcttattatatgggatgaagctctaatgacaaataaacaatgctttgaagcatttgatagatcccttagagatatagtaggagaaacatatgaaaaagctcttgacattccttttggtggtaaagtggttgtgctaggtggcgatccaaaacaaatattacctgttatagaaaatggaacaaaagaacaaataataaatgcttgtatcattgcttcatacctttggaaccatgtcaacattatattcctttctgaaaacatgcgactacgacaaagtaatatatcaaatgaagagtatgaagacttgttatcattcaataattggatccttgccattggaaatggggtatataacaacaacgataatttttcctcggactcaacactcattgaaataccaaaagaatttttaattgaaacaacagaggataaaattcaagcattagttcaatttacttatcctgacctacaaacaaaatataatgatccagattatatcaaaaaaagagctatattagcaacaactaatgatgttgtagatgaaataaatgattatattatctctcttttgccaacagtagagagagaatactatagtgcagatagcatatctaaatgcacagatgctccaaatgatgccaatattttataccctattgagtatctaaacactttaaacgcaaacaatttcccttctcatagactaaaacttaaaattggcactcctgtaatgcttctacgaaatttaaatcaaagtttaggactatgcaatggaaccagaattattataactcaactaggagacacaattatagaaggaacaataataacaggtacacacgttggcgaaaaaatacatataccccgcattaatctgacaactaagggcaataaatggccttttacattatgtcaacgccaatttccaatcaaggtttgctactctatgactataaataaaagtcaaggacaaacactatcaaatgtagggttatatttaaagaaaaaggtgtttacacacggtcaactatatttagctgtgtcacgagttacagaaaagaaagggctcaaaatattgatagaaaatgacgacggttcatgtggaacaataacagaaaatattgtgtataaagaagtactacaatctattgagagccatggcaacataaattgatactatttttaacaaattgtatttgcagatggacattacaccactatcacaagttcgaccaggggtctaccactatatcatttgtgttcggatatcaagagtttgggaatttcatggcaaaaatgatgatgatccaatcaaacatttggatcttgtgattattgatcaacaggggactgcgatgtacgctgaagttcctcaagaagctatatatacacttcaaccacgactacaggaaagcaagattttaatcatgagaaaaatttatgttgacaacgcaaagctatccttcaaacctgtgcatggaaagtatatgatcaggctacatccaaagactttgcttgaggaagtaaatgaggatccacaagattttccaaaatatacattccatctaacaccgttcccagaactaccccaacttgaaggaaacaatgagtatttcatcgatgtcattggatgcattacagctctttctgatgcaacaccatttcagactagcagtggaatagttcgcatgaaaaggctgatccaccttgtggatctaaggggaaataaaattgaggtatcactatggggacgaagagcagaggaattcccaggacaacaagtctttaaagccagtgaaatgaatcatgtaattgttatctttgttggaacatcagtcaaatcctatcgtggatcaccaccttttcttagtggcacagctgcatgccgctggtatataaatcttccagagatccatgaaatcaatactttctatgcaaggtaaattatattcctttctataacctccctttcatttttttaaaatataatgttttgtgatttccatttattgtaaattagattgacggcaatataaatatttggatagtacatgtacattttttggcctcctttattgcatttccttacaaagtatttaaaatacaaccctacaatgagttagtttgagatttatttatagaataaatatagcagcagcaacaaaagtgtttgatataatgccatggggaagttgagttgtacatactaaggtttaacacgaagatgaaatctaattatacaacattcaatcactgttaagcttgaatatagtacaatgtaaatttgcaattcatttaataaactgatcaagactaattacaatgctttcatatttatagtatcggt

SEQ ID NO: 1998 - DNA, 231 bp, Zea Mays
tccgccgcccgcactaccacgcccccgctcctctcgtctctatcttcgcctcttccatcgcaggattcagcggccatgggcggcggcaacgcccagaagtccaagatggcgcgcgagaggaacgccgagaagaacaagggcggcaaaggcagccagctggaggccaacaagaaggccatgaacatccagactccacatgtccagagagtaatcataatcttgcaagtcaac

SEQ ID NO: 1999 - DNA, 887 bp, Zea Mays
ccgttactctacccggtaaatatctcctgcggcatttttgactccatatccgcgcggcgcctatctggcatcggtgaagagcgggcgctagagcagagtgagcgtgcggttcttggtcatggagcgcggtgccgtcgtccttccgctccagggcgccggggttgggcgcgtcctcctccccgtgcaagtgcgggtacggtcgttcttgaggagcaggagggcgacggagcggcggcgccggctcgcgagttccgcggcgccggcgaggtgcagcaagatgtacgttcccggctttggggagggttcaccggagcggaaggcggcgatcaacctccagcacttctttaactacatcgctgtcagcattgtcctagcacagcttgagtgtatgaaattactgaggcatgtgtggtttcgtctcttggaaacaaacagccttgaggattctggaggtccgatctgcatatgtgaagaacgagttcgagtgggacaatttgaaggaattatccttcaagatggttgatgaggccaacacaaagctcatgagggattacgtcgtcgaggtcagccacattgaagacgaaaactaaaacatcaagtggtttctctttgaactactatattttataggcgaacgataacatcaaatgctttctcttgaaccttgcctacagcattttataagaggcttgcatgtatatatagaagatgtataggttatgaagcgcactagcttgatcctgaaactttgtatgtagcataggtactaaacatagtaagcgcattagcagtgatacaccgtagatgtttagcattacttgaataaaactcggcacgcatacaccgtgttactttcttgatcatcaataggagtgagaacaaaaacg

SEQ ID NO: 2000 - DNA, 3576 bp, Zea Mays
tctgcttttcgatgattggggttgtacgtttcctgccagtggaatgttaagatacttgggctggtgagatactctgcaagcaatggatcgacgcagctggccttggaagaagaaatcatctgacaaatcatcaaatgcggatgtgctgcagaattttaatcatgcagaacaggaagataaagctccaaaatttgtgcaaatttcacctgaaacatatgcacatcttaccgagtcagaggaaaaagtaaaaaaattagaagaaaacgtgaaggtcttgaatgaaaaactctctgcagcgcaatctgagatcacaactaaagatgctcttgtgaagcagcatgcaaaagttgctgaagaagctgtatcaggttgggagaaagctgaagcagaggcctccgcgctcaagcttcagctagaaactgttacattatctaagctagccgctgaagaaagagctgcacatctggatggtgcattgaaagaatgcatgaagcaagtaagggctgttaaggaagaaggtgagcagaagctacatgatgtagtctttgcaaaaaccaaacagtgggagaagataaaggccgagttagaagcaaaattacttgaatttgaacaggaactcataagggctggtgctgagaatgatgcactcacaagagcacttcaagaacgggcagaactgttgatgaaaattgatgaggaaaaagctcaagcagaagctgagattgaaatcttaaagagcacaatccaatcaggcgaaagggaaataaattcacttaaatacgaattgcatgttgtctccaaagagcttgaaatccgcaatgaagaaaagaacatgagtgtgcgctcagctgatgtagcaactaaacagcaccaggaagatgtcaagaaaatatcaaaacttgaagctgaatgccaaagattacgtggccttgttcgaaagaagttacctggtcctgcagcactagctcaaatgaaaatggaggtggagagcttgggtagagagtatggagaccacagagtacgacgatctcctgcaaagaattctagtttccatcggcccatgtctcctatgtctcctgttcctgattacgcaatcgagaacatacagtacatgcagagagagaatgagtttctgactgctcgtttattaacaatggaagaagaaaccaagatgcttaaagaggcattgacaaagcgaaacagtgagctgcaatcttcaagaagcatgtatgctaagacagcaggaaagctccgaagctttgaagttcatatgttgactggaaaccaacataagagtccaactatgaacatggatattcattttgatggtgcactgagccaaaatggaagcaacccacctagcatgacttccatgtctgaagatggggttgatgatgaaggaagttgtacagaatcttgggccaacactctggtgtctgagctctctcagttcaaaaaagagaaggctgccaagagcagtgcgacagaaagctccaataggttggaactcatggatgacttcttagagatggagagattagcatgtctgtcttctgatgttaatggcaatggcagcactattgacaaaatgaagatagatgaagttggggctactttgtctgactttactgaaagagatggtgttaaagatttgcagtcagcttcaccaatgacagaaagtccatctaataaacagcgtttgtctgagaaatcttcgctttcgaaattccagtcaagaatatctttattactggattctgaatcagcagagaataatgctgaggtacttgatagtatcagaaacattctaaaggatattgaagatgaggcagattcggtgaacacaaatggaactcatcattcaggcaggaccttaagtttagatagcaaatgtgccatcgatcaagaacttaagaatgccatattgaagattcaagactttgttaagttacttgatcaagaagtctccaagtttcaaggccagtcatctgattataatgggctaagtgagaaaacacaacagttctctgcattggttgacaaagttctgtcaaacgatgatgtcctaaatgatattgtcatggcactgtctgttatcttgtcagaaactagccagattaagttgacactgttgagagacaacaacaatgaagcagaaagtaataacttagattgtgttgataaagtgactctacttgaaaataaggtgcagcctgagccagtaaaagacaatggttctggtctctgcccactgttgcctcattcatcttctgatcctgagtttgaggggcctactgatgctggatttgatgttaaggctgcagtgaaggtatgctcgccggaggaatatgaacaacttaaatctgagaggacaaatttggagggagagttagcaaagtgcaacaaaataatagaagaaacaaaggttagattaagtgatatggagaaaaacctggaaaacctcacatctaagttggctgacagtgagaaatcaaatagcttgagtgagacacagttgaagtgtatggctgaatcctacaagtcacttgaatcaaggaaacttgaattagaaaatgagatagaagtgctaaggtccaaaatagatgctttaacagctgaactctctgatgaaaggcaaagtcatcaggacgacttagttaaatacagagatctcgaggagaagatggaaaggtatgagatggagaggagttcaatgcttgtggatggggacccagacaccaagtcaaagcaggataaagagataggggctgcagcagagaaactggcagagtgccaggagaccatattgattcttggccgtcagctgcaagctatgcgtcctccagccgagtcactcggctcttcacctaatcggcaaggcacggagaactttctacaggacgtggtaggaacaaccgcaggagaatattcccagaagccttcaggccaacctgatacagaccaggatatgcttgggacaggaaatgtctctccggtcaatggatacaagacacacatgatcccttctgatgcagacggaagccctttcctttctccgaacagctccaagcgcccgaagcatcgatcgagatcctcttcgtcttcgtcattcaccaaccaccagttgccagacaaacagagccgaggattcagtcggttctttgcgaagaccaaagagtgaaacttctcccgattgggtgggatggtggaggacatgaatttctgtagagcttattgaggcaagccttcgtgtgcgttctctcaggtcaggtgatgctttgggttgctggaataatactcagcttgcagtcgagcgggtcgtgggccagagtgttgcggaatgtatgttatcagtctcttctgctagagcttttctgggttgctgtgtgtttgaaacctcactgtacatgtgcttacatgcatgaaggagcatggttgttggtttgtgtttaatcttcttgtgaattagcatgtgtattttccttgtactggtttcatgtacagttaacctgcgctaatttcaagggcattgatatacgtattatattgtgttgatcagtttatacagtgttcctt

SEQ ID NO: 2001 - DNA, 2027 bp, Zea Mays
gggtacacgatggagggagctggaagagatgccaaccctttgggcggttaccgaattggcaaaaccctaggaatcgggtcgttcggtaaagtgaagatcgcggaacatatattgactggccataaggtggcaatcaagatcctcaatcgccgtaagatcagaagcatggaaatggaagagaaagtgaagagagaaatcaagatactgagattatttatgcatcctcatatcatacgcctttatgaggtgatagatacacctgctgatatttatgttgttatggagtatgttaaatctggagagttgtttgattacattgttgagaagggaagactacatgaagaagaagcccggcgcttttttcagcagatcatatctggtgttgaatattgccataggaacatggttgctcaccgtgatttaaagccagagaatcttcttttggattcgaaatgcaacattaagattgctgattttggcttaagtaatgttatgcgtgatggtcactttcttaagacgagttgtggtagcccgaattatgcagcacctgaggtcatatctggtaaactatatgctggtcctgaagttgatgtctggagctgcggcgttattctttatgctcttctttgtggcactcttccatttgacgatgagaatattccaaacctttttaagaaaataaagggtggaatatatacccttcctagtcatttgtcaccttcagcgagggacttgattcctagaatgctggttgttgatccgatgaaaaggattacaatacgtgaaatccgtgaacatatgtggttcaaaattcaacttccgcgctatttggctgtaccgcctccagacactgcccaacaagttaagaagctggacgaggaaacccttaatgatgttattaagatgggttttgacaagaatcagctaattgaatctctgcacaacagattgcagaatgaggcaacagttgcctattatttactcatggacaataggcttcgtacaaccagtggttatcttggatctgagtttcaagaatctatggacccatctttctctcaagtacatgctgaaacaccaacttcagcaactgaacatcggcagcatgtgtttacagaatctccggggtctggtttgaggcagcattttgcatctgaaaggaaatgggcccttggtcttcagctttacaaaacgagggatgagaagtaccttcttgacctgcaaagggtcagtggaccacaactcctctttctggacttgtgttccgcctttctaacgcagctgagagttctttgagcctgatgacatgattggcttcccaagcacaatccttgatgcaccccatggactttcaaattacattcgtgctgtacataatggccatatataatcctccggtagattatattttctggagcatgtggaccgtacagctggacgtcagcgaactgaggcctgagaagcacggcaataataatcctgtgcgacggagcgagccgctagctggacgtcagctatggtgtcaccgcgcggaaggggggcatgcaaggggcggggttgacctcggcgtcaggttgttgctgaatgtttctgggggttcctatcattgcttcttctagactagatgagcatggacttgtggtgtggtggcatgggcatgcaacatgcatgcaggatcaggccaggctaccagggtttttttttgatctatctgcacgagctgatatattagtgtacccagtttcttcttctagattgttcaacttgtgcttaccctgccgcgtccgcgtgtctaccaacctgcgacttgtaccggtaatcgatctagaagggcggcgagtgtcatggcgtcgtatgaacccctctggggaatggttcaactcgtgacgcaaagactggctgttctcacttctcagttctcacactaaatatacacatgcatgtgatggaccgactgatgggcagtaactgtaataatctgatgtcatgggagaagctgcaaatggttactagaacgaaagaaaagg

SEQ ID NO: 2002 - DNA, 4826 bp, Zea Mays
caaatagcaacaggagcattacgggcattcaattcaaaggtttccgaaagatcgatcccgagagatgggagttcgccaacgacgacttcgttagggggcacacgcacctcctgaagaacatccaccggcgcaagccggtgcacagccactcgccgcagacccaggtgaacggcccactggcggagtcggagaggcgcgagctcgaggacgagatcagcaggctcaagtacgagaagagcctgctcctgacggacctccagaggcagagccagcagcggtgcgggatcagctggcagatgcagtcgctggaacgcaggctggcgcagatggaggagcgccagaggaacatcgtggcctccctgcgcgacatcctgctgccggtcggacacggggtcgtttcgtgggggtcggcgacgggggcggaccacttcagcaagaagaggagggttccgaagatggacttcttcgtcgacgaacccaaggtcgaagaacagcaggtgccgttcctgcagacggtgggcgcggagacgccaggcatgtctccgatccgccttctgagcgccgagccgtttgagaagatggagctggccctggtgtcgctggagagtttcttgcagagggcaacagcgcatacgtctgctgctcaaggcatgttgtacgccgctggtgttgctgaacccagccctgctctggctctaggcgagatgctctcggcaccaatggataccgagatcgatctgcagccatcagcttgccagaaccccttcgcttcgacctcagggcaagaccagtcgtcttctccgttggcagaacccccgagctactacgcccagagcccgatgctgccgatggcacagctccatgaacatgcccataggacagctgctggagtcgatatgaactctgacaccacaaccggcgacacctcgcaagatgataccaccagtgaaactggaggttcccatgtgccggccaaagtgaacgatgtattctgggagcggtttctcacagacgccgccgagggtaaaagcgaggcaatagaagcaaaagaggatgtgaagactgccgtagaccgctgctgtcctcgtctccaggacaatgttgatcagatcactgagcagatggggcagcttgattcagcttcttatgcacccgagaattactgataccacaccatcggtgttgccgctgtacattatagtttaggctagctaagtcttttctagcatttcctactgtaaaaagtaaaatcatatgctgacccatgtacattacgtatgtcctcgtgctgttgagctagagcacagattcagttatttgctgccctaatctcttccgttgttgtgcttgcacgtgtgccctttctcataaatcctctggagatgcatcttacaatacctaaaatagtaattttatctgatgaagtgatgattgtgcacttgctgtgacatctaattactgtctctcctgttatgtcagagttgacactggtacatcaacgggtaaactttcttttcagttttcaatggaacattttcagccttaggtaccatgctagcacgatcaccttagggcatcgggatcaaatgggattggagtgattaaatctctcactagtcaaaattgaatataaggggatttaatccccctcaagctttgtttgaataatctagtatttacatctatgcacatggattgaggtgtaagttagtttaatttacattttaatctatcccaatccatatgtactgagataaatactagagtatccaaacaaagcctcagggctaatttggtgatacgggaaatagagaggatgcatgggagagatatccacttgctattcaatttcaaataggaaggagatttctccccattaatcccctccatttccctggtcatcaaaccagctctcaatctcctttgatccaaacacaaccaaacaaggcaaagaaaaaaacatgtccaaggactaaagaaaggccgaacaaaactcgcataatctaattgaggaagaaggcctggggctcgcatgtggcctcttgtttaggaccttaggtgacaatcatctcggcaaccaggacatacctgtacggtccacatgctccagaaaatataatctaccggaggattatatatggccattatgtacagcacgaatgtaatttgaaagtccatggggtgcatcaaggattgtgcttgggaagccaatcatgtcatcaggctcaaagaactctcagctgcgttagaaaggcggaacacaagtccagaaagaggagttgtggtccactgaccctttgcaggtcaagaaggtacttctcatccctcgttttgtaaagctgcaatcagtggaagtgtattagaattgggtacattttccaagtagactttatgctaacaaaaagggagcgtctaatctataggtatgaacggaagtacaaattatggagtatgctaattttaatcacaaatatacttggtcctaagggattgtgaacattgaaacaattcagaaataatctggcatgcaaatgtaatcctaacaaaattatgtttgttgcataaacatagcacataaagaagtcaaggacatatgttaaagagttatgcatagtgtggttcatagcctgcacagcaagtcttctcaaaactgagagcacctagaggggggggtgaataggtgatcctgaataacttcaaaacttaagccacaaaaacttgttaagtgttagcacaattatggccaagtggctagagaggagtcaaaacacaataaccacaagaaatcaatcacagagatgacacggtggttatcccgtggttcggccaagtacaaaacttgcctacttccacgttgtggcgtcccaacggacgagagttgcactcaactcctctcaagtgatccaatgatcaacttgaataccacggtgttcttgcttttcttttctcaatcccgcttgcgaggaatctccacaatttggagcctctcgcccttacaaaagatgttcacagagaatcacggagcaggggagggaatgagcgacgcacacaagacttcaaaagatcagagcaacacgcacacaagcagcaataagagctcgcaacacaactcaaagagtacacaactccacaagagctctatatgctatcacaatgaatcgaatgcgctagatcaatgtcttggtgcttagaaaggttgtaggaatgcttggttgtactcctccatgcgccaaggggtcccttttatagccccaaggcacctaggagccgttgagagcacatctggaaggctattcttgccttctgtcgtcgggcgcaccggacagtccggtgcacaccggacagtgtccggtgcccgattcctttccttaattggcgaagccgaccgttgccgaccgttgcagatctggcgcaccggccagtccggtgcacaccggacagtccggtgcttccctccgaccgttggctcggccacgtgtcgcgcgccgatcacgcggccgactgttggcccggccgaccgttggctcaccggacagtccggtgcacaccggacagtccggtgaattttagccgaagtcgccggagaaaaacccgagagcggcctcttcggccaaggcggcttggcgcaccggacactgtccggtgcaccatcggacactgtccggtgcaccaccggacagtccggtgccctagaccgaagcagccccttggctgcacacagccaagtcttctcttctcttcttctttctgtttctaacacttagacaaatatattagtacacaaaaccaatgtactaagacttagaaacatacctttgttgaagatttgcagtttgttcatccatgggcattgatttacatttaagcacttgtgttggcacttaatcaccaaaatacttagaaatggcccaaaggcacatttccctttcaatctccccctttttggtgatttatgccaacaccacataaagcaactagaacaagtgcaaaatcacttcaaataaaaactcaaattggttttgattcaattttggcatatatggatcatcctttgccaccacttggtttgtttttgcaaatcaaactcaaatctctatctctaagtcaaacacacatgttgaagcataaagagagtcattccaaaagagattgatcaaggatttcaaaaactccccctatttcccataatcaacacttctccccacaagaagccaacttttgacaatagagacaataagagacaataaaagcttttgacaaaacaaaaactctattctactattttcaaaatctctcaagtggtagctgatccatttatcactttggcctttattttctccccctttggcatcaagcaccaaaacgggattaatcttggcctcttaaccccattgcctcaccaaagtcttcaattaagagcaaatggcaataagatttcatgagatgaacttggaattagttagcctctcatcggagtgcagtggaagtctttcatggtccaagtccaccttttccctttcaatcctccttcgagactcaatcaagcaaactcaagcaaatggttagtctcaaagggtcaagttgtaacacatctccccctaaacatgtgcatcactttgcaacggatttgtgaggtccagggagtgttggtacaacttgagcaccataataagcaacaaaatgcaaaaaggaacatgatcaaaagcataagtacatgtatgctacaattcaatccaggttccgcgaatctatgacatttagctcactacgcaacctgcaaaaggtcttctcatctagaggcttggtaaagatatcggctagctggt

SEQ ID NO: 2003 - DNA, 2173 bp, Zea Mays
  misc_feature (1)..(1): n is a, c, g, or t
ntgctgtcgattaccctccgccgaatcggagctagctcttgtttgccgcggaacggtttgtttccggtactagagctgcgtgccttttgtatcccaaaagcggcgatttagatatgagataattggatttttgccactcacaatgttgtcttcttgttataattatctgagtttcacaaaggggctaattagtctagaactgtggctgacgggcatatgacgtgacatgcccacaggcgtgcatagtgaattgctcgtcacgaccgatctatttgtgttactctgtcgtggaattctgtagatcgtgaagtatgcgcagatgtgtgcatgtgattgtgaagtgaagtcgtttcttgtaaaaggttcggaactgaaaaccaggagaaactattgcaacatccaactcttatttctttcttgcttattattgactgcacaatttagatgattggactttattactgaaagttgtcaaggacctccttacagaaagttgtcaaggacatccttacagaaagttgtcaatgaccttcttacagaaagttgtcaatgaccttacagaaagttgttagatactgtcgaaaatttatttaccgtgagaaacattatggtctacctggccttccttcaggatgatgcatcatgtcatggcgaggaaacacagagtctattggaagcaaatctagggtcacagctgaaaagtaaatgctctgattggagagcaccggcactcatcctgggattggaatgcttggagagcatggctttcaatggcattgccacaaacctagttgtgtatctccgttcagttctccatgggggtattgcttccagtgcagcaactgtatctctttggtatgggacaagcttctttgtgccaattcttggagccgccatagcagatacttgcttgggaaattataagaccatcttgatctcccttatcatgtacctatttggaatagtactaattacagttgcaacgttcatgccttctacttcagtcttgtgcgacgtcagttcatgcttgtcatcaaatggaactcaaaccgtgattttctttgctggtttgtatctcactgctgttggatgtggaggagtaagatctgcattgcttccgtttggtgctaaccagttcaacaacgagaacagtctagacataaaaaagagaagaaatttcttcagcttgttctatatatgtgtcatctttggtgtgattacttctgggacaatcatagtttgggttcaggaaaatgttagctgggctattggatatggagtcgccactacatgcataggtcttgctttgataggatttctggtgggaacaccaatattccaagaagatgagccttgtggttctccagtgaagagtattttccaggttattgttgcctcttttaggaacatgagcttggaagtacctgctgatagctgtcttctgtatgaggtcgggagcaaccacatacaaaggacaaaacttgctcactctgatgattttaggttcttagataaggcggcagttatttctgatccaagcctggtgtatggaggctgtcgaagctcatggagcatatgtacagttactgaagttgaggaactgaaagtacttatccgcttgctcccaatatgggtgactggaatattctttggtgctgcgatctcgcaaatgcacaccacttttattcagcagggaactgtgatggacaccaagatcggttccctgtccattccaccagcatccttatactcatttgaagtgatatgtgtcacgctttgggtacttgctgtcaacaaagtgcttgtgccggcaatccgaacgtattttgcaaatggggtagagctcacacagttacagaggattgggatcggtcgtttcctgatgatctttgccatggcaatggcagcacttctagaaaccaagaggctgcatattgttcaggagggggaactgctaagcattgtatggcagcttccacagtacttcgtcattgctggggctgagtgcttcggtatcatcactcagctggagttctttcgtggccaggcgccagactccatgaagagcattttaacggcatttgcattgctcaccactgcccttgggaattacttgagctcagctatcatcaccctcatcgcaggggtgaccaggatatatgtttctttttgt

SEQ ID NO: 2004 - DNA, 2359 bp, Zea Mays
  misc_feature (1)..(1): n is a, c, g, or t
ntgctgtcgattaccctccgccgaatcggagctagctcttgtttgccgcggaacggtttgtttccggtactagagctgcgtgccttttgtatcccaaaagcggcgatttagatatgagataattggatttttgccactcacaatgttgtcttcttgttataattatctgagtttcacaaaggggctaattagtctagaactgtggctgacgggcatatgacgtgacatgcccacaggcgtgcatagtgaattgctcgtcacgaccgatctatttgtgttactctgtcgtggaattctgtagatcgtgaagtatgcgcagatgtgtgcatgtgattgtgaagtgaagtcgtttcttgtaaaaggttcggaactgaaaaccaggagaaactattgcaacatccaactcttatttctttcttgcttattattgactgcacaatttagatgattggactttattactgaaagttgtcaaggacctccttacagaaagttgtcaaggacatccttacagaaagttgtcaatgaccttcttacagaaagttgtcaatgaccttacagaaagttgttagatactgtcgaaaatttatttaccgtgagaaacattatggtctacctggccttccttcaggatgatgcatcatgtcatggcgaggaaacacagagtctattggaagcaaatctagggtcacagctgaaaagtaaatgctctgattggagagcaccggcactcatcctgggattggaatgcttggagagcatggctttcaatggcattgccacaaacctagttgtgtatctccgttcagttctccatgggggtattgcttccagtgcagcaactgtatctctttggtatgggacaagcttctttgtgccaattcttggagccgccatagcagatacttgcttgggaaattataagaccatcttgatctcccttatcatgtacctatttaatgcaaatgctcattgcagggaatagtactaattacagttgcaacgttcatgccttctacttcagtcttgtgcgacgtcagttcatgcttgtcatcaaatggaactcaaaccgtgattttctttgctggtttgtatctcactgctgttggatgtggaggagtaagatctgcattgcttccgtttggtgctaaccagttcaacaacgagaacagtctagacataaaaaagagaagaaatttcttcagcttgttctatatatgtgtcatctttggtgtgattacttctgggacaatcatagtttgggttcaggaaaatgttagctgggctattggatatggagtcgccactacatgcataggtcttgctttgataggatttctggtgggaacaccaatattccaagaagatgagccttgtggttctccagtgaagagtattttccaggttattgttgcctcttttaggaacatgagcttggaagtacctgctgatagctgtcttctgtatgaggtcgggagcaaccacatacaaaggacaaaacttgctcactctgatgattttaggttcttagataaggcggcagttatttctgatccaagcctggtgtatggaggctgtcgaagctcatggagcatatgtacagttactgaagttgaggaactgaaagtacttatccgcttgctcccaatatgggtgactggaatattctttggtgctgcgatctcgcaaatgcacaccacttttattcagcagggaactgtgatggacaccaagatcggttccctgtccattccaccagcatccttatactcatttgaagtgatatgtgtcacgctttgggtacttgctgtcaacaaagtgcttgtgccggcaatccgaacgtattttgcaaatggggtagagctcacacagttacagaggattgggatcggtcgtttcctgatgatctttgccatggcaatggcagcacttctagaaaccaagaggctgcatattgttcaggagggggaactgctaagcattgtatggcagcttccacagtacttcgtcattgctggggctgagtgcttcggtatcatcactcagctggagttctttcgtggccaggcgccagactccatgaagagcattttaacggcatttgcattgctcaccactgcccttgggaattacttgagctcagctatcatcaccctcatcgcaggggtgaccagggtatggcatagccctggttggataccagatgatctgaacaaaggacaccttgactactactactgatatatgtttctttttgttaatgaagatggaattagacgtggacagatctagctgagtaaattaggtggcttatgtggttctggaacaatatagtaagaattaaggaaacatattgttg

SEQ ID NO: 2005 - DNA, 3022 bp, Zea Mays
gtaaaaaggctgagacacactgcaattgtggcccacgcctatctggttcgctactcttttcttcctctcctccggcgggccccggccccaaactagccaacggcggcgagatccagatccaccgcaccggacccggacccgcccaacgactccggccactttttacttactagccagcggcggcgaaatccagatctccatagcaccggacccggacccgcccgccccgctggaacaggatgttcggacttcaggcgagcggcgcggcggcctcgtgggtggtggggcggatgggcaccgacgcgcatctctacgacgaccccgacgacgcctccatccccgagctcctcgactcccgcttcgacgccgacaaggtcgacgccctcaagcgcctcctcgccctcatcgcgcagggcgtcgacgtcgcgcacctcttcccgcaggttgtcaagaatgtggcgtcgcagtcgctcgaggtcaagaagctcgtctacctctacctcctccactacgccgacaaatgcttggcaacatagtagtttttgtcaagacaatgccatcattgtttgccccgttttatgaggacttctttgtaaacacttcagatccgtaccagacgagggctttgaagcttgaaatactgaccactattgccacagagtcatctattccggccatttttgaagaatttcagaatcttttattagtaactcagttcacttagatggagaagatgctgttttggttcaagcaatcttgtcaatcaaagcaatagtgaaaatggatccagtatcccacgaaaaggtaattgtccgcttggttcgtggtttggacaaactcaaggaacctgcagcacgatccttgatcatttggatgtttggagagtatagcttcatgggggatctcactacaaagattgttcctcctgttctcaagtatcttgcgtggtccttcgttgctgaagtggtggaaacaaagcttcaaatcctaaattcttctgccaaggttataatgcgttgtacagaagaagacatggaagaattcaaaagcatagttgcatatgtcattgagttggctacgtgtgacttgaattatgatgttcgtgatcgtgctcgtttactatcaagactcttgccgtgctacatgactcaccaagggtcctcacatcaacctcagaatggtgatatctataaagagctagccaatcatatatttaatgggaagttgcagccaacatctcatccagcaagcaactatcgcatatatcttccaggttcactttcgcaggttgttcttcatgcagcccctggttatgcaccacttccaaagcctcaaagtatggaattaaaccataatgtcacggcagcaattagaggcaaggccaaactttctggaagtgactccgatgctgaatctggatcttcaacatatgagagcagctctgtttatgattcggagagtgaaggtgctggcctatcggacagggatactgttgaatcccatcaggctcaagaagataaccaggatgctccactggtacagatatatgatgctagtatacagcaaggccaggcaggtcaaaatactgaggaaaatttggcagatcttatcagtaccgatttgactgagttgatgtctaagtcagccttggaatcatggcttgatgaggctcctgctgagccagttgttcagaatttgacacagacatcgtctgccagagtttcttttacaaaccgcaactttgagcgaaaacctaaactgcacacattgttagacccatctggcagtaatggattaagcgttctatatgccttctcgcctgaggtttcacccagatcacgtttgctagtatgtgtagacctatattttgagaatgtcactacacagcagctaacagatataaccattgaatctgaagaggcttctagcagtgtggattttatagaccaaacatcagaaggatattcgggtgtccctactatcgttcctgtggaagggatacattcgttggccccacaacaaatggcaaagttggttcttcaggtccattttcatcaccatatcttgcctctaaagctgtctgtgttttgcaatgggaaaagacatccagcaaaacttcatcctgacattgcttatttcgttcgtccactacccatggacctaaatactttcctatgcaaggaaaaccaattgaggggaatgtttgagtatgcgaggaggtgcgctttcaaagatcatcttcagaagctaggtcacgaggacagtgcagagcacatcgataagaaccttcaggtggcccagagtgttgcttcaaaaatactgagcaatgctaatattcaccttgtctcaatggatatgccagtaaccttcagtgtcgatgacgcctctggcttgtgttggagattcagcggtgaaatcctgagcacttcaaaaccttgcctgattaccatcctggcggaagggcgtgcctctggtccgctggaccttgctgtgaaggtgaattctgaagatacggtgttcgccctgaatctcctgaacagagttgtggcgatcatagattgaggtgagcatgaaattgtacattatcaacaaatagaagaggtatttggcaagcgcgtgactatttgtaagaaagtcttgttgaataatagcatctccaatagctctaaaaaaagaattgtgaaatgattgagttttacagcttgatgtgaaaaaagtgagtataatggttgtgtactaagaataccagagaaaatcgaagagatgggtgtagtctttggatcggtggatcgtcgacattggtggcatacataaggaagtttgggttgaatggatttaataacatacgtcttgtatgtggttgatattttgatgcaaaaaagatcagggattacatgtccagataatgtctaagctagcgagcaagagtcagggtgcgtttgattctgcattttgatgttctagagggcacttagtatcattcaagtgtgtgtcttctttggatgctgacagtgactcataa

SEQ ID NO: 2006 - DNA, 3829 bp, Zea Mays
ccccggccccaaactagccaacggcggcgagatccagatccaccgcaccggacccggacccgcccaacgactccggccactttttacttactagccagcggcggcgaaatccagatctccatagcaccggacccggacccgcccgccccgctggaacaggatgttcggacttcaggcgagcggcgcggcggcctcgtgggtggtggggcggatgggcaccgacgcgcatctctacgacgaccccgacgacgcctccatccccgagctcctcgactcccgcttcgacgccgacaaggtcgacgccctcaagcgcctcctcgccctcatcgcgcagggcgtcgacgtcgcgcacctcttcccgcaggttgtcaagaatgtggcgtcgcagtcgctcgaggtcaagaagctcgtctacctctacctcctccactacgccgacaagcgccaaaacgaagcccttctttctattaacatcttccagaaggatttatcggatataaacccactggtgagggcttgggccttgcgcactatggctggcattagactacacgttgttgctccgcttgtgttggttgctatcaagaaatgtgccagggatccgtctgcgtatgtaaggaaatgtgctgcctacgcactttgtaagctgtgcgacttgattccagacgaaaatgcggctttggaggagatcgtggacaccttgttcagcgacaattcccctggagtagtaggagctgccgctgttgcatttaagtcggtctgtccaagttgtttaccgttagtatcaaaacatttccggaggctatgtgagaccctccctgatatcgaggaatggactcagatcgtcctcatcgagatcctcttgcgttatgtaatagccagacatgggttggtcaaggattctttactctttgcttcagatttaccgacagagattcatggcgttacagattcagatgctgttgctagcgtgcccacccaatctgattctatcgtcaatggggtttctgatactatatcaagcatcatgctgttccggcactacatcgaacaatgctcaggttcctctgatagagaaggcaataatttagaattatcgtctgtcaccgcaaacaacaacgatgatgtcacaattcttttgaaatgtacatcacctcttctatggagtcgaaatagtggagttgtacttgcagcagcaagtgtgcattggatcatggctcctattggggacatgaagaaaattgttggcccaattttgtttactctacggtcatctcctgatgcagcatatgtgatgcttggcaacatagtagtttttgtcaagacaatgccatcattgtttgccccgttttatgaggacttctttgtaaacacttcagatccgtaccagacgagggctttgaagcttgaaatactgaccactattgccacagagtcatctattccggccatttttgaagaattacagaatcttttattagtaactcagttcacttagatggagaagatgctgttttggttcaagcaatcttgtcaatcaaagcaatagtgaaaatggatccagtatcccacgaaaaggtatgttgtaatgttcaatcatgcattagagctgtaattgtccgcttggttcgtggtttggacaaactcaaggaacctgcagcacgatccttgatcatttggatgtttggagagtatagcttcatgggggatctcactacaaagattgttcctcctgttctcaagtatcttgcgtggtccttcgttgctgaagtggtggaaacaaagcttcaaatcctaaattcttctgccaaggttataatgcgttgtacagaagaagacatggaagaattcaaaagcatagttgcatatgtcattgagttggctacgtgtgacttgaattatgatgttcgtgatcgtgctcgtttactatcaagactcttgccgtgctacatgactcaccaagggtcctcacatcaacctcagaatggtgatatctataaagagctagccaatcatatatttaatgggaagttgcagccaacatctcatccagcaagcaactatcgcatatatcttccaggttcactttcgcaggttgttcttcatgcagcccctggttatgcaccacttccaaagcctcaaagtatggaattaaaccataatgtcacggcagcaattagaggcaaggccaaactttctggaagtgactccgatgctgaatctggatcttcaacatatgagagcagctctgtttatgattcggagagtgaaggtgctggcctatcggacagggatactgttgaatcccatcaggctcaagaagataaccaggatgctccactggtacagatatatgatgctagtatacagcaaggccaggcaggtcaaaatactgaggaaaatttggcagatcttatcagtaccgatttgactgagttgatgtctaagtcagccttggaatcatggcttgatgaggctcctgctgagccagttgttcagaatttgacacagacatcgtctgccagagtttcttttacaaaccgcaactttgagcgaaaacctaaactgcacacattgttagacccatctggcagtaatggattaagcgttctatatgccttctcgcctgaggtttcacccagatcacgtttgctagtatgtgtagacctatattttgagaatgtcactacacagcagctaacagatataaccattgaatctgaagaggcttctagcagtgtggattttatagaccaaacatcagaaggatattcgggtgtccctactatcgttcctgtggaagggatacattcgttggccccacaacaaatggcaaagttggttcttcaggtccattttcatcaccatatcttgcctctaaagctgtctgtgttttgcaatgggaaaagacatccagcaaaacttcatcctgacattgcttatttcgttcgtccactacccatggacctaaatactttcctatgcaaggaaaaccaattgaggggaatgtttgagtatgcgaggaggtgcgctttcaaagatcatcttcagaagctaggtcacgaggacagtgcagagcacatcgataagaaccttcaggtggcccagagtgttgcttcaaaaatactgagcaatgctaatattcaccttgtctcaatggatatgccagtaaccttcagtgtcgatgacgcctctggcttgtgttggagattcagcggtgaaatcctgagcacttcaaaaccttgcctgattaccatcctggcggaagggcgtgcctctggtccgctggaccttgctgtgaaggtgaattctgaagatacggtgttcgccctgaatctcctgaacagagttgtggcgatcatagattgaggtgagcatgaaattgtacattatcaacaaatagaagaggtatttggcaagcgcgtgactatttgtaagaaagtcttgttgaataatagcatctccaatagctctaaaaaaagaattgtgaaatgattgagttttacagcttgatgtgaaaaaagtgagtataatggttgtgtactaagaataccagagaaaatcgaagagatgggtgtagtctttggatcggtggatcgtcgacattggtggcatacataaggaagtttgggttgaatggatttaataacatacgtcttgtatgtggttgatattttgatgcaaaaaagatcagggattacatgtccagataatgtctaagctagcgagcaagagtcagggtgcgtttgattctgcattttgatgttctagagggcacttagtatcattcaagtgtgtgtcttctttggatgctgacagtgactcataa

SEQ ID NO: 2007 - DNA, 3943 bp, Zea Mays
ccccggccccaaactagccaacggcggcgagatccagatccaccgcaccggacccggacccgcccaacgactccggccactttttacttactagccagcggcggcgaaatccagatctccatagcaccggacccggacccgcccgccccgctggaacaggatgttcggacttcaggcgagcggcgcggcggcctcgtgggtggtggggcggatgggcaccgacgcgcatctctacgacgaccccgacgacgcctccatccccgagctcctcgactcccgcttcgacgccgacaaggtcgacgccctcaagcgcctcctcgccctcatcgcgcagggcgtcgacgtcgcgcacctcttcccgcaggttgtcaagaatgtggcgtcgcagtcgctcgaggtcaagaagctcgtctacctctacctcctccactacgccgacaagcgccaaaacgaagcccttctttctattaacatcttccagaaggatttatcggatataaacccactggtgagggcttgggccttgcgcactatggctggcattagactacacgttgttgctccgcttgtgttggttgctatcaagaaatgtgccagggatccgtctgcgtatgtaaggaaatgtgctgcctacgcactttgtaagctgtgcgacttgattccagacgaaaatgcggctttggaggagatcgtggacaccttgttcagcgacaattcccctggagtagtaggagctgccgctgttgcatttaagtcggtctgtccaagttgtttaccgttagtatcaaaacatttccggaggctatgtgagaccctccctgatatcgaggaatggactcagatcgtcctcatcgagatcctcttgcgttatgtaatagccagacatgggttggtcaaggattctttactctttgcttcagatttaccgacagagattcatggcgttacagattcagatgctgttgctagcgtgcccacccaatctgattctatcgtcaatggggtttctgatactatatcaagcatcatgctgttccggcactacatcgaacaatgctcaggttcctctgatagagaaggcaataatttagaattatcgtctgtcaccgcaaacaacaacgatgatgtcacaattcttttgaaatgtacatcacctcttctatggagtcgaaatagtggagttgtacttgcagcagcaagtgtgcattggatcatggctcctattggggacatgaagaaaattgttggcccaattttgtttactctacggtcatctcctgatgcagcatatgtgatgcttggcaacatagtagtttttgtcaagacaatgccatcattgtttgccccgttttatgaggacttctttgtaaacacttcagatccgtaccagacgagggctttgaagcttgaaatactgaccactattgccacagagtcatctattccggccatttttgaagaatttcagatccagataggaaatttgtagcagataccgttgcggctattgcattgtgtgcccagaaacttccctctattgccacttcttgcctcgagggacttttggcacttgtattttatgaatcttttattagtaactcagttcacttagatggagaagatgctgttttggttcaagcaatcttgtcaatcaaagcaatagtgaaaatggatccagtatcccacgaaaaggtatgttgtaatgttcaatcatgcattagagctgtaattgtccgcttggttcgtggtttggacaaactcaaggaacctgcagcacgatccttgatcatttggatgtttggagagtatagcttcatgggggatctcactacaaagattgttcctcctgttctcaagtatcttgcgtggtccttcgttgctgaagtggtggaaacaaagcttcaaatcctaaattcttctgccaaggttataatgcgttgtacagaagaagacatggaagaattcaaaagcatagttgcatatgtcattgagttggctacgtgtgacttgaattatgatgttcgtgatcgtgctcgtttactatcaagactcttgccgtgctacatgactcaccaagggtcctcacatcaacctcagaatggtgatatctataaagagctagccaatcatatatttaatgggaagttgcagccaacatctcatccagcaagcaactatcgcatatatcttccaggttcactttcgcaggttgttcttcatgcagcccctggttatgcaccacttccaaagcctcaaagtatggaattaaaccataatgtcacggcagcaattagaggcaaggccaaactttctggaagtgactccgatgctgaatctggatcttcaacatatgagagcagctctgtttatgattcggagagtgaaggtgctggcctatcggacagggatactgttgaatcccatcaggctcaagaagataaccaggatgctccactggtacagatatatgatgctagtatacagcaaggccaggcaggtcaaaatactgaggaaaatttggcagatcttatcagtaccgatttgactgagttgatgtctaagtcagccttggaatcatggcttgatgaggctcctgctgagccagttgttcagaatttgacacagacatcgtctgccagagtttcttttacaaaccgcaactttgagcgaaaacctaaactgcacacattgttagacccatctggcagtaatggattaagcgttctatatgccttctcgcctgaggtttcacccagatcacgtttgctagtatgtgtagacctatattttgagaatgtcactacacagcagctaacagatataaccattgaatctgaagaggcttctagcagtgtggattttatagaccaaacatcagaaggatattcgggtgtccctactatcgttcctgtggaagggatacattcgttggccccacaacaaatggcaaagttggttcttcaggtccattttcatcaccatatcttgcctctaaagctgtctgtgttttgcaatgggaaaagacatccagcaaaacttcatcctgacattgcttatttcgttcgtccactacccatggacctaaatactttcctatgcaaggaaaaccaattgaggggaatgtttgagtatgcgaggaggtgcgctttcaaagatcatcttcagaagctaggtcacgaggacagtgcagagcacatcgataagaaccttcaggtggcccagagtgttgcttcaaaaatactgagcaatgctaatattcaccttgtctcaatggatatgccagtaaccttcagtgtcgatgacgcctctggcttgtgttggagattcagcggtgaaatcctgagcacttcaaaaccttgcctgattaccatcctggcggaagggcgtgcctctggtccgctggaccttgctgtgaaggtgaattctgaagatacggtgttcgccctgaatctcctgaacagagttgtggcgatcatagattgaggtgagcatgaaattgtacattatcaacaaatagaagaggtatttggcaagcgcgtgactatttgtaagaaagtcttgttgaataatagcatctccaatagctctaaaaaaagaattgtgaaatgattgagttttacagcttgatgtgaaaaaagtgagtataatggttgtgtactaagaataccagagaaaatcgaagagatgggtgtagtctttggatcggtggatcgtcgacattggtggcatacataaggaagtttgggttgaatggatttaataacatacgtcttgtatgtggttgatattttgatgcaaaaaagatcagggattacatgtccagataatgtctaagctagcgagcaagagtcagggtgcgtttgattctgcattttgatgttctagagggcacttagtatcattcaagtgtgtgtcttctttggatgctgacagtgactcataa

SEQ ID NO: 2008 - DNA, 1967 bp, Zea Mays
tcggtggcggtgtcgccatcatcctgcacgccaccagcgacgaacacgcacgcgacgcgacgcagccttgtcacgccaggacaaatccagcgctccccaaagcagaaagaccgcgacccaaagcaagctcaagccgctccgctcctccagtctccagtctccaccgcccgccaaccccgagatatacctcccttcctctcgaagcttcgtctgcagacgaagtcgccggctcttccctcggcgctggtgccggtgggttgcctgtggcggtgggtgggtggccgggtggtggtgttgctgggatgcccgccgcgacggcgaccgcagcccgcctccgcgtgccgctgccaaaagccgcccaccactcgccctgctcgagccggcgccaccccgactgccgccgccgctgacgagacgagcggccacacgcttggcgcgcgccatggatgccttgtcccgccctgctgtcgtcatcgacaacggcaccgggtacacgaagatggggttcgcggggaacgtggagccctgcttcatcacccccactgtcgtcgccgtcaacgattccttctccggctccgcccagccggcggtgaggggcacccccgccagggggaactggctcgctcagcacagcgccggcgtcatggctgacctcgacttctacatcggcgacgaagcgctggcccgatcccgcgccagcagctcgcatagtttgagctatcccatccgcaacggccaggtggagaattgggataccatggagaggttctggcaacagtgcatcttcaattacctccgtccaacctgtccttgcgctggctgctgggtacactacaaccaagtgtgaaatgacaggtgttgtagttgatgtgggtgatggggctacccatatcgttccggttgctgatggttatgtcattgggagcagtatcagatctattccaattacaggcaaggatgttacccagtttattcatcaacttctaaaggaaagaggtgagaacattccagcagaagaatcttttgatgtagcaagaaggattaaagaaatgtactgctatacttcttcggacattgtgaaggaattcaataaacatgacaaggagccatcaaagtacattaaacactggacgggcaccaaaccgaagactggtgcaaaatacacatgtgacattggatatgagcgattcctagggcctgagatcttcttcaacccagagatatataacaacgacttcaccactcctttgcaagttgttattgacaagtgcatccaatcatctccaatcgacacaaggagggctctttataagaatattgtcctgtctggaggctcgactatgttcaaagatttccataggaggttacagcgggacctaaagaagatagtggatgcacgggtccgtgcatctaatagccggcttattagtggggatgctaaggcccagcctatagaagtgaacgtggtcagtcatccgatccagagatatgcggtatggtttggtggctctgtgcttgcttcaaccgccgaattctacgaggcttgccacacaaaggcagagtacgaggagtacggtgccagcatctgccgaacgaatcctgtcttcaaagggatgtactgactcagagcggttccctgtggctgacgtcgtggatgatatccactcaaagcttaaatggggagaagtgacagtggtcgtggagacaggactgtcgagagggatcctgatcgtggggaagcatagccgtacgagctgtacaaaagagaagcgcaaatagataggtttatgtttcaccatacaatttagatgctggtaggcctgacaggatgggtttgccacccctgctgaattgggtggcattgtaatttgtagcgtcaacacttctggcggtgcgagattgctccttgtatacatgttgattcggcagcgatgttttctctctctcggtggcttagtaaaaaaata

SEQ ID NO: 2009 - DNA, 2056 bp, Zea Mays
ggacatgcacggagacggaggcgtcggtggcggtgtcgccatcatcctgcacgccaccagcgacgaacacgcacgcgacgcgacgcagccttgtcacgccaggacaaatccagcgctccccaaagcagaaagaccgcgacccaaagcaagctcaagccgctccgctcctccagtctccagtctccaccgcccgccaaccccgagatatacctcccttcctctcgaagcttcgtctgcagacgaagtcgccggctcttccctcggcgctggtgccggtgggttgcctgtggcggtgggtgggtggccgggtggtggtgttgctgggatgcccgccgcgacggcgaccgcagcccgcctccgcgtgccgctgccaaaagccgcccaccactcgccctgctcgagccggcgccaccccgactgccgccgccgctgacgagacgagcggccacacgcttggcgcgcgccatggatgccttgtcccgccctgctgtcgtcatcgacaacggcaccgggtacacgaagatggggttcgcggggaacgtggagccctgcttcatcacccccactgtcgtcgccgtcaacgattccttctccggctccgcccagccggcggtgaggggcacccccgccagggggaactggctcgctcagcacagcgccggcgtcatggctgacctcgacttctacatcggcgacgaagcgctggcccgatcccgcgccagcagctcgcatagtttgagctatcccatccgcaacggccaggtggagaattgggataccatggagaggttctggcaacagtgcatcttcaattacctccggtgcgacccagaagatcattattttcttctaactgagagccctctgactgcccccgagacccgggagtacaccggagagatcatgttcgagacgttcaatgtgcctggcctctatattgcagtccaacctgtccttgcgctggctgctgggtacactacaaccaagtgtgaaatgacaggtgttgtagttgatgtgggtgatggggctacccatatcgttccggttgctgatggttatgtcattgggagcagtatcagatctattccaattacaggaaagaggtgagaacattccagcagaagaatcttttgatgtagcaagaaggattaaagaaatgtactgctatacttcttcggacattgtgaaggaattcaataaacatgacaaggagccatcaaagtacattaaacactggacgggcaccaaaccgaagactggtgcaaaatacacatgtgacattggatatgagcgattcctagggcctgagatcttcttcaacccagagatatataacaacgacttcaccactcctttgcaagttgttattgacaagtgcatccaatcatctccaatcgacacaaggagggctctttataagaatattgtcctgtctggaggctcgactatgttcaaagatttccataggaggttacagcgggacctaaagaagatagtggatgcacgggtccgtgcatctaatagccggcttattagtggggatgctaaggcccagcctatagaagtgaacgtggtcagtcatccgatccagagatatgcggtatggtttggtggctctgtgcttgcttcaaccgccgaattctacgaggcttgccacacaaaggcagagtacgaggagtacggtgccagcatctgccgaacgaatcctgtcttcaaagggatgtactgactcagagcggttccctgtggctgacgtcgtggatgatatccactcaaagcttaaatggggagaagtgacagtggtcgtggagacaggactgtcgagagggatcctgatcgtggggaagcatagccgtacgagctgtacaaaagagaagcgcaaatagataggtttatgtttcaccatacaatttagatgctggtaggcctgacaggatgggtttgccacccctgctgaattgggtggcattgtaatttgtagcgtcaacacttctggcggtgcgagattgctccttgtatacatgttgattcggcagcgatgttttctctctctcgg

SEQ ID NO: 2010 - DNA, 2025 bp, Zea Mays
ccagtctccacgcccggttattctggggtggacggctttgatttgcttcgaagggagtgagattggttgaagccttcgaccaaggttgtcgatggattctgggatttgggcatctgtttggagcttcatcaagttcctgcctttcttctttgcgcttctcctcctgggcatcatcaaaggtgctttgtttggcccatgggcatggcttgtcatgacaattggaatttctgcacttattctaggcttatggcctatgcatgtgatttggacatattactgcatcatcaggtagagtttgcagtcctgaaaggaaagtcatgcaatgtggtgtatttggatgtgcttatcacctttttatgaaagcagaaccaagatggtaggaccggtcgtaaagttgctgcttcttattgttgcaactgcggttttggttatatggctaataattggcgtcgtgggaagcatccttgctggtttggcctatggctttctcgcaccagtaatggctacatttgatgcgattggggaaggaaaagaaaatccacttgttcactgttttttggatggaacatggagcactatcacaggaagctgtacagttgtcagggacatgaaagacatgttggtacactcatatttttcaatcatggatgaagttcgtcttcatgcaccacccgacggcaagccatatgagataagttccccgttatgctattcaaaggatggaagcggttgattgaagatcttattggcagagaaggaccttttcttgagacagcttgcatgccatttgctggtcttgcaattcttctctggccatttgcagttataggagcttttatagcctctgttatttgcagtgttccttttggtgtatatgctgctgtggtggtttatcaggaatcctcacttttcttgggactgtcttatgcaatatcatcagtatccatctttgatgaatatacaaatgacgtacttgacatggcaccaggatcttgctttcctaggtttaaatataggacaaatgaagcttcctcacatggtggctctctctcgagacccgcttcattcaaggacaagcatgatggaaagaaagcccctcagcgtgtaacatcatttaaaagtagctttgatgagttcaatccattcaagttgctagatcaccttttcatagagtgtaagcaccatggcaaggatctggtcgctgaaggagtgataaccccaaaagatatagaaggaacaaaggcaggcaaagccagcactggggtacttaatgttgggttaccagcatatgttatccttaaggcactcctccgatctgctaaagccaattctgatggtctcgttctaagtaatggatctgagataacatccgacaataggcctacgagtaaaatctttgagtggttttttgaccctctgatggtaatcaaagatcaaatcaaagctgaaaacttcacagaagaagaggaagcataccttgagaagcaagtgctcttgattagtgatccaaagcgcatcaaggagaatctcattcggcttccaccattgagtgagagaaaacaagcagaaatagaagcatttgctcgaaggttgcaagggatcacaaagtcgatatcaaggtaccccacatccaagcgtcgcttcgacgcccttgtgaaggctctttcagaagagcttgcaaggacaatgggtggtaatcaatctgccaatgggtctcaggtccggaagataagaagtggtatcgtccgaatgcttagtcagagatcactagggaaaacaacaggcatcccgggcgatgatcatgaggctcagctaacaagcgatggtttcacttcatgatgttctggaggtgttcaactgtaacctcagtttgaaaaggagatactacttttctgtgttattttgctaactggatacaaagaactgacacttctgtatgaagagtttaacctcaaccatctcgaggatgagttgtttgttttcaggactgtatctggacaacactgtagtaatacttcgtaacag

SEQ ID NO: 2011 - DNA, 4490 bp, Zea Mays
cggtacagctgcgaagccggcactggctctgctctgctcgccagcagcaccgacctccactctacgtctccaccagaccaccagcaaggcgagctcctttttcactcccccaaatctctgaataaaaaatcgcgcaagcaacctcgctccaccggcctccgcaagttcgttcagtcaggtcaggtcccagcccacgcagcatttgacagcgcgaggcggttgcccagtcagctggggtggacggctttgatttgcttcgaagggagtgagattggttgaagccttcgaccaaggttgtcgatggattctgggatttgggcatctgtttggagcttcatcaagttcctgcctttcttctttgcgcttctcctcctgggcatcatcaaaggtgctttgtttggcccatgggcatggcttgtcatgacaattggaatttctgcacttattctaggcttatggcctatgcatgtgatttggacatattactgcatcatcaggatggaacatggagcactatcacaggaagctgtacagttgtcagggacatgaaagacatgttggtacactcatatttttcaatcatggatgaagttcgtcttcatgcaccacccgacggcaagccatatgagataagattgctacaaattcctggtgcaatatttgctgctgcttgtgggcttgtagtggatgcaataatgttcacactgattgccttgtacaagttccccgttatgctattcaaaggatggaagcggttgattgaagatcttattggcagagaaggaccttttcttgagacagcttgcatgccatttgctggtcttgcaattcttctctggccatttgcagttataggagcttttatagcctctgttatttgcagtgttccttttggtgtatatgctgctgtggtggtttatcaggaatcctcacttttcttgggactgtcttatgcaatatcatcagtatccatctttgatgaatatacaaatgacgtacttgacatggcaccaggatcttgctttcctaggtttaaatataggacaaatgaagcttcctcacatggtggctctctctcgagacccgcttcattcaaggacaagcatgatggaaagaaagcccctcagcgtgtaacatcatttaaaagtagctttgatgagttcaatccattcaagttgctagatcaccttttcatagagtgtaagcaccatggcaaggatctggtcgctgaaggagtgataaccccaaaagatatagaaggaacaaaggcaggcaaagccagcactggggtacttaatgttgggttaccagcatatgttatccttaaggcactcctccgatctgctaaagccaattctgatggtctcgttctaagtaatggatctgagataacatccgacaataggcctacgagtaaaatctttgagtggttttttgaccctctgatggtaatcaaagatcaaatcaaagctgaaaacttcacagaagaagaggaagcataccttgagaagcaagtgctcttgattagtgatccaaagcgcatcaaggagaatctcattcggcttccaccattgagtgagagaaaacaagcagaaatagaagcatttgctcgaaggttgcaagggatcacaaagtcgatatcaaggtaccccacatccaagcgtcgcttcgacgcccttgtgaaggctctttcagaagagcttgcaaggacaatgggtggtaatcaatctgccaatgggtctcaggtccggaagataagaagtggtatcgtccgaatgcttagtcagagatcactagggaaaacaacaggcatcccgggcgatgatcatgaggctcagctaacaagcgatggtttcacttcatgatgttctggaggattcagaactctcatcacttttatctcttccggactatgagagctttgttagagaaagattggtcaagaacataaatagaaaagggaatattgatgacacttcatccttctctactattgttgaacagttgagcaaccaaactgaatacctttctagttttttaaaagatttgtcaacctacatgaatagcaatattattgtggtgcttcgttctctgcaactagtgagcaacacctttgcccatactctagaagagcatgacatgttgaaggttgaattggggaacaaggatgctcataacagagctcaagaatctgaagtgctttctctacaaaaagatctgagagcaatgtcatcaaaatgtatttattgcgtccaacaaattgaaattgtttttgacgatatggttgatcttggatatgcaatagacttggctacaggcagctcaagcatagggtctgaactagaggtaactgtgtctgatctgaagaatgaggataccagtgattatagtaaggtggctgatactttgcttgctacaattgacacacttaagtccaagtctgaaaaattatctaccattaaggggcttgtgataacttcattggatgacttcaaaatgaagctgaaacaagctgaagcagctgctgaaactgcttcacatgagcatcagttgtctgttgaaagggtatgcatgctggagaaagaactcaaaatattacaggatgagtgcaacaaaatggaactaaatattcaagagtataaggaaagggagggtgcattgaaggcaagggagttagagttgctatcagttgagcacactcaaatttcagcagacagaggtttaactgacaatgcaatttcaaaagatcaaacggaagctcttgttgagaagataagtaagttaaatatgctgtcaggcgagtcaaatgtgcagagggaagaggctacaagtccgcttgacaaactttttgttgtcattgatgaattcagtgcacttcaacacgaggttgagaccttaagatatgaaaatgaagatttacagttaaatattgaatcctatacccgtgaaattgaacagctaagagaggtctccagaaatagtgatctaactaatagggagttggaatccaaaggaagtgagcttcttgaggtagctgttagtatggagcgaatgattcagcggttaggatatcttggaggaaaagatgtactagaagataacaaacctgctagcacacaagctctcttatcgaagctggaaaagctaataatagcttcaagtactgaatctgggaattctaaatccataatacaggagctgggagcaaagctgcagtcaagggaaaaggcagttgatgagctatcaacaaaagtaaagatgctcgaggatttgtgccatgcacaactttctcagccagaacctagtaaagacagatcatttgaagcatcttcctcaacaattgggtcagatatgtctgatattgaagatgcgggaccagtgggcaagacaacatcagtttcatctgtttctacagctgcacatgctagaacaatgcggaaggggtcagcggatcatcttgttgtcaacattggttcagagtcagaacgattgattgctgcacaagattcagatgacaaggggcgtataaaatcgctccatacatctggcttcattccagctcagggaaagcacatcgctgatagggtcgatgccttctgggtctcggggagccaaattctgatgaaccggccacgagcaaggctagggcttatgttgtactggctggctgtgcacctatggttgatgggcagcatcttgtgacaccgcttctcaataccgagacccatctcataattgtacaatagcacgtattagcagtttcttcttccattcatacaatacatggtagatgttagaaataccatttttttcattgtcttcctcctgctgagatttgcacttgagcagtatgtgttgaatttttgcacacaagatgtaacgcgcagaaaaaataacgttgtcattctttggtatagtgaagaggtggtaattgtatttgtagatgtggtggccctgatcacctggtgggccccatcatcgtaaattcgttgtttgaaattgcgtgcgtttgaggtctgacaatgtagaggccttatgggtcgacctttgacgtatgaatagaaacgtatatagttggttacacttttcgctcctccatgaataattttcgattggaggtgactggttatacagtcacaaatctttcctccaaaaaacataaataaaggagtgaatatgtatttgttatcatgaatctgtgtagtttcataagggataaggcataaatcttcatggcatcatttgtgtttttccacacaatttgtaatgcaaaagaatgtagggtgtttcaaccaaacaacaagaaacaaaaaagatttaaatacatccttaacatactaacatttttacggtggggctgctcatttaaactggactggaaacaaaataacaccgtaaaaatgttggcttttgacaaatctgacactgaatacgccaaagaccacagttgttaccaaaagaaatgcagagttccaatctctcactctcac

SEQ ID NO: 2012 - DNA, 1630 bp, Zea Mays
cttaatccccgcatccagtccctcccgcatccagtccctcccgcggtgcaatccagacgcaaacaactccattgaccccgattcgcgtacatgctctctcacagcaatccctgctctctcctcgccaacgcctctcgataaactccatggaaggttcacactgatgcgctctgattccttgctccacgctctctcctgctctcgcgctctacatggaagcttgtaggtactgatcagagggccaggtgctatccacgaatgatagtgtaatgtctaggaacgatagctgatttggaaaacctgcaaagtctattcacaacagcgaggtcatattttcatattgattttctgtacctgggactttggagaggggaacacgttccaaaaccggagcgtttcatcaccagccccagtaactatggtctgttggtatgacctcgctgaggttgttgccctcaccgagagcatcggcaagccgctcgccgaggtgctcaaggagctcgggaagagggttccagactcccttgtgaagacccgcatcgaggatgatggcttcactatcaaattttatttcgcttgtgggcaagtgaaatcatatgagagggcaataatctccgtggagcaactgaatgctattcttagacaggcttctaaaaccaaggaaaaggaagatctcaggaagatagataactggcaatatattagttgtgtcaccctatgggttcggtttctgtgttgtcactataaggattacaatctccatcccttattttctcaagttcttcaattgctctttgactgcctagaattaagagaagtttctcagaaagaacaaacacaaagaacaaagatcaacttttcgtctttgttgaaggtgccaaagaacctgctgaaaccaagggattttcaagaggagtgtattctttcagcgattcagattctatcagcacattttgcccagtggagttaccatgtttccttcctagaagtagccaccattcctcttgtcctcttgaagaggctacatgagcagacaacagttgaatcacttcgccatcctattaagtgtttgatagaccaggtgacggagaacaaggattttatagaaaggaaaagagaggttgtatccttttcaccaaatgataaggcgtcagttgatagcttccttcagtcaattgcttcacatttactattcaacatctggcctgctgagtttgctgaaaaacatattactgttgaatgcaggaggagaagtccacacagaatgtcggacagggacgccgtggcccccgcgggcggcggtgaccggaaggcggccaagctcgggagctggagcagcatgagcagcaactacggcaacaagaagcggaagagcagcagcagcagcttcgggaggagatccacatccacctgcgaggaaaggcagggggtcttccgcatgctcatgagctggaaccaggagagccggttcagcaacaagatcaagacgacgacgagcaaagaaagatgaacgaaacgaagtgttcttagcttggtgtgattattcggggggttgcttgctggagggtttttgttcgtttagtgtctagccttagcttacttattacttttgttagtactctactagcag

SEQ ID NO: 2013 - DNA, 2743 bp, Zea Mays
tttttaaggtgaaacaccataagagctggagatccaacacacaatgtatttctcttttgtctttatgtgcaaagaacaatgaaggcaaagagttggcccttagtttttctcaaggatcagatttcgttgaaatttcttctgatgttgacaagctgtgttcaatttggagcacagtttctctaagggttgatagttctgaggatgacagtgatgatggaaaaccttacaaggttataccaagaagttcgtaccatcttgtcaacaagaaaaacaactatggcattgcatttgttgatggcttgctagagtttgtgaaaaagccgggaaatccatttaaagtgcaggtttttgatgaatctattttttctgatgcttcaagacttactgttaaccatatgaaatgggacaattatacttacttggatgtggacgatgatgtgcctttttctgtgagggatagattggcaagtggtgcaagttctcaacatgtaatcatcaatgttgacaagattgtttttaccatcactcatgaagtctctgatactgatatttttttcccacttgtccaaacctgcataagtgatatccgtgttgttacgcaaatatttccatctaaaatcaggattctaagttcattcaaagtctcagcgcagtatttcattgcacgaagaaatctgtgggaagaactcatctctcctatcacctcctatacattctttcgatttaagttttttaccccagatccagttactaagtatggaaagacggccatgcgtttcttctttcaattaaagcagaaggttcatcttcgttcttgcaggtggatgtatttattaatgagctttcatttgacatccttctatatttggttggaaagttaaacttgatgggtccatatgctgtcaaaagctcggctatctttcctaactcctgcaagatagagaacagctcaaggctggcacttgtgtgtcattttaaagataatggggatgcactaattcctgggcaacagtcaacttcagttttcttgagccacttaacatttgatgataatatttcacatgatcaaatggtttctatttgcttactcaaggaaggtgtattttcaactattccaatcagcatttctctccacgagtctggtatttttgcatggagaacccgtgtgtcaccagtcaaagacctgacaaccttttctggaccatttattgtggtcaaggtgtctcatagttctgaggaaggcttatctctttcagttcaacctttggttaggatccataataagagtgactttcctcttgaactccggtttcagaggccaaacaaagctagtgaagaggctgcatttgtcacagttagaagtggagatatggtcgatgaatctactggagtatttgacgccatggatttgtctggtggaccaaaaagagcattgatgtctctagctcttggcaagtaactatacattatcttggcatgatgttggttcccattttgcatgacacaaaatagatcttattagctgctaagttattgcatgatgatcgattgaaaactattggagaaaagggatagtaaaggttctccataggaccacactgtacataaacttagtttcctttggaaaatggtagtacttagaaatgattttaattgtagtgttaattctgcataccattctttgtatactttgcatttattcaacagactatgtagcttgtgtgagaaagaatttccatgttcaatgctttcatgggttttctagaacatgttcaatagctgtgtgtcgtttcattaagaagaaataagtaaaaaaaaggaaggttaggaattaaatcccatctctgccccaaagacacccacccacctacatcctagggtaaagctaagaacgctcgccagacttggggcctgcttgtcaaaagctgaaacaaacagattacagaccaactgttgaggtgaattttgaggaaataaactacgagaggagatttttctggcttttggtgtgctgagaagctaaaaatctattacaaaagtcaatagaaaaaattattacaaaagtcaatagcaaaaaggcaacgaccagaagctagaagccaaaagcaagaaaactaacttttgagccaaaagctgcagctcaaacaaacagggtatagcgaccaactcacttaacacaactagattgcagtgtaagtgtccttagaagcaaatcctggactgctgccccagccaagcgctgaacgtcgagagtcggggcagccagcccaatccgcatcggaatacgcggtgagggactggcaactcacttaacacaactagattgcagtgtaagtgtccttagaagcaaatcctggactgctgccccagccaaacgctgaacgtcgagagtcggggcagccagcccaatccgcatcggaatacgcggtgagggactggacagggccgactccaaggtggaggccggaggagagagtgcccttcaaatagcgcaggatccgcttgagcagcgccaggtggggctcgcgcgagtcgtgcatgaagagacacccctgctgaacggcgtaggccaagtctgggcgggtcagggtgatgtactggagagcgtcggcgatgctcctgtacatggatggatcagcaatgggggcaccatcagtggcggagagcttggcgtgagtgtcgacaagggtcgatgtagagtgacactcagccatgccagcgcgctggagaagctcgacggtgt

SEQ ID NO: 2014 - DNA, 286 bp, Zea Mays
gtcgctagcctactgctccctcccggcgctcgcctagtagcgcgccgacacggtgccctcgcccccacagtcgtgtcctccggtctgtgggcgtccacctatggcgctctcagacgtcggcaccatgtcggctaagcggggaggtggcggttgcttcttggttccagtccctcgggcactcgctctcttgcccgacaatgactgggcgcccaccaccctacgccatgtctccaactcgttgccaagccttcgtgagggaggaaaagtagggtagccagaatctctg

SEQ ID NO: 2015 - DNA, 1896 bp, Zea Mays
gtgtcaagaagatgtacccaatcagctgccactcaaagtcgacgctcctgcgcatcttcagccaatatacctggcgatcggcatcctcttttactccagaaaaataaagatcttctcgcaaaagaaaaaaaggaaaaaaaagagaaaatgtcaatgcactgcaatggttgattctgaaacttggatcagatagacactgatactcattctactcatcaaataagcgttgtcagatcacggtgctacacacactggttcagtgaatctgcaggtgctgctcatatggaaacatacactactgatgacgctcttacgctcatggggtttggaaagttccaagcacttgtccttgcatatgcaggaatgggctgggttgcagaagccatggaggtcatgctattgtcattccttggaccagtggtgcgggaagagtggaatgtctctccccaagacgagagtctgctatccagtgttgtgtttgctggcatgctaatcggagcttgtgcttggggctttatttccgacagatacggaagaaagagtgggcagtgggcatgtattttcatcttggttcttggagttcgttcctgcaggaaatcgtggcacttggatggctgtactatcagcattgagttggaggtggttgctggcattgtcttcccttccatgcttcctcttgcttcttttcttcagaatcacacctgagtcaccacgctatctttgcgcacaaaatagaatgactgatgcaaggtttgtcctggagagaatggccattgcaaaccaagcagctcttcctatgggagttctcacataccaccaagaaacaaaaactgaatgcattactcatgtttctgaggatgaacatcttattccagtcagagagaaggaacatacagataggaatgctattagttccaaatctggtgctgttgctgtattgcacaagctattatcacataacttgctcaaatcaactctacttctttggtttgtttactatgccagttccttcgcttattatgggataacattgctgacatcacaactaagtgatgtgaatagaagctgtaaatctgatctggtctttgaagtgcaccaaaataatggcaatctttataaagatacttttatcactagtttagcagctcgtgcttgtggcaccggtgccactacaactttatgtctatatgcccccgaggtgtatccgacatatgttcgctcaacaggggtcgggatcgcaaccgccatcggtaagatcggcggggttatttgccccctcgtcgccgtgggcatgctgcggagctgccatcagatggaagcggtgctggtgtttgagctggtgctgttcctcgctggggtctcctgcatcctcttccctgtggagaccaagggccgagaaatggactgagcacgcacggtggtggtagctcagcacatttgggcatccagatgggcttgtggttcatcttgattctgtataaacacaactctactacatccgcgacaagcttagcggatatgcaaaggggtgtaaacaggagctatagtaattacgagaaagaactggcaatgagcaatatttgtaacaggattattgttatagaacttcctcatcatcagtcaggaggtaaataaatatgtgaagttaaatagtaaccatgtggtggacagtgattataaacgaggatattctcgtggtgctggatatgcccaacgtcaattcgttgcgggcaacacacaacctaacgcgtgcctccaaacagctatcaattaattatcattacttgtacatggtaataaggttgtacgcgtgtccccccaatctctatcagcatcatacaatacaaggttgtcgtcttcctgaattcgctttcagttgcgtgagccgctttgctc

SEQ ID NO: 2016 - DNA, 3064 bp, Zea Mays
acccaatcagctgccactcaaagtcgacgctcctgcgcatcttcagccaatatacctggcgatcggcatcctcttttactccagaaaaataaagatcttctcgcaaaagaaaaaaaggaaaaaaaagagaaaatgtcaatgcactgcaatggttgattctgaaacttggatcagatagacactgatactcattctactcatcaaataagcgttgtcagatcacggtgctacacacactggttcagtgaatctgcaggtgctgctcatatggaaacatacactactgatgacgctcttacgctcatggggtttggaaagttccaagcacttgtccttgcatatgcaggaatgggctgggttgcagaagccatggaggtcatgctattgtcattccttggaccagtggtgcgggaagagtggaatgtctctccccaagacgagagtctgctatccagtgttgtgtttgctggcatgctaatcggagcttgtgcttggggctttatttccgacagatacggaagaaagtaaggatctgctccagcaaactctttatgtttcaatttacaggccttggcttcttaaggcaggcaggaataatttcaagtcctttaggattcacaggaaactgatttcatttctcactagtctgaagatattggatctaatcacacctacgtccaaataaccaatacagttttgacagtggtcgtggtactggtattagttttactatgtgacctgtggttggaatcagttcactgagtcaataaaccaatgagtcatttcagttagcgacctcatgtagtgaatcagcacggtaaaaggcaagcaatttgttcttctctttcgtctagtttgcacctctctcttttatcttccctcttgctacctgtaaaataataaaaccagagtgggatgcctcataaacggccagatttgcataaacaatttgataacccccagcactgctaaatagtgattttgccttcacaaagtcaggacgattatggttttcagtatagggtatagtttgtactagttgtcgttttagctcttttttatgtctatattcaaatacatgaagatgaacctagacacatatataaaacacatacatcaagtgttgtatgaacctactaattaattaaaacgaattttaatctgggacagagggagcattggttataccctattttttactatgattcttctctatgtttgatttgtgccaaacatacatgaaataaaccttgtattttttgtcaggactgttttattgctttcgactctgcttactagtggattgggtcttctaagtgctctatctattaactacttgtgcttgctggttcttcggttttttgtcggcataggagtgggcagtgggcatgtattttcatcttggttcttggagttcgttcctgcaggaaatcgtggcacttggatggttattttttcctttttttggactattggcacagtcttggaggcttcacttgcatgggattttgttcaagcaggcctctgaaaccggaattcttttttggaatgctccttgtcatgagtaacattgatttttttctgcaggtgtagtatatcatgactgttcacaaccatatttatcactttatcagttgcattatccatttgcagtatactgtcattatttctgtagcaatatttaagatatctcaatgtgtgatgcctgcctgatgatcatacttttacctacccatctgaactctgacttttctgcatctaataaaaatgtctggaattcagctgtactatcagcattgagttggaggtggttgctggcattgtcttcccttccatgcttcctcttgcttcttttcttcagaatcacacctgagtcaccacgctatctttgcgcacaaaatagaatgactgatgcaaggtttgtcctggagagaatggccattgcaaaccaagcagctcttcctatgggagttctcacataccaccaagaaacaaaaactgaatgcattactcatgtttctgaggatgaacatcttattccagtcagagagaaggaacatacagataggaatgctattagttccaaatctggtgctgttgctgtattgcacaagctattatcacataacttgctcaaatcaactctacttctttggtttgtttactatgccagttccttcgcttattatgggataacattgctgacatcacaactaagtgatgtgaatagaagctgtaaatctgatctggtctttgaagtgcaccaaaataatggcaatctttataaagatacttttatcactagtttagcagctcgtgcttgtggcaccggtgccactacaactttatgtctatatgcccccgaggtgtatccgacatatgttcgctcaacaggggtcgggatcgcaaccgccatcggtaagatcggcggggttatttgccccctcgtcgccgtgggcatgctgcggagctgccatcagatggaagcggtgctggtgtttgagctggtgctgttcctcgctggggtctcctgcatcctcttccctgtggagaccaagggccgagaaatggactgagcacgcacggtggtggtagctcagcacatttgggcatccagatgggcttgtggttcatcttgattctgtataaacacaactctactacatccgcgacaagcttagcggatatgcaaaggggtgtaaacaggagctatagtaattacgagaaagaactggcaatgagcaatatttgtaacaggattattgttatagaacttcctcatcatcagtcaggaggtaaataaatatgtgaagttaaatagtaaccatgtggtggacagtgattataaacgaggatattctcgtggtgctggatatgcccaacgtcaattcgttgcgggcaacacacaacctaacgcgtgcctccaaacagctatcaattaattatcattacttgtacatggtaataaggttgtacgcgtgtccccccaatctctatcagcatcatacaatacaaggttgtcgtcttcctgaattcgctttcagttgcgtgagccgctttgctc

SEQ ID NO: 2017 - DNA, 3083 bp, Zea Mays
cgctgatctgctctctaggcggctcgctcgttactcgttcgtcttaccgcctcccaacaaacagcgagcggcgcgacctaagccgctctgcgcccaccggccagccggggcggagagggaccgaccgctcctccgttcgaagtgccggtcctgagtcaccggcgtcgcccgcatccgctgctcagctcgcccgccagcctggtggcgatcggcatcctcttttactccagaaaaataaagatcttctcgcaaaagaaaaaaaggaaaaaaaagagaaaatgtcaatgcactgcaatggttgattctgaaacttggatcagatagacactgatactcattctactcatcaaataagcgttgtcagatcacggtgctacacacactggttcagtgaatctgcaggtgctgctcatatggaaacatacactactgatgacgctcttacgctcatggggtttggaaagttccaagcacttgtccttgcatatgcaggaatgggctgggttgcagaagccatggaggtcatgctattgtcattccttggaccagtggtgcgggaagagtggaatgtctctccccaagacgagagtctgctatccagtgttgtgtttgctggcatgctaatcggagcttgtgcttggggctttatttccgacagatacggaagaaagtaaggatctgctccagcaaactctttatgtttcaatttacaggccttggcttcttaaggcaggcaggaataatttcaagtcctttaggattcacaggaaactgatttcatttctcactagtctgaagatattggatctaatcacacctacgtccaaataaccaatacagttttgacagtggtcgtggtactggtattagttttactatgtgacctgtggttggaatcagttcactgagtcaataaaccaatgagtcatttcagttagcgacctcatgtagtgaatcagcacggtaaaaggcaagcaatttgttcttctctttcgtctagtttgcacctctctcttttatcttccctcttgctacctgtaaaataataaaaccagagtgggatgcctcataaacggccagatttgcataaacaatttgataacccccagcactgctaaatagtgattttgccttcacaaagtcaggacgattatggttttcagtatagggtatagtttgtactagttgtcgttttagctcttttttatgtctatattcaaatacatgaagatgaacctagacacatatataaaacacatacatcaagtgttgtatgaacctactaattaattaaaacgaattttaatctgggacagagggagcattggttataccctattttttactatgattcttctctatgtttgatttgtgccaaacatacatgaaataaaccttgtattttttgtcaggactgttttattgctttcgactctgcttactagtggattgggtcttctaagtgctctatctattaactacttgtgcttgctggttcttcggttttttgtcggcataggagtgggcagtgggcatgtattttcatcttggttcttggagttcgttcctgcaggaaatcgtggcacttggatggttattttttcctttttttggactattggcacagtcttggaggcttcacttgcatgggctgtactatcagcattgagttggaggtggttgctggcattgtcttcccttccatgcttcctcttgcttcttttcttcagaatcacacctgagtcaccacgctatctttgcgcacaaaatagaatgactgatgcaaggtttgtcctggagagaatggccattgcaaaccaagcagctcttcctatgggagttctcacataccaccaagaaacaaaaactgaatgcattactcatgtttctgaggatgaacatcttattccagtcagagagaaggaacatacagataggaatgctattagttccaaatctggtgctgttgctgtattgcacaagctattatcacataacttgctcaaatcaactctacttctttggtttgtttactatgccagttccttcgcttattatgggataacattgctgacatcacaactaagtgatgtgaatagaagctgtaaatctgatctggtctttgaagtgcaccaaaataatggcaatctttataaagatacttttatcactagtttagcagagatcccaggcttgattttatccgctttgcttgttgatcggtttggccggaaagctactatgtcgtgcctgatgtttgcatgttgtgctttccttgggccactcgtacttcatcagaatgagttgctgacaactactcttttattcggagctcgtgcttgtggcaccggtgccactacaactttatgtctatatgcccccgaggtgtatccgacatatgttcgctcaacaggggtcgggatcgcaaccgccatcggtaagatcggcggggttatttgccccctcgtcgccgtgggcatgctgcggagctgccatcagatggaagcggtgctggtgtttgagctggtgctgttcctcgctggggtctcctgcatcctcttccctgtggagaccaagggccgagaaatggactgagcacgcacggtggtggtagctcagcacatttgggcatccagatgggcttgtggttcatcttgattctgtataaacacaactctactacatccgcgacaagcttagcggatatgcaaaggggtgtaaacaggagctatagtaattacgagaaagaactggcaatgagcaatatttgtaacaggattattgttatagaacttcctcatcatcagtcaggaggtaaataaatatgtgaagttaaatagtaaccatgtggtggacagtgattataaacgaggatattctcgtggtgctggatatgcccaacgtcaattcgttgcgggcaacacacaacctaacgcgtgcctccaaacagctatcaattaattatcattacttgtacatggtaataaggttgtacgcgtgtccccccaatctctatcagcatcatacaatacaaggttgtcgtcttcctgaattcgctttcagttgcgtgagccgctttgctc

SEQ ID NO: 2018 - DNA, 2527 bp, Zea Mays
ctccagtccacaaacaggagctctcagccaagcgcccacgacagtaaacaacgcggcgccgccaccggtttcttttgccgaaggaaggcggcagggagatatagcacgctacagccgcagcccgcaggcaagcaccgcggtccgtggctaggctacacctacaccagatcttcttagctggggaccaagcaaagcaagcaaggctacccgcaaccgccaactgaccgctgtagcggagacgatggcagccgccgcgccctcctcgtcctcgtcctcgtccgcgcgggcgcgcgcgcgcgcgccgccccggccattgcatcccctcgcccgcggcggccccgagcgcgaagaaatggaggccgtcgcggcgacccaccccggcgcgccaccgatgcggcgcaaggggaggaagcagaagcagctgtggcccaggaccgtgctgcggaagtggctcaacataaggtcgccggagtccgacttcagcgccgacgagggcgacaccaccggcgacgacaccgacagcgaggtcgattacgaagagatgtgcgcatgggagcgcaagttgcacgatgaggagaggagcgtccgaggattcggtgctgaggctattggaaaccaattgggggtggttccttgtggccttcgtagaaggcgcaagtcagagacccttcgtgctcagtatattgatgtcagggagctcaggatttgtgctggaacatggaatgttgcaggcagacttccacctaatgacttggatatccaagaatggttggatatggaagagccagctgatatatatgttcttggatttcaagaaattgttccactaaatgctgggaatatatttggcgctgaagacaaccgccctgtagcaatgtgggagcatattattcgtgaaactttgaataagatcagcccagataaacccaaatataaatctcacagtgatcctccttctccgtcaaggttcaagccatctgatgatgcttttgttatggaagatgaacttattagtgagtctgatagtgaaggtgatggggaggtgcacccattgaacgaacaagatttggtcgactctgttgatggcattcatggtaacaaatgtgaacctcaaacaattttacaagatgaagagttcagcaggttgccttcagtgaagacttttgacagatccaataacctaagttttaaagaatctaatttggaagagaagatctgccagaagatattaactaaaacattcagtcactcagagaggcttgggatgatttggcctgaaccaccattggatatgtttgcccagtgtcttccagacagcacaaagccatttgcttcaggaaaggttttaagatcatatttgtctttcaagtcggtaaatggagattctggtccatttgctgaggacaattcagttcctgatttttatatgagctgtgcagcagttaaaagaaaaaggccatactttgtaagaataataagcaagcagatggttggagtgtacctatcaatatggagtatttatgttttagcaccaattgtcttccagtctttccattctcatatcactggcatttactttccatcaatacaccaacactacatttggaaaaggggatcaatatcagtaagcatgtccatataccaaacacacttttgctttatatgttgtcacctgacctctggagaaaaggaaggagatgaactaaaaaggaatgctgatgttcaagaaatccaccgaaggacaatatttaatctagtttcgagagtcaacatgcctaaaacgatatatgaccatgaaaggattgtatggctaggtgatctcaactataggatcaacttaccatatgagaagacacacgaactcatatccaagcaggactggaacaaattgtttgggaaagaccagctgaaagtagagctgaagaaggggcatctgtttgaaggatggactgaaggggtcatcaactttcctccaacgtataagtacaaggttaactcagaaaagtacataagtgatgataacaaatctggaaggagaacacctgcatggtgtgaccgaattctttcccatggtaagggtatgagattactgtcatataagacagttgatctcagactatcagatcaccgccctgtgactgctgtgtacatggcagatgtggaggttttctcttcaaaaaagctgcagagagctctgaccttcaccgatgcagaggctgaggaacagctctccttcgaggaagacaatgcttctggaatatacaaccttggactatatgaaagttcaagtgaagtttacaccccattagtaagagccaaagttttcagcaaggttacctggttgaagccgcagccgttgatgcgggcgctgagccggccccggcggaacggactgcccgccgtgtcccggtcattcccaacgctgcgacttcgacgctagggctagtttgaaagccacaaaagtggagataatgtgaggggctaaaatctattctttatttaattttaaataaaaagaggattttag

SEQ ID NO: 2019 - DNA, 1803 bp, Zea Mays
agcaacagtacaatacctgtcgttgggatgcgttgatgtggccgacgcctccttgccaggttctggaatttccagtgcgggtgcattaggctgctatgggcaagtcgccggggaagtggatcaaatcggtgcttttggggaagaaatctaccaagtcaggtcctaccaagtcgaatgaatctaaggctgacaacaacagatactcgaccggggaggaccgcacattgtctgagagttctcctgtgatttctgagccggtactagttaacatccacaagaacgtagctatcaatgggaaggctgcagatgccagtgatagggcacggcaacaagatccgcagagccaaagcgttgttgagtccagatcatcggctccagctgctcagctgggagaagatcaagctgcagcgaaggcacaggcagcctttcgtggttacctggcacgaaggtcattccgtgcattaaaaggtatcgtaagactccaggcgctgattcgagggtatcttgtaaggaggcaggctgtatcaacccttcgcgcaacatggttgattgtgaagtttcaggctctagttcgtggaagaaatgttagactctctggcagtcgcatgcagctcaatgtgaagtttggtcagagtaactttgggggtgttagatcgtctgatgcatggaaagagaagctatcttcaaatgcttatgttcggaagcttctgtcttcaccaattgttttagaacctcttcacttccagtatgacaagagggatcccaattcaacctataactggtttgagagatggaccataggttgcatctggaagcctgcttttcaacccaaaagagttgctgatgggaaaccactggtaaagaaggctagttatgcaatggaaactcaatcagccaagttaaaacgcaacattcggaagggttctgctgctatcgctgggagtttccatacatctggtgaatctgataaagtaaaaaggaatccaaagaatttctctagcttccctgctgattcagtaccagatagccagttatctgaacttgaaaaggttaaaaggaacctcaggaaggtaactgattcgatggctgaagcctcaaagatatctagttccagggttgattcctcgaaggtatgtaattctacagctgaggttccaaaggaatctaatcctgtggcagaaatctcaaagatacgtagtctcctgaatgggatctctgaccatcaggatattcaatgtgagaatacacgtgaatcttcatttcctcttggaactcaagaagactctgacaatgatcatctattgcgatattcaaatatggatagcttggacttggtacctggtttgaaaagtgatcaggaaattcagctggattcggtttctataggagaaaatgttgatgatcccactgttgttgctccagcagttgaagaaatgtcaccgcaaaacattgatacggaagacaatgttttatgcaagaaagaggaagcaaggtccaaggaagagcacttgtctaatggaagccttagaactagcaagaggaagtcttcattccccaacaaatcagaatatgtagaaaatgggactcacgctactcctgttcagccaaggcagccaagctatatggctgcaacggagtccgcaaaggcgaaattgcgagcccagaattcacccagtctggattctgattcagcggcagaaaagaatggtttcacccgacgccactctcttccttccagtacaaagacttatcgattatggtattcatttcgccatcatgttcagaaagaagttatcttgaata

SEQ ID NO: 2020 - DNA, 1904 bp, Zea Mays
gcggtccctcgccctctctctctccctcttcccggccttttcgccgagcgagcctctgaggttctggaatttccagtgcgggtgcattaggctgctatgggcaagtcgccggggaagtggatcaaatcggtgcttttggggaagaaatctaccaagtcaggtcctaccaagtcgaatgaatctgctgacaacaacagatactcgaccggggaggaccgcacattgtctgagagttctcctgtgatttctgagccggtactagttaacatccacaagaacgtagctatcaatgggaaggctgcagatgccagtgatagggcacggcaacaagatccgcagagccaaagcgttgttgagtccagatcatcggctccagctgctcagctgggagaagatcaagctgcagcgaaggcacaggcagcctttcgtggttacctggcacgaaggtcattccgtgcattaaaaggtatcgtaagactccaggcgctgattcgagggtatcttgtaaggaggcaggctgtatcaacccttcgcgcaacatggttgattgtgaagtttcaggctctagttcgtggaagaaatgttagactctctggcagtcgcatgcagctcaatgtgaagtttggtcagagtaactttgggggtgttagatcgtctgatgcatggaaagagaagctatcttcaaatgcttatgttcggaagcttctgtcttcaccaattgttttagaacctcttcacttccagtatgacaagagggatcccaattcaacctataactggtttgagagatggaccataggttgcatctggaagcctgcttttcaacccaaaagagttgctgatgggaaaccactggtaaagaaggctagttatgcaatggaaactcaatcagccaagttaaaacgcaacattcggaagggttctgctgctatcgctgggagtttccatacatctggtgaatctgataaagtaaaaaggaatccaaagaatttctctagcttccctgctgattcagtaccagatagccagttatctgaacttgaaaaggttaaaaggaacctcaggaaggtaactgattcgatggctgaagcctcaaagatatctagttccagggttgattcctcgaaggtatgtaattctacagctgaggttccaaaggaatctaatcctgtggcagaaatctcaaagatacgtagtctcctgaatgggatctctgaccatcaggatattcaatgtgagaatacacgtgaatcttcatttcctcttggaactcaagaagactctgacaatgatcatctattgcgatattcaaatatggatagcttggacttggtacctggtttgaaaagtgatcaggaaattcagctggattcggtttctataggagaaaatgttgatgatcccactgttgttgctccagcagttgaagaaatgtcaccgcaaaacattgatacggaagacaatgttttatgcaagaaagaggaagcaaggtccaaggaagagcacttgtctaatggaagccttagaactagcaagaggaagtcttcattccccaacaaatcagaatatgtagaaaatgggactcacgctactcctgttcagccaaggcagccaagctatatggctgcaacggagtccgcaaaggcgaaattgcgagcccagaattcacccagtctggattctgattcagcggcagaaaagaatggtttcacccgacgccactctcttccttccagtacaaagagtagagcacttaaagctgaatggaagcgctgaagaggcaacccatcgtccacttgaattgaattgtgcactgctctgaaacttctctggattctgattcagcggcagaaaagaatggttttcacccgacgccactctcttccttccagtacaaagagtaa

SEQ ID NO: 2021 - DNA, 2220 bp, Zea Mays
cttgactctcgtctcgtctctgcactggattggaggttggggccgtgaagggtaggtaggtcgcttgatagggacaaggggggagacggcgagaggcgtttcgccgagcagttcgcgtgctcccctccacaggccgacgcggcgacgccgctgtttcaggttctggaatttccagtgcgggtgcattaggctgctatgggcaagtcgccggggaagtggatcaaatcggtgcttttggggaagaaatctaccaagtcaggtcctaccaagtcgaatgaatctgctgacaacaacagatactcgaccggggaggaccgcacattgtctgagagttctcctgtgatttctgagccggtactagttaacatccacaagaacgtagctatcaatgggaaggctgcagatgccagtgatagggcacggcaacaagatccgcagagccaaagcgttgttgagtccagatcatcggctccagctgctcagctgggagaagatcaagctgcagcgaaggcacaggcagcctttcgtggttacctggcacgaaggtcattccgtgcattaaaaggtatcgtaagactccaggcgctgattcgagggtatcttgtaaggaggcaggctgtatcaacccttcgcgcaacatggttgattgtgaagtttcaggctctagttcgtggaagaaatgttagactctctggcagtcgcatgcagctcaatgtgaagtttggtcagagtaactttgggggtgttagatcgtctgatgcatggaaagagaagctatcttcaaatgcttatgttcggaagcttctgtcttcaccaattgttttagaacctcttcacttccagtatgacaagagggatcccaattcaacctataactggtttgagagatggaccataggttgcatctggaagcctgcttttcaacccaaaagagttgctgatgggaaaccactggtaaagaaggctagttatgcaatggaaactcaatcagccaagttaaaacgcaacattcggaagggttctgctgctatcgctgggagtttccatacatctggtgaatctgataaagtaaaaaggaatccaaagaatttctctagcttccctgctgattcagtaccagatagccagttatctgaacttgaaaaggttaaaaggaacctcaggaaggtaactgattcgatggctgaagcctcaaagatatctagttccagggttgattcctcgaaggtatgtaattctacagctgaggttccaaaggaatctaatcctgtggcagaaatctcaaagatacgtagtctcctgaatgggatctctgaccatcaggatattcaatgtgagaatacacgtgaatcttcatttcctcttggaactcaagaagactctgacaatgatcatctattgcgatattcaaatatggatagcttggacttggtacctggtttgaaaagtgatcaggaaattcagctggattcggtttctataggagaaaatgttgatgatcccactgttgttgctccagcagttgaagaaatgtcaccgcaaaacattgatacggaagacaatgttttatgcaagaaagaggaagcaaggtccaaggaagagcacttgtctaatggaagccttagaactagcaagaggaagtcttcattccccaacaaatcagaatatgtagaaaatgggactcacgctactcctgttcagccaaggcagccaagctatatggctgcaacggagtccgcaaaggcgaaattgcgagcccagaattcacccagtctggattctgattcagcggcagaaaagaatggtttcacccgacgccactctcttccttccagtacaaagagtagagcacttaaagctgaatggaagcgctgaagaggcaacccatcgtccacttgaattgaattgtgcactgctctgaaacttcgctggatgaactcgaccggtcttgtcccatgttcttgctgtattgaacaaccccttgtgaagttgcgattctggttcagtttgtcgtaggttcatgtgcaaccactagtgccttgtgtcgtatattgcatggttcttgtcgaaggaacaatgcctgcgaaagctgatgttaggactgcattaactgaataacatcacccagttgcccaggtctttgtttgtcgtcttaatgagtgatgaaaaagcagtttcgcagaactgctagtgacatgaaatttaaaacctggatttatt

SEQ ID NO: 2022 - DNA, 3714 bp, Zea Mays
cgacggccccacccaccgcttctctctctgttcctacaatgacccaccggtcagcccagccggagaacgccgcccgctcccccggcgtgccgccgctgtaattcttcctcctccacccagagctgcacgtccgcgccttgccaccgatggatcccgcgcccgatcagctctctatctccgcctctgccccgttccccaccatcccggctgcctcaagccccaggccccgcgccgcgaggacgcggcgccatgccgcgcccttccggtcggaccaccccaccgccgggagctggcgctccgggatcgatctcccgcgccgtccttcggcctccgccttttcccagcaggagcgttatccttccgtggcctcctggagcgcctctcgcgacgccaactttgtgttcgggagcggcgtggccggtgcgccggagatgaggaggagcttctcgtctggatccggtgaggcatcgttggctgaactttcgtacgcagttcacaggttcgcgttggacggttctggcaggccaagcgacattgacgctcccggaggagaaggtacgcttccagtgacagactccggtggtcgctttggggcccgtggatgcagttccactttgtatgagggcttctctctggattctattcaccatcagactgagcacctcgatgaagaacgtggagtcccgtctcaaaccatacaatgcgagagtgtggggatgcgatcattagcttcaccaacccgcactgatgagaatgctcccattgaatttgcaaagagaggggacagcttgcccattcaagattctgtggatcaaagtagaaattctggacatgatgctaatgcccaccatgatttctttgtttttggtggacatgctgggtccaatagcttcgctaccaatgcaactcaaactaataccagtaaggatgcaaagcatgtgtttggttcaagtgacaatgatcttccaggttcggaaccttgtgaaatttctaccacggtggaaacaccggatactataacctctagctttggatctgaagatgggatcgtgacggtttcttccataaaggtgccttgcaatattgaagtagtaccagcctcagaacttgttgaatgtcagccatttgatgagaaatctttcacctttgacgaccaaaatgtaccatataggaacaaaggaggggttaagggtatgggcatgaacagaggagcttttatgccaaataagtcctcagcaaaccaagcttcttttgaatcagtctcaagaagcgggcattgttctaaaaaagtgtctcctgaagaaaagttaaatttgaaagaagccagtagctctttgcaaacaacagaaagtgggcatgctgaagcagagtttacgtctgcagcaaatacggaacattctggtcaatccgatttcatattttctgcatcaactttccatcaaagcatgttgcacccgcaaagacgacataacaagaaaaaaagtggaggaatgggtaatcatgctagctctattcaaagtctcccttcatccgccattggactcgcatgctcagaagtctcaggaagtcagcaatgtgtggatttagctgccaagtggactgaatacaacaaaatagaacctaacagggttgcaatcagcagaggagccagatgctcaacatcagaaaactttggagaccatgacaattgtgaaacatggcgattaaggggaaaccaagcatatgcagaaggattgttaactaaggctgaagaatgctatacccatgggattgattctttttctccaaatgaagtttcaagaaaagcattaatgctgtgctacagcaatcgagcagctactcggatgtctctgggtaagatgagagatgccctatctgattgtcaagaagccattgatattgattccagttttctcaaggcacacgccagagccgccaactgcctacttgccctgggggatgttgaagaagcacaaaaggcttttgagatgtgtttaaagtctaatcatctatcaagcttggaccataaaattgtagaagaggcttctgatggtctacaaaaagctaagaaaatatctggtttaattagtcattctgaggagtatcttataaagaaagcatttgacaagatacccagtgccttacaaatgatctctgatgctttgtccataagtatttattcagataagttaatggagatgaaagcagaagcactgttactgttgcagcgatatgaagaagtaattcggttttgcgaagaaactctttatgtagcagaaagaaatagtgtgtgtttgtgtcttgacaagcagtcagaaagcaataacatggtcaacaatacttgctttgtgaaattgtggcgttatcatcttattgctaagtcatatttcttccttggaaagcttgaagaggctaaccagttcttaaagaagaatgatcaaataaaagtcatggggtgcagaacactggctaggtgtgggaatcaatctcaggactcaattttatcattctccatggctatctctgaactattgcggcttaaagctgctggcaatgaagcattccaatctggtaaatatttggaggctgtggaacattatactgctgctttgatgagcaatagcgagtccctacgctttttagcagtctgcttttgtaaccgtgcagcagcatatcaagcaatgggtcaaattttagatgcaattgcagattgttcactggctatagcccttgatgcagattatgctaaggctatttccagaaggtctagtttgtatgaacttataagggactatggccaggcagcaaatgatctccgtaggttgattgctcttcttgagaaacaactgcaagaagatatgaccatgccagtagagaggtctgagagtattcgtaacaatctgaatcgagccaatcttcggttttcttctttggagcgggatgccagaaaaggggcttcattaaatatgtatttgatattaggaattgagtcttcttcctctgctgtggatataaagaaggcctaccgcaaagcagcactaagacatcatccagacaaagccagtaactttcttgtcagaagtgaaaatatcagtgatgctgtatggagagatataacaaatgaaatacgcagggatgctgattatttattcaaaataattgggaaggcatatgctatgctttcagaccctacaacgagaagggaatgataacctggaggtggagtgatagaaaagcagtgcacatgtaacatgagcagcgggagcaatgaaaatgatgacaggacctcttagtgagagcatttaatcatgaagttggtaccgcacaaagctaccatactggagaggtcctatgtgaaattttgtgtgctctcaccaacgatatgatgccactggtgttgtccaatacctaatcacaaatgtcagtcggaacatgtcccacttttctgactgagtgctaataccgttacccccggggagcagtggatctttgtgttcatgcctgatcactgtttcgtgttctctgatgttccatttggatatgcagattgcatgagtctgagcacccgtgcaaaaggctagtttttttgtttgtgaagttgatgtcaatatatcaggtgctgtgcatagtagcttggagcagttcgagtggaatcaacaagagtggatagtgtaaatagaggtacacgtttcttgtacaccccctcactccaca

SEQ ID NO: 2023 - DNA, 3770 bp, Zea Mays
atcaattctccccaccccgacggccccacccaccgcttctctctctgttcctacaatgacccaccggtcagcccagccggagaacgccgcccgctcccccggcgtgccgccgctgtaattcttcctcctccacccagagctgcacgtccgcgccttgccaccgatggatcccgcgcccgatcagctctctatctccgcctctgccccgttccccaccatcccggctgcctcaagccccaggccccgcgccgcgaggacgcggcgccatgccgcgcccttccggtcggaccaccccaccgccgggagctggcgctccgggatcgatctcccgcgccgtccttcggcctccgccttttcccagcaggagcgttatccttccgtggcctcctggagcgcctctcgcgacgccaactttgtgttcgggagcggcgtggccggtgcgccggagatgaggaggagcttctcgtctggatccggtgaggcatcgttggctgaactttcgtacgcagttcacaggttcgcgttggacggttctggcaggccaagcgacattgacgctcccggaggagaaggtacgcttccagtgacagactccggtggtcgctttggggcccgtggatgcagttccactttgtatgagggcttctctctggattctattcaccatcagactgagcacctcgatgaagaacgtggagtcccgtctcaaaccatacaatgcgagagtgtggggatgcgatcattagcttcaccaacccgcactgatgagaatgctcccattgaatttgcaaagagaggggacagcttgcccattcaagattctgtggatcaaagtagaaattctggacatgatgctaatgcccaccatgatttctttgtttttggtggacatgctgggtccaatagcttcgctaccaatgcaactcaaactaataccagtaagctaaatacttcagtttctaaagatggaaattgcatcaagttcattttgcaggatgcaaagcatgtgtttggttcaagtgacaatgatcttccaggttcggaaccttgtgaaatttctaccacggtggaaacaccggatactataacctctagctttggatctgaagatgggatcgtgacggtttcttccataaaggtgccttgcaatattgaagtagtaccagcctcagaacttgttgaatgtcagccatttgatgagaaatctttcacctttgacgaccaaaatgtaccatataggaacaaaggaggggttaagggtatgggcatgaacagaggagcttttatgccaaataagtcctcagcaaaccaagcttcttttgaatcagtctcaagaagcgggcattgttctaaaaaagtgtctcctgaagaaaagttaaatttgaaagaagccagtagctctttgcaaacaacagaaagtgggcatgctgaagcagagtttacgtctgcagcaaatacggaacattctggtcaatccgatttcatattttctgcatcaactttccatcaaagcatgttgcacccgcaaagacgacataacaagaaaaaaagtggaggaatgggtaatcatgctagctctattcaaagtctcccttcatccgccattggactcgcatgctcagaagtctcaggaagtcagcaatgtgtggatttagctgccaagtggactgaatacaacaaaatagaacctaacagggttgcaatcagcagaggagccagatgctcaacatcagaaaactttggagaccatgacaattgtgaaacatggcgattaaggggaaaccaagcatatgcagaaggattgttaactaaggctgaagaatgctatacccatgggattgattctttttctccaaatgaagtttcaagaaaagcattaatgctgtgctacagcaatcgagcagctactcggatgtctctgggtaagatgagagatgccctatctgattgtcaagaagccattgatattgattccagttttctcaaggcacacgccagagccgccaactgcctacttgccctgggggatgttgaagaagcacaaaaggcttttgagatgtgtttaaagtctaatcatctatcaagcttggaccataaaattgtagaagaggcttctgatggtctacaaaaagctaagaaaatatctggtttaattagtcattctgaggagtatcttataaagaaagcatttgacaagatacccagtgccttacaaatgatctctgatgctttgtccataagtatttattcagataagttaatggagatgaaagcagaagcactgttactgttgcagcgatatgaagaagtaattcggttttgcgaagaaactctttatgtagcagaaagaaatagtgtgtgtttgtgtcttgacaagcagtcagaaagcaataacatggtcaacaatacttgctttgtgaaattgtggcgttatcatcttattgctaagtcatatttcttccttggaaagcttgaagaggctaaccagttcttaaagaagaatgatcaaataaaagtcatggggtgcaggtgtgggaatcaatctcaggactcaattttatcattctccatggctatctctgaactattgcggcttaaagctgctggcaatgaagcattccaatctggtaaatatttggaggctgtggaacattatactgctgctttgatgagcaatagcgagtccctacgctttttagcagtctgcttttgtaaccgtgcagcagcatatcaagcaatgggtcaaattttagatgcaattgcagattgttcactggctatagcccttgatgcagattatgctaaggctatttccagaaggtctagtttgtatgaacttataagggactatggccaggcagcaaatgatctccgtaggttgattgctcttcttgagaaacaactgcaagaagatatgaccatgccagtagagaggtctgagagtattcgtaacaatctgaatcgagccaatcttcggttttcttctttggagcgggatgccagaaaaggggcttcattaaatatgtatttgatattaggaattgagtcttcttcctctgctgtggatataaagaaggcctaccgcaaagcagcactaagacatcatccagacaaagccagtaactttcttgtcagaagtgaaaatatcagtgatgctgtatggagagatataacaaatgaaatacgcagggatgctgattatttattcaaaataattgggaaggcatatgctatgctttcagaccctacaacgagaagggaatgataacctggaggtggagtgatagaaaagcagtgcacatgtaacatgagcagcgggagcaatgaaaatgatgacaggacctcttagtgagagcatttaatcatgaagttggtaccgcacaaagctaccatactggagaggtcctatgtgaaattttgtgtgctctcaccaacgatatgatgccactggtgttgtccaatacctaatcacaaatgtcagtcggaacatgtcccacttttctgactgagtgctaataccgttacccccggggagcagtggatctttgtgttcatgcctgatcactgtttcgtgttctctgatgttccatttggatatgcagattgcatgagtctgagcacccgtgcaaaaggctagtttttttgtttgtgaagttgatgtcaatatatcaggtgctgtgcatagtagcttggagcagttcgagtggaatcaacaagagtggatagtgtaaatagaggtacacgtttcttgtacaccccctcactccaca

SEQ ID NO: 2024 - DNA, 968 bp, Zea Mays
gaccgggctgaaggtgaaggacaaggccacggtcattttcgcaggcaccgtgaccgtgtccctccgtcgtcatcaggagatcaaaaccgcccggcattttgccgtactgacatggcggccgttgctgcaggggagctggcggcgttcctgacgggggcgaacctgatcatggagtacgtgttctccaacgccgccgtggcgcgcagcttcacggcgtacctgggcacggcggtgggcgtggacgcgccccgcgagtggcggatcgccgtgcgcggcctgcccgagggcttcaaccaggtggacctcgtcgccgtcgccgtcatcctcctcgtctccgtctgcatctgctacagcaccaaggagagctcggcggtgaacctggcgctgacggcggtgcacgtggcgttcatcctgttcgtgatcgggatggggttccggcacggcgacgcgcgcaacctgacgcggccggcggacccggcgcgcagccccggcgggttcttcccgcacggcgccgcgggcgtgttcaacggcgcggccatggtgtacctcagctacatcgggtacgacgccgtgtccaccatggcggaggaggtgcagcggccggcgcgcgacatccccgccggcgtgtccggctccgtcgtcgtcgtcaccgtgctctactgcctcatggccgcctccatgtccatgctcctcccctacgacgcgattgacccagaggcgccgttctcgggggcgttcaaggggcgggagcggtgcgcgtgggtgtccaacgtggtcggcgccggcgccagcctcggcatcctcacctcgctcatggtggccatgctggggcaggcgcggtacctgtgcgtcatcggccgctccggcgtcatgccggcgtggctcgcccgggtcaacccccgcaccgccacccccgtcaacgcctccgccttcctcggcctcttcacggcggcgctggcgcatgttca

SEQ ID NO: 2025 - DNA, 3923 bp, Zea Mays
cgggacggcaaccccagccaaagccaaaacaggcctgcttccttacacctcgcttggtggtctgggcgaccggccgctggcgtcgcgccctcccttataaaccaccacacttcagcacccacagctccctcttgcatcccctcgcccgtcgtctcgccagtcgctacaccccaaaaacctcacgcgcgcgctcgcgacccctcgcgctcgcctcgtcggcacgccggcgagaggggcgcccatccccgtgcctatataaggacgccggattggaggtgcccgtcccttatccgcgcggccagatctacctctgttccacgcctccgtcaccgccgcgtcggggcgatcccaccgaggccacaggtataagctggtaccatggcatccaacacaggagcatcaggatggctcaggggtaaggtgaaggctgtgacatctggagattgtctactaatcatggggagctcaaaagctgagatcccacctgagaagtccatcaccctgtcctaccttatggccccaaggctggctcgccgtggtggagttgacgagccctttgcatgggaaagcagagagtttctaaggaagctttgtatagggaaggaggtcacattcagagtggattatacggctcctaatattggacgagaattcggaactgtttatctaggtgacaagaatgttgcgtactcagtaatttctgctggatgggcaagggtaaaggagcaaggcccaaaggggggcgaacaaaattcgtaccttgccgagctgttgaggttggaggaagttgccaaacaacagggtgttggtcgttggagcaaggaacctggtgctgctgaagagtcaataagagatcttccaccatccgcaattggtgaaggaagtggttttgatgcaaagggttttgcggtttccaataaaggcaagagtttggaggccattgttgaacaagttcgtgatggcagtactgttcgtgtgtatttactccctaatttccagtttgtgcagatatatgttgctggagtacaggctccatcaatgggaagacgtccatcggtacctactgtaattgctgaaactgatgataatgctaatatcgcgaacgctgaagatcctgagggaacacctgcgcaactgactacagcacaaaggctagttgcatctgcagcttctgctgaaattccaccagataggtatggaagagaagccaaacatttcacagagactagagttctcaacagagatgtgcgtattgtggtggaaggcacagacagctttagtaatataattggttctgtgtattaccctgatggagagactgcaaaggacttggcccttgagcttgtcgaaaatgggctggcaaagtatgttgagtggagtgccaatatgcttgatgttgaagtaaaaataaagctgaagaatgcagaacttcaggctaaaaaggatcaattgagaatctggacagggtttaagccaccagcgacaaactcgaagcccattcatgaccagaaatttaatggaaaagtggtagaggttgtaagtggggattgcattattgtggctgatgattctgctccatatggaagtccttcagctgaacgtcgggttaatctgtcaagcattagggctcctaagttgggcaatgctcgtacagatgtgaagcctgaccattttgctcgtgaagctaaggagttcttacgcacgaggttgattggcaaacaagtggctgttgaaatggaatactctcgaaggatcagcactgtagatggacagagtgctgctccaacagcaaacatggctgatacaagagttttagattatgggtcagtttttctgggttcaccatcacagactgatggagatgacacatcttctgctccgagctctgctagccagcctggagttaatgttgctgagcttttgctctcacgaggctttgctaaaacatctaaacacagggattatgaggaaaggtcacactattatgatgctttattagcagctgaatcacgcgctgagaaagcaaagaaaggcgtgcattctcagaaagaatctcctgtgatgcatataacagatttaacaactgtatctgcaaagaaggccaaagattttcttcccttcttgcagcggaacagaaggcattcggccatcgttgaatatgtttttagtggccatcggttcaaactaacaattcccaaggagacttgtagtatcgccttctcattatctggtgtccgttgtcctggtaaaggcgagccatactcagacgaagctattgctttgatgaggagaaggatacttcaacgagatgtggagatagaggttgaagcagttgataggacaggaacgttcataggttctttgtgggagtccaagaccaacatgggctctgtgcttctggaagctggacttgccaagctgagttcatttggcttggataggacctcagatgcttatatcctaacaagagctgaacagtctgcgaagcaacagaagattaagatatgggagaactatgtcgagggtgaaaatgcttccaatggatccacacctgaatctaaacaaaagcaaattctcaaggttgttgtcacggaagttcttggtggtgggaagttttatgttcagacaatgggtgaccagagggtggcttcaattcaacagcagcttgcatctttgaaacttaaagatgcgccggtcattggtgcttttaatcctgtgaagggagagatagtcctcgcacaatttagcgttgacaactcctggaacagagctatgattgttaatggacctcgttctgttgaatctccggacgacaagtttgaagtattctatattgactatggcaaccaagaggtggttacctacagtcgtttacgacctgtagacccatctgtttcctcgtctcctgctcttgctcagctatgcagccttgctttcataaaagtgcccagtcttgaggatgactttggtcaggaagcagcagagtatctaagtgaatgtttgctcagtagctcaaagcaataccgggcaatgatcgaagaacatgatacttctggggggaaatcaaaaggacaaggaaccggaaatgttctcattgttactcttgttgatgcggagacagaaagtagcataaacgctaccatgcttgaggaagggcttgcccggctcgaaagaagcaagagatgggacactagggagaggaagacggctctccagaacctggaacagttccaggacaaggcaaagaaggaaaggctgcggatttggcagtacggagatgttgaatcggacgaggacgagcaggccccgcctgcaaggaagcctggaggtcgtcggtagagactgggcagtgtaaggctgcagtctggcatgctatgaaagttttggacaaccacaaatgttggactctgccgggagttatagatgaggacttactgaggggcgaaacttttgaagctatgcttcgctctgagatagaacatcaatcctttcaagtgctaaacttcacggaggctcgatctcatgaatgaccgaatcactgacctcgacaaactcaaagaggccaagggcttggcggccatgcaagacacgtctgagataaaagttgtgctgttgacgatctagtgctacgcaagatccaaagtatgaaggacaaacataaactgtcacccccttatgagggtcctttcatcatctctgaagtacttcggctcgacgcttattgactccagctagaagatgacacaatcaaccgtttttacgtgtaacttctccattttttgcaataagtccatctcgaacaactccaccgccatgactgagatgttgggggcctaacatcatgtatcaatacattcatatggagctgttacaagaaaattcatatctcgcaaatttcgtcttgaatacttcttgaagggtaa

SEQ ID NO: 2026 - DNA, 2311 bp, Zea Mays
ctcgccgtcctgtccctctcttgatatgactgtctctctctctctcatctgccctcacatacttctttattgtcctctcttggaagccaactcaagttaccccatctctctccctcctttcgtttctcctcaccgtaaccgtgttccgtgtgtattctctcgtctctcctggtgcttgcttggtgctaagaaaagataactccctttccgcagccccatatctcacatcctgcttcccctccacccggcctacctccttttttgtcccccacaaaagcaagaacaagcttgctggattgcttgctactagctagctaccctccaagcagatcgagcgaacctgacccttcaaaagatcgttgtacgtccttcttctgccctagccttcttcaatctccttggtgcctgccaagttgccaacacctgcatgcacccaacaagctgtgtgcttcctgtgcgccaccgccacacgggtcttggctagctagccttattagcttgcttggtgccgccggccagttgattggaaaggagcaagagaattattgagcagttggcatcaaccgcgtccctgcagaaactatagaggcagcagcgaccggcgagctagagcgagggatcggcaacggccgccctagctgccagccgcgctcggtacgtacagccatgtgcgacttcttccttccgcggatggagggcgaccaggccggcggtggcgaccttaccgacatcgtccggtccggcggggccgtccctagcagcgccgccgaggccacggcgagggatgagtggcagctccaccagggggagccgccgatgctcttcccgccgcttccctcgtcgacggcgacggcatcggaagcaggctgcgccgcagggagcaccggcgctaacgtcttcggcgccgacgaccctttctccggcctcgtggacccgttctgtaccgactactactcctcatgcgccgacttcttggacgccaccatgccggacgcgatgcccaaggtcggcttcgacgcggctatctgtggcggcagcggcagcggctgcggaggaggcggaggccagggccagctgatagacgtgaggcggaagcagcctctcttgccgcgtggggtgcagatgctgccggttggcgcgctggcgccgagggagatacaaccgtacccggcgtttgccagcgacatggtcaagctcggaatcacggccgggcaggtggccgggtgcgccatcgacgccgccgtcgtcggcatgcagatgccctcgcctcgcgccgcgggcgggatcaagcgcaggaagaaccaggcaaggaaggtggtgtgcatcccggcgccgacagcagcaggggggagaccaactggagaggtggttccttctgatctctgggcctggaggaagtacggccagaagcctatcaagggttctccttatccaagagggtactacagatgcagcagctcaaaaggatgctcagcgcggaagcaagtggagcgaagtcggaatgaccccaacatgctcgtcatcacctacacctccgagcacaaccatccatggccgactcagcgcaatgccctggctgggtcaactcggaaccaccacggcaagaacagcagcggcagctcaggttccaagggctcacagaacgagaagcaagagcaacagcaaccaagcaacgtcaaggaagagcccaaggatccggcggccacgacgacagccactagcacgattactacgttgacaactagtatttctccggcagcggttgtgaaagaggagacgttggcagctggatcatcagaagcattggggcaagtcatggatacagcagtagcagaccacaacattgaactcatggaccaggtgttcagtgagagctacaggccgatgataccggaggccggccaccctgacgacttcttctccgacctcgcggagctggagtcagatcccatgagcttaatcttctccaaagagtacatggaagcgaaaccaagtggtggtgatcgtggccatcacgagaaagcaatatccaaggacttggatccactgtttgacatgctagattggtctgctaattcttcatcagcagggagctcatttgagcaaggaaagagaggctaatccattggcatatgtgcagacatacatttgatcagagctaataataactagaaattaagattaccacaaggtcagcaagaaaattaagatgacagagttttccctttctttcactttcttttctctttggttcttttgcttcttattatcattgtgtgagaaagattgtaatttttttgttcaagttgct

SEQ ID NO: 2027 - DNA, 1419 bp, Zea Mays
gaaaagacagccatgttctttgcagcaaatttgaagtttactagtatgttaccctgatgcagtcaaacacatttgaccaagaagttgctgtcaatcacctgtttctcgtttagggttaacttgattatgactgagaatgaagtaatttgttttcttatcatagtcatgatgtttggttgttcaatggaaacactattttttaattatttttatggccctagttaacatacaccatagttttgacaaaagctgggtgatctacctaagcaaggaaaacaaaggccagatacaaagcggagcaatgcgatggtactaggatcgcaattttgcgtgcttattaagtctgaactaacagtctctgttccagtcatgcatcagggcttcaggagtgcattttgccattctgaattaccagtttggagcttactgttcagttcttatgttgtcacaagcgggcatagataatatccagcttgtccctcttcacagtgatattttatttctacatggaaagataagggtggtaaagattagattgcaacagcaaaaagggctaagcccagacttgcttagatacaaaggtcccatacactgcgcaagaactatagttcgagaggaaggcctctttggtctttggtctggagcactaccaaccgtcatgcgcaacggcacaaaccaagcggcaatgttctcagccaagaacacgtttgatattgttctgtggaagaagcatgaaggggacgggaaggtgctcctgccgtggcagtcaatggtctctgggttccttgcaggaacagcaggccctgtctgcaccggacccttcgatgtcgtgaagactaggctgatggctcaagggagaactggggacgccaagtacaaaggcatggtccatgcgatacgaacaatatatgccgaagaggggctgcgagccctgtggaaaggcttgcttccccggctcatgaggatcccacctggacaggctataatgtgggctgtagctgatcaggtgatgggcctctatgagcgaactcatctgcagccagttcatatttgaccattctattgcagtgctggtgctgcactgaatttttttttgttggttctcaatcggtggttagacgtggaagtcgtcgattatggatattcgtttgttcattgcttagagttgggtattgatggaagcaatggaagactcttgtactactattttgttgtcaataatcatgaaaccctccaccttttggactggggatatctcggttgtggtgactattatggttgttagactgcagtagcatcaatttgtatgattgaatatactcatgtgttcatctggaaagctgagggtcctttttatgcccggctgggccgtcaaaaagataccatatttacctgggccagaagtgataatgcagccca

SEQ ID NO: 2028 - DNA, 1951 bp, Zea Mays
ggggtttgggtgcttctctacggccgccgccagcaccgagttccggacctccgccgcctcgtctccgctccctcgcactcgcactcgcagctccggctgctattctgcagaagtcggtagattggttttcctcatgggtcgcaccatcaagaaggccaagaaggctcaatccaagaagtccaagaagaaaactgaatcgtcctcgtcgtccaaccctgcgattgcctctggtccggctaaggtctggcaaccgggtgtagatacactggaagatggggaggagctgcagtttgatcctcaggcttacaattatctccgaggttttggcattggctggtcttgcttgagttttgatgttgtgcgtgatcaacttggactcgtccgttcagagttccctcatacattctatggtgttgctggaacgcaggctgagaaagcttcatggaactatattggcgttttcaagctttctaacataagtggcaagaagcgggaacctataccagcttcagcagttgaagctgacactgatgtggatagtgacagcagcagcgatgaagaagatgaagagattaatgaggatacaaaacccatcctacatctaaaaaaggtggctcatgcggggtgtgtaaatcggatacgctcaatgactcaaaaaccacatataagtgctacgtggggagatactggtcatgttcaggtgtgggacttgagctcattccttaattctttagctgagtcagggacagctgcacccaaagaagacgacataatccacaaacacttacccctgaaagtatttagtggtcataaagatgagggatatgccattgattggagtccacttgttactggaagacttgtttctggcgactgcaataagtgcattcacctatgggagccgacttcaaacaactggaacgtagatgcaaacccatttgttggacactctgcaagtgttgaagatctacagccgacatatttgcctcatgttctgtggatggtacgatatcaatatgggatatacgtacagggaagaaaccttgtatttctgtcaaagctcatgaagccgatgtgaatgttatctcatggaacaagcttgctagctgcatgatagcttctgggtgcgatgatggcagtttctcagttcgtgatcttagatcaattgaggaggactcgttggtggcacattttgagtaccacaagaaagcaattacatctatcgagtggagtccacatgaagcatcatcattagctgtaacatctgaagatcatcaactaacaatctgggacctttcactggaaagagatgcggaggaggaggctgagttcagagcaaagatgaaggagcaggcaaacgcacctgaagatttgcccccacaacttctctttgctcatcagggccagagagacttgaaagaactgcactggcacccacagataccgtcgatgatcatatcaacggcaattgatggcttcaacgtgttgatgcctagcaacattgatacaaccattcctggcagcactgatgcagcaatgccatctgctgagccacagcactagccaacattgatacaagcattcctggcagccctgatgcaatgccatctgctgagccatagcactgatgtaggcgtttcttgtagcatggctcccagcttagaattccaggtctacgcagtggtgtatccgagtgcggttggcatttgtgttgagagtgctatgatgctatgtttgtgtttgagcatgatgggaaaggtttggttggctggcattccatgatatatgataagatttattaatatgtgcattctatgatatatgataagatttattaatatgttggcattctattaaaattcggcagccgctggtttgtatatgctgttttttatgtacataacaaacttcattgcatttaagccatttaagaacagcgtacagagaggag

SEQ ID NO: 2029 - DNA, 2139 bp, Zea Mays
atggccgctcatcccgtcgacgcgcccaccgcagttcacacccgcgccccggctcccccgcctcaccgcgcggctctgccaacactctatgagttcgatgatctcgagagcatcattgataggacactaaagcgcgattttgacaccgaggaagcactctggttgcttaagataggtcttgtgtgcatcccggatagccctaagatcaagccctccatgtcaatggttgccaagatgctacaaggtccatttggaggcccaggatgtcaaaatcaagaacatgagaagcactttgagcattttacacctaatatgagcaaagcacgaaatgaatctgcatttcctcaggatgaaattgactcacatagagagcatttttataatgaactaacctcagattcaattgcttcaaagaagccaaaaataaggaagagagaaaataacaattctgtttcaagttctgctcccaacattcctaatactcaaggtggtggaggatttctgtggaaaaccgaaattcctgaagatggaaattgcggtgactggttgtcaatcccacttggtgatgttaaggttctcgtgaatgaaattacatctgttcgatccaaaaggatattgcatgaggttcctatggatacagttacaaggttattggatgtgattgatcgtcagattcgatattctcaaggtttgtcgatagatgtgaaagaaaatgtgagttacttaccatgtcatagtagtttacatgattattcgtgttttgtagccaggattaacctcactacaatgctctagcagtctactactctacttgcctttcttcgattaattttcctaaagtgaaatcgtgtgatagttgttcgttcggttagcagaaaattataggagttacagctcagttggttgtagaagtccggtagccttgcacaatgtttagaagaagccataatattgagcagatgacggtcaaaaatagcactggattaagaagctgttttttggctcacactaataactttgtttgtgattttggtcatcattttcctgcctggttgggttgcatctgcttgtcattcttgcagtcagcatgaacaaggtcgaggcattgtacaggttgttcaagaagattggcaacaccttcattgatgatgggctgattaacaaggctctttcaaatggcaagcccactgttgttgagttttatgcaaactggtatgaagtctgcagggaactagctctagatatctacaaagctgaacaacaatacaagtctgcagggaactagactctgagaaccatgttgctgatgcggagagcattgtagccaagggcataagagatggtgcaattgatgccaccatagatcaagcaaatggctggatggtatggaaggaaactggtgatgtctactctacaaatgagccatagatcatacaaatgagcccttgatgccacccaggattgggtccgccccctatctttcagtattcattggtttctatgattctgctcccttgtgttgctactgtttgtataggttttgcagagcctgcgatttatgtgagttaacatatcgatcttgaattcacatcacgggaagacacgtggtatgggagttgggcgcaagctcaagagccaccgcaggaaccagaggtgggctgacaaagcatacaaaaagccacttgggcaatgagtggaaaaaaccttttgctggatcatctcacgctaagggcatcattctggagaaaattggtattgaggccaagcagccaaattcggccatccgtaagtgtgcccgtgttcagctggtgaaggatggaaagaagattgctgcctttgtgccgaatgatggttgcctaaactacatcgaggagaatgatgaggtgttgattgttggatttggtcgtaactcgtaagggtcatgctgtgggagacattcctggtgtcaggttcaaggttgttaaggtttctggtgtgtcgctacttgcactcttcaaggagaagaagccaaggtcagtttggaagaaacattctcctttattcacaaactatgttgattttctgaccaagtgtccttccatacagatccatagaaaatatagtacaggtggcagcacggagaagacgtttgaaagataa

SEQ ID NO: 2030 - DNA, 1672 bp, Zea Mays
ccctaaagaaaaataggggctaccgctctgacccaacccatcaaccacttcgccttagcgtgaagtcgtgaactctgttcatagtccagggccgccgcctcagcgtggtcttgtacaatggcggaggattctggcgccatcctccgccacatctcctccgtcaaggatatggtcgacaaggttaatgaagagattgaacaaaacatacagaagaccagggaaatagaatcagagatagtgcaacattctgaaaccgaaaagcactatctcaacaaggagtctgagttgacaaaagaagtatcagttactgagtttgaactcaatggtcttatccaagtggctgcttctgaatcagatttacttaaagtggcagagggaaatttggagttccagaaagttgctcacgatgtgattcggaaaagagtttctgataagatggaaaaattcatcaatgaatctatggggtttcaagccaatatgctcaaaagttcaaatgaggatttagttctcttactgaatgaaaaaagttcactggaggatgaaagtgcgaaattgaaagtgaagataaacagtatacatagttcatccaaggaatacattgcagagattcttgaggaagtgaatacagaaaattcagttctggagtctgagctacggtacatgatttcggaatataaggatgtccaaaaggatataaacaacctgaagattctgtttagttcaagcaattcataggacaggttcctcgcgtcactgcaggattgccactgacatcaagacgacaggaataaataccaaattcttcagtaacttgataggaatggcttgtacaggcttaatttatggggactttgcttgatatgttcgaatctcccttaaatatcttctttaggatgtcgcttcctcactaccttagtttaggtcacttttataaacgtaaacactagcaaactcattagttcacagattatattaatcagcaaatattaaaatcatttagtcaaatggactgagttctattttcttgcaaaatactatatccattctcgaatatttgtctctgactagtttttttttcatttagtcaaatggactgagttctattttcttgcaaaatactatatccgttctcgaatatttgtctctgactagttcttttttgaactaaaacaaagtcttgtagtcctacatgtgcacgcataaaataatataatcataaggctggtttggtggactcgaaaataaaggttatccatggagtaagaatctcctcgctgacctaagtgtgcgaggacaacatgcattgcggtaacacagacacgacacatggtaatagtcctgcagcaagtgaagcttggcctcagataatcgagccaacgaacgagggacataataggaatctggatgcttttctaggaatccggatgctgagaaaatctgactgtgtagagaatttaagtatcatgaagaatacatgcggaagaagataaaatagtctatagggtttatattgtagaaagtaacagtttcctattattggaatgactcggccgattttgttttcaagtttattttggacggttttgactaaagtggttcttatataagcggattaaaaagctgggcgtttggcagtctgcagcagtttctggtggccatagctgaaaacaat

SEQ ID NO: 2031 - DNA, 2628 bp, Zea Mays
ctcagctgagcctgcagcccagctgcccgttccaactcctttccaaatccgccgcaacgcgaagcaaacgacgcctgaacggtcccaaaacccacaccgccacacggccacgcccagttctcccctctctcgctgcgcatcgacgacggcgagggcgccatgatcgtgcgcacgtacaggcgtagatcccgttccatctccgaaggcgggggcggggtctcgtcctcgcaggaggcgttcgacttcgatgccgacgtcgacgtgctgggatcgtcggcctcgcagccgctcccgccatcgcaggaatcctcctcgatgtgggatttcgacgaggacccgcctccgtccccgccgcggcccgggaaggaggggaggcgaagcgggcggggcggagccagaagaggaggagggttggagctcgcggaagctcccgcgatggcgccgacggtgacgctgatggaggcggaggagtacggagagatgatggagagcgtggacgacgtcacgttcgcgctcgacgggctccgccccgccgcgcagaagcggacgcggcgggccagcctgctcgcgctgctcgggatctgcgactccgccgagcgccgccgcgtgcttcggtcccaaggattggtacagcaaattatcgatgctattttggttctggacattgatgatcctccctgcgctattgctgcaggagctcttttatttgttttggcaagtgatgtccaagacaataatttgctgtcttcagaaacttgtgtccatttcctcctcaaattattaaaccctccggtgaatgttgttgatgccaaagcaccatcaataggttccaaacttcttggaatcagtaaatttcagatgcttaacggttccaataaggatgtggactcttgttcagaggacatacttttaaaagttgaagaaatcctcttaagctgcaaagagatcaaaccagcagacagggattataagagaacaacaaggccggaactatgttcaaagtggcttgctttgttgacaatggaaaaggcgtgcttgtctgctgttgcattagaggatacatctgacatggtcttagaactcggaggaaatttcaaagaaacattaaggcagttgggtggccttgatgatatttttaatgtcatggtgaattgccattcagaattggagaaacttgtaaaggatgcctccactacggttgtggagggaaaagaaggtgctcctctacaaagcaccacactcctcttgaaatgtttgaaaattttggagaatgccacatttctaagtgacaacaacaagacccatttgctcagcatgagtcgaaaattgagccctaaatgccgctcactttcttttgttggtgtcattctcaacattgttgagttactatcagctctctctctccttcagaaaccttccactgtttcaagaaaagcagatccaaaaaatactaaagtttgcaacggggcctgctctgacagtagaggtttgagcttattgaatcatcattgcaagtgcaataactcaaagaaaaagagcattttactgaaccgaaggtgccagtattgttcatccaccaaatcagaagcttctcatgttaccctctcttctagtagtgatgtcagtcagtcagaaaggatactcaattgctcatctttttcaagcaatgggacatcaagtggttcatttggagtgaaacatattaatggtgctagtttgaagctcaatgtaagaatggatcgttctaaagcttatccagtcagaggctcaactggttggatttctatgaaagcacaaacttctgattggaactccagagaaatggcaaaaaagcggcgcctatctgaaaatgtacgcactgatttgagtaatggtggtgatgatccatttgcatttgatgatattgatcaagaaccttcaaattgggatctatttggtccaaaaaggaaatcaccacagaagcgagcgaaaagaactaatggagaagtgttggatgattgtggaactgcattaatgggaagtcctaaattatgtcaacctgaagatatttatcagtcagttgcaacttctggttctaaggttgtagatgagtccaatcttttggaggattgccttttggcgtcagttaaggttcttatgaacttggcaaatgacaacccgtctggttgcgaacagatcgcgtcatgtggcggacttaataacatggcctccttgatcattaaacatttcccctcatttgatttctccatgaacagtaacaatcaaatgaatgaaagtgtgtcctctggtgatccgttgtcttcccagaacagcaagtcaccccaaatcaaaactaagcagttgcgggactatgaacttgattttctagttgccatattgggattgcttgtgaaccttgtggagaaggatagccttaatagggtacgacttgcgaatgctcgtgtttctgttaatctatctcaaaatccagatagcaaagaggtacagagggatgtcatacccctgctctgttcaatattcttagcgagtcaaggtaccggggaaactgctgaagctatatcaccggctatggtcacggattggactgtccacctcagttctctattgagagtcgatactttcgcttgg

SEQ ID NO: 2032 - DNA, 2718 bp, Zea Mays
accgggggctcacctttcggtccaagacaataatttgctgtcttcagaaacttgtgtccatttcctcctcaaattattaaaccctccggtgaatgttgttgatgccaaagcaccatcaataggttccaaacttcttggaatcagtaaatttcagatgcttaacggttccaataaggatgtggactcttgttcagaggacatacttttaaaagttgaagaaatcctcttaagctgcaaagagatcaaaccagcagacagggattataagagaacaacaaggccggaactatgttcaaagtggcttgctttgttgacaatggaaaaggcgtgcttgtctgctgttgcattagaggatacatctgacatggtcttagaactcggaggaaatttcaaagaaacattaaggcagttgggtggccttgatgatatttttaatgtcatggtgaattgccattcagaattggagaaacttgtaaaggatgcctccactacggttgtggagggaaaagaaggtgctcctctacaaagcaccacactcctcttgaaatgtttgaaaattttggagaatgccacatttctaagtgacaacaacaagacccatttgctcagcatgagtcgaaaattgagccctaaatgccgctcactttcttttgttggtgtcattctcaacattgttgagttactatcagcagacagtagaggtttgagcttattgaatcatcattgcaagtgcaataactcaaagaaaaagagcattttactgaaccgaaggtgccagtattgttcatccaccaaatcagaagcttctcatgttaccctctcttctagtagtgatgtcagtcagtcagaaaggatactcaattgctcatctttttcaagcaatgggacatcaagtggttcatttggagtgaaacatattaatggtgctagtttgaagctcaatgtaagaatggatcgttctaaagcttatccagtcagaggctcaactggttggatttctatgaaagcacaaacttctgattggaactccagagaaatggcaaaaaagcggcgcctatctgaaaatgtacgcactgatttgagtaatggtggtgatgatccatttgcatttgatgatattgatcaagaaccttcaaattgggatctatttggtccaaaaaggaaatcaccacagaagcgagcgaaaagaactaatggagaagtgttggatgattgtggaactgcattaatgggaagtcctaaattatgtcaacctgaagatatttatcagtcagttgcaacttctggttctaaggttgtagatgagtccaatcttttggaggattgccttttggcgtcagttaaggttcttatgaacttggcaaatgacaacccgtctggttgcgaacagatcgcgtcatgtggcggacttaataacatggcctccttgatcattaaacatttcccctcatttgatttctccatgaacagtaacaatcaaatgaatgaaagtgtgtcctctggtgatccgttgtcttcccagaacagcaagtcaccccaaatcaaaactaagcagttgcgggactatgaacttgattttctagttgccatattgggattgcttgtgaaccttgtggagaaggatagccttaatagggtacgacttgcgaatgctcgtgtttctgttaatctatctcaaaatccagatagcaaagaggtacagagggatgtcatacccctgctctgttcaatattcttagcgagtcaaggtaccggggaaactgctgaagctatatcaccggggaggttgatgcgaacagatttctatctctggtcatatgatttgtacatacactatcaagcactcaagtacccaactcgacccaccgaaggagtatgcctttcaatctcctttctcatagcttccatattagcaaggatgatgaagaatctctgttgcaaggagaacgcgaagctgaaatgatgattgtggaggcctatgcagctcttgtgctcgcctttctttcaacggaaagtatgaaggttcgaggagccatttctagttgccttccggacaacaacttgaaagttcttgtaccagtgctagagaaatttgtgtcatttcatctgcagctcaacatgatgacaagggaaacgcattcagctgtgactgaagtcatcgaaagatgtcggctatcatagaagtgggaagaggcgccctgtacagattagctgacctctttgcagccgaagcacacacaggtgttgctcatcacctggccagggcgcaacaaatggatgccagaggctggcctgcagtgggctttgggagctaacagtgattttattctttcttttgtccctagtttcttgttctccgcatcccccgaaatcacatgtttcattgtcgtaggaatagtccgtattatgaatgtacaataacaacataggccgtagggggaatgtagttgtgctgtttcagttcctgggctgtctgcctttcaggttgtatgctcgtgtcacatggaatcagtgaccgcatgcctaaatctgagttaagattgtatatcacataatagccgtgcaattcaactatgtagccctatgtacagaggcgccatatattgaagcatcttctggttgcaaaaaacatgaatgttgtataaatagtgtaactgaaggtatacaaatcttccaggcagttccttggtgctatataatgcacggcttagtggcgta

SEQ ID NO: 2033 - DNA, 2727 bp, Zea Mays
ctcagctgagcctgcagcccagctgcccgttccaactcctttccaaatccgccgcaacgcgaagcaaacgacgcctgaacggtcccaaaacccacaccgccacacggccacgcccagttctcccctctctcgctgcgcatcgacgacggcgagggcgccatgatcgtgcgcacgtacaggcgtagatcccgttccatctccgaaggcgggggcggggtctcgtcctcgcaggaggcgttcgacttcgatgccgacgtcgacgtgctgggatcgtcggcctcgcagccgctcccgccatcgcaggaatcctcctcgatgtgggatttcgacgaggacccgcctccgtccccgccgcggcccgggaaggaggggaggcgaagcgggcggggcggagccagaagaggaggagggttggagctcgcggaagctcccgcgatggcgccgacggtgacgctgatggaggcggaggagtacggagagatgatggagagcgtggacgacgtcacgttcgcgctcgacgggctccgccccgccgcgcagaagcggacgcggcgggccagcctgctcgcgctgctcgggatctgcgactccgccgagcgccgccgcgtgcttcggtcccaaggattggtacagcaaattatcgatgctattttggttctggacattgatgatcctccctgcgctattgctgcaggagctcttttatttgttttggcaagtgatgtccaagacaataatttgctgtcttcagaaacttgtgtccatttcctcctcaaattattaaaccctccggtgaatgttgttgatgccaaagcaccatcaataggttccaaacttcttggaatcagtaaatttcagatgcttaacggttccaataaggatgtggactcttgttcagaggacatacttttaaaagttgaagaaatcctcttaagctgcaaagagatcaaaccagcagacagggattataagagaacaacaaggccggaactatgttcaaagtggcttgctttgttgacaatggaaaaggcgtgcttgtctgctgttgcattagaggatacatctgacatggtcttagaactcggaggaaatttcaaagaaacattaaggcagttgggtggccttgatgatatttttaatgtcatggtgaattgccattcagaattggagaaacttgtaaaggatgcctccactacggttgtggagggaaaagaaggtgctcctctacaaagcaccacactcctcttgaaatgtttgaaaattttggagaatgccacatttctaagtgacaacaacaagacccatttgctcagcatgagtcgaaaattgagccctaaatgccgctcactttcttttgttggtgtcattctcaacattgttgagttactatcagctctctctctccttcagaaaccttccactgtttcaagaaaagcagatccaaaaaatactaaagtttgcaacggggcctgctctgacagtagaggtttgagcttattgaatcatcattgcaagtgcaataactcaaagaaaaagagcattttactgaaccgaaggtgccagtattgttcatccaccaaatcagaagcttctcatgttaccctctcttctagtagtgatgtcagtcagtcagaaaggatactcaattgctcatctttttcaagcaatgggacatcaagtggttcatttggagtgaaacatattaatggtgctagtttgaagctcaatgtaagaatggatcgttctaaagcttatccagtcagaggctcaactggttggatttctatgaaagcacaaacttctgattggaactccagagaaatggcaaaaaagcggcgcctatctgaaaatgtacgcactgatttgagtaatggtggtgatgatccatttgcatttgatgatattgatcaagaaccttcaaattgggatctatttggtccaaaaaggaaatcaccacagaagcgagcgaaaagaactaatggagaagtgttggatgattgtggaactgcattaatgggaagtcctaaattatgtcaacctgaagatatttatcagtcagttgcaacttctggttctaaggttgtagatgagtccaatcttttggaggattgccttttggcgtcagttaaggattatgcttgagcagtgggtgagctttatgcaaaattaaaactctacaagttttaaacttacttgctacttctactttgctaatcattgtgaaagttttgatcagctagctttaccaaacaaacatcttttgcagcaggttcttatgaacttggcaaatgacaacccgtctggttgcgaacagatcgcgtcatgtggcggacttaataacatggcctccttgatcattaaacatttcccctcatttgatttctccatgaacagtaacaatcaaatgaatgaaagtgtgtcctctggtgatccgttgtcttcccagaacagcaagtcaccccaaatcaaaactaagcagttgcgggactatgaacttgattttctagttgccatattgggattgcttgtgaaccttgtggagaaggatagccttaatagggtacgacttgcgaatgctcgtgtttctgttaatctatctcaaaatccagatagcaaagaggtacagagggatgtcatacccctgctctgttcaatattcttagcgagtcaaggtaccggggaaactgctgaagctatatcaccggtatgagatcggtccaaagaaat

SEQ ID NO: 2034 - DNA, 1900 bp, Zea Mays
cgcgcgatggcggaggaccagaccaaccccagcggcccagccccagcaagcggggaggagagggaggtggtggtggagcaccagcaggaggagccgaggaggagggccccgaagctgaggtacctggacttcgtccaggtggcggcggcgcaggccgcggtgtgcatcgcggcgctctacggcctcgccaaggaccacgccggcccgctccgtcccggcgtcgacgccgtcgagtccgccgtcaagggcgtcgtcggccctgtctgcggcctgcccctcgacgtcctcgccttcgtcgaccgcaaggtgcacgaggtgggcaaacatctcccgggcgcgctgaaggcggcgtcggcgcgggcgtacgcggtggcgcgggagctggcggccgaggcgcagcagtcgctcgctcgccaaggcggagccggtggtccggggtgtgtacggccgcgtggagcccactgcgagacctgtacgtgcggtacgagcccgcggcggagcacctggccgtctccgcttggcgctcgctcaacggcctgccggtgttcccgcacgtcgcgcagatcgttgtgcccaccgccgcgcactgggccgagaagtacaaccgggcggtcgccacagcggcggatcacggctacgccggggccacgtaccttcccaccatccccaccaagcgcatcgccaaggtgttctcgtcgcgacggaggccgagtcccagtagtgtgcggcaggcagggtagtgcgtcgtttacctgacctatagatggccatttgacactaacacgatgagtcagctcagccacgacacaaaaaagcacgatccaggtacgacccggcccggcgagtatagtgccagtgcctggtacggcacggctatagtgtcgtgtctgagccactatctcgacatgtagtgatgacacgggcacgacatggttacattttttattttaaaaataatagtttacatatattaaatataagaattcaccatataacacaataaaattgcagctgcccggtttagatggatgcatttaagcttcttatgcactaggttgtgagtttgagcccccacaactgcacattttttgctaaattatacaatatactcagatgtgccgcggtagcggcacgccgggccatctggcacagcccgtttcgctagtcgggcctgacgggccgtgccgggtcggcccgtgccggcccgtttggccatctataaccggaccctgatgatgatgggttgtggtgacctctggatttgtcctccagttccagaactgaataaaggaagggctaaagctggtaggtatggtaatggtggttttactagatgcgtgttgagacgatctgtcacggaccatgatcgtgattgatgatactgtgttccactaactccgcttctttcatgcttttgtatagaggtcgttcggttacagcagctgttccattgggtggcaccgtgtagaacttgaataggtcagttccatcattgcataacttcattacctctggagattgcaagagtagttgttgcttactgattgttatacaaaaaaaaaatgaaggattgcgctgcttagctgatcagatgatgtagagactatttcagatcacgcatgtatagatacatgttcaacaaaagagatgcaaggtgatacacacaccaaacaactgttggctaccagacatgactacccccttttgtactactgcttgtatctgttttttgtactactgctatgtatctgattttgacattgcagctagataaagttaaatgcctgaatctaaggagtaaggagtacatatagtattgacactttagaattataattcgttttaaagtttttagaacattattttttgttatgtatctaacatgattacctagatgctc

SEQ ID NO: 2035 - DNA, 2246 bp, Zea Mays
gacgcccgcctcctatatagctctcggctctcgcagtctcccggcccccctttcggttcgcgcgatggcggaggaccagaccaaccccagcggcccagccccagcaagcggggaggagagggaggtggtggtggagcaccagcaggaggagccgaggaggagggccccgaagctgaggtacctggacttcgtccaggtggcggcggcgcaggccgcggtgtgcatcgcggcgctctacggcctcgccaaggaccacgccggcccgctccgtcccggcgtcgacgccgtcgagtccgccgtcaagggcgtcgtcggccctgtctgcggcctgcccctcgacgtcctcgccttcgtcgaccgcaaggtgagtttagtcgcatcgccccgcgtcgcgcgcgcgcgccctgtcaccgacccctcctcctcctgctccttcgttagccaacggcgtcgttctgcgcccgcttggcgaggggcggtttcaccaacctcgccggtggactctggacacaacgacgactccagcctagctagtgccttctgtgccagacttcattccggcgcatgataagctgcgcccggcggagatgtcgacaacgcaattagcaagggtttatttcgaggaatcaaattaacaacgatgtagtaacaggtgcacgaggtgggcaaacatctcccgggcgcgctgaaggcggcgtcggcgcgggcgtacgcggtggcgcgggagctggcggccgaggcgcagcagtcgctcgctcgccaaggcggagccggtggtccggggtgtgtacggccgcgtggagcccactgcgagacctgtacgtgcggtacgagcccgcggcggagcacctggccgtctccgcttggcgctcgctcaacggcctgccggtgttcccgcacgtcgcgcagatcgttgtgcccaccgccgcgcactgggccgagaagtacaaccgggcggtcgccacagcggcggatcacggctacgccggggccacgtaccttcccaccatccccaccaagcgcatcgccaaggtgttctcgtcgcgacggaggccgagtcccagtagtgtgcggcaggcagggtagtgcgtcgtttacctgacctatagatggccatttgacactaacacgatgagtcagctcagccacgacacaaaaaagcacgatccaggtacgacccggcccggcgagtatagtgccagtgcctggtacggcacggctatagtgtcgtgtctgagccactatctcgacatgtagtgatgacacgggcacgacatggttacattttttattttaaaaataatagtttacatatattaaatataagaattcaccatataacacaataaaattgcagctgcccggtttagatggatgcatttaagcttcttatgcactaggttgtgagtttgagcccccacaactgcacattttttgctaaattatacaatatactcagatgtgccgcggtagcggcacgccgggccatctggcacagcccgtttcgctagtcgggcctgacgggccgtgccgggtcggcccgtgccggcccgtttggccatctataaccggaccctgatgatgatgggttgtggtgacctctggatttgtcctccagttccagaactgaataaaggaagggctaaagctggtaggtatggtaatggtggttttactagatgcgtgttgagacgatctgtcacggaccatgatcgtgattgatgatactgtgttccactaactccgcttctttcatgcttttgtatagaggtcgttcggttacagcagctgttccattgggtggcaccgtgtagaacttgaataggtcagttccatcattgcataacttcattacctctggagattgcaagagtagttgttgcttactgattgttatacaaaaaaaaaatgaaggattgcgctgcttagctgatcagatgatgtagagactatttcagatcacgcatgtatagatacatgttcaacaaaagagatgcaaggtgatacacacaccaaacaactgttggctaccagacatgactacccccttttgtactactgcttgtatctgttttttgtactactgctatgtatctgattttgacattgcagctagataaagttaaatgcctgaatctaaggagtaaggagtacatatagtattgacactttagaattataattcgttttaaagtttttagaacattattttttgttatgtatctaacatgattacctagatgctc

SEQ ID NO: 2036 - DNA, 659 bp, Zea Mays
cccgtatcctgcacacgccatcgcaacgcctccaaggctccttctagatctgcctcggccacggaacggtgccgctggagctgcagccatccagccgaccgccggccaccagccgagccgccgcacgaaggctatgatattcaatgtgatctcatcaacaaagcaatcgtatggagaattggaatgttttcagtcctattaaatgccacttgatttgcagaagctgttcaaaggggttactggtggcctctctggattgtcaaagaatgtcacgtgccatgaaacactgccaagaaatattaggagctggtttgaaaaaggcccaacgtaatagcaactgggagcaacagccactaacccaaaatcagtgtcgccttccatcaatcgtggcatcaccgaagccagaaatatagaagacgcggaaaagtggagcgtcagggaatcttaagaaaggagagacatctctagttgttatcagatttgggtctgttgagaagaagccatttgacttcttgcattgttgggatgtacttaaggatgaaccaaaatgggtggaccatcacattggacaacaaccacgcaccatacctcttatgccaaatgagtcatacatgattgatttggatcttgaagactcaataccaggcatcacaacataa

SEQ ID NO: 2037 - DNA, 974 bp, Zea Mays
tcccccatgcgcgaaacaatcctccgcctccgtcgcctattcgcctctcccactctctgcccccgcctcccctccttctctccctcccccgcatgcctcaactgctcctctccggcgtcgtagccgtccctctcgctcccgtgacatccagatctgacttgggggcgcagctcagagtgccaatgcgccgcaacctccgttgcgcccgcacgtgccctagccagtcgccatggagctcatccccatcaagcccgagattggataggagctccgaacgcgagccatagacggggagttgatgccaccgggcaatggatggtcgcatcctcaggacctccgcgtgcaacagcagcgtaccgtgctttttacttcacaagaaaaggttggccgaggtccctgctctagcgcaaggatttctactgcaacgattgcaacacacacaggaacttttttgaaaccttcaagcttcaacgcttgaccctttgcattggtggcatagtgaatattgaactactggagagaatacaaaaacaatttacggatgataggtactacatatggcagatgaggcaactggccatggcatatatgttgcttcgacctgtgcagtttatggatgaagacgaagctgacctgcagatgtaaactttgttttctatggaccaggtcttgtatatccaaattgaacggattgttctaataaatatatcacaaaaagataaagtataatatttgttcttgtgcgttgttgcaatgaattttagtgaggtaatacgaacttatatccatttttcaaatatattctaggttctaaccaactggtccaaaatgtcacattgattgatatgtggatttttatacttcagaatagagacaagtggtgttgtgtaatggcacttgtaaagagagacagtacacctagggttggtccattgatgatgaacctctgtgcaaactttgtcaaggactttgca

SEQ ID NO: 2038 - DNA, 1075 bp, Zea Mays
tcccccatgcgcgaaacaatcctccgcctccgtcgcctattcgcctctcccactctctgcccccgcctcccctccttctctccctcccccgcatgcctcaactgctcctctccggcgtcgtagccgtccctctcgctcccgtgacatccagatctgacttgggggcgcagctcagagtgccaatgcgccgcaacctccgttgcgcccgcacgtgccctagccagtcgccatggagctcatccccatcaagcccgagattggataggagctccgaacgcgagccatagacggggagttgatgccaccgggcaatggatggtcgcatcctcaggacctccgcgtgcaacagcagcggtaagaactcgtccccttcctctccggtggcagtctcacgatcttcctctgccgccattgaactttaaaaatgagaaccaaaagcacacggtttctggcctccctattaggggattccacggagggactcctctcaggaaaaaaccaagtggctatcatttttctcatcgcctacttcaatagcctacagcattagcagtaccgtgctttttacttcacaagaaaaggttggccgaggtccctgctctagcgcaaggatttctactgcaacgattgcaacacacacaggaacttttttgaaaccttcaagcttcaacgcttgaccctttgcattggtggcatagtgaatattgaactactggagagaatacaaaaacaatttacggatgataggtactacatatggcagatgaggcaactggccatggcatatatgttgcttcgacctgtgcagtttatggatgaagacgaagctgacctgcagatgtaaactttgttttctatggaccaggtcttgtatatccaaattgaacggattgttctaataaatatatcacaaaaagataaagtataatatttgttcttgtgcgttgttgcaatgaattttagtgagaatagagacaagtggtgttgtgtaatggcacttgtaaagagagacagtacacctagggttggtccattgatgatgaacctctgtgcaaactttgtcaaggactttgca

SEQ ID NO: 2039 - DNA, 2328 bp, Zea Mays
tctgccgcccgcatcccgcatccgcgtcgcaacccgcaaccgcctgcagccgcggcttccatcttccgccctccttccatcctcctgcaatcgccagcgcgccctccgcgctcctgccatccgaggaaagccttccatccatggcgccgttgctgcaattctccccgcgatccgctctccctccattgccccccgcgatccgcgctccctccattgcccccgcgctcctgccatccatggcgcctccccacggatctctgctgtcaattttacggagaaatcacgcctccctagggtgcccttccatccatggcgtcgttgctgcaagtgccccgcaatcaactccattgccactgtgatccccttccaccgatggcactcaccttccatcgacaaaactgctcttcctccattccaccgatggcactcaccctaaaccctcacctcttagatcccgtgctcatcaccatcctgcccctcgctcgccgccccacctcaccaagagccttagccgtccctagagaagacacggaggtgcagtgcagtgcagtgctttactcaagtgcgccacggattttcggtaccggccagattgggacgaattcgacattcatcggctccaccaaagactcagtaagctcttatctgatctaatggatgggagtcgtatcttgatagtcttccaaacaaaaaaggattgcgataagatcacccgacaacttagaatggatgggtggctagcattatctatacatggtgataaagctcaagttgaacgggactatattcttgtagagtttagagcggcaagagctccataatggctgccacagatgtggcagcacgtggtcttggtatgatgatttatttgaatattaggattaggtagtagttccaagtgctcaaggatgataagtcggagggttgttgaactgcgattggttgagtgagctgaacttgtggattggtggtgtataccaaggtgccatcatgtcaaagaacaaggcgatggcccaattgtattaattcccgctcccacaagagaattggctgttcaaatacaggaagaatctacaaaatttggatcatattcaagaactagaagcacatgtgtctatggtggtgcacctaagggtccacaaatacggggccttagaagaggagttgaaattgtcattgcaactcctggccggttgattgatatgctggaagctggtcacacaaacctacgtagagtgacgtaccttgtgttggatgaggcggaccagatgctagatatggggtttgagccccaaattcaaaatagtatcacaagtacattttcgtttagaaatgcatagttatggttttactgatgtatcaaatttccataaaaatggccttgtagttcatgaactttattaattttgtttagtgataatgtggtggtggtgttttaatcgggagagcactagctcaagaagccacaacaacccaagatcattcctggcgctctccatacatctactactgctaggaatctcaagaagcttgcggcccagagccaaacggatgatgaagatgtttggtgggagtaggctgaggagcattttccatggtatttcagatggattcaaaatagaggggtgacatgcttttggaccaatggatatgatgttgtgtctgctttggattcaaacaactacacaatcatctattttgattcaaacagaggggtgacatctgtaaatccattatattaaagccactatgattgattgtttgatcagagtattttacaagagctgcttcctattttacaagagttgcttcctattttacaagagctgcttcctataatatgcacatggagacatttgtaatgatcataataaaaaggctcaaggatgtcaaccttttcatgtcacaaggaggtctcatcattctagcacagacggtggactgttcctgcggcgtcacgttcgacgacggcgagatggtcagctgcgacgagtgcagcgtgtgggtgcacacacggtgcgcacgctatgtccgtggcgtccacacatccttctcctgccacaaatgtcggaggtccaagcgcgtgcattccttcgctgacgaggccgaggttgctgagctccttgccgagctgccaacccaccgcccgcctccgctgtacttcaacgccacttgaaagggaattaggcttacacctagttcctaaataattttggtggttgaattgcccaacacaaataattggactaactagtttgccctagtgtataagttatacaggtataaaaggttcacacttagccaataaaaatatcaaatattggattc

SEQ ID NO: 2040 - DNA, 760 bp, Zea Mays
atggcggagcagggaaagggaaacaacactcaagcaaaggttacacaagtgagcagtaaagatgggcctgtagaatcactagtattagaggatgaatcacatgttatcgttgagaaggacttggtttctcagggagaagaggaggacattgaggctcttcttggcaattatgttatggccattggtgaagcagaggctttttccgaaaggatgaagcgcgagcttgtagcgctagaatctgcaaatgtttatgccttgttggaaactgaatctgttgtagaagaggtattgcagggtctcgaaatagccagtatatgtgttgaagatatggatgaatggctagggattttcaatataaagctcaggcatatgagggaggatatacaatctgtatgcttactttcacctttactgatgtatatgggcaaatcatgtttccttagagttgttgtgattaaaattattttctcttttaatgcccgatacatttaaaaccaaactatatggatgtctgatgaggcccaataagagcttaacgaaataatatttgaattgtttgtcacatgcttacaacttatagttatagtgcatcttggctgttgaaatttacacttagtgttgtctctagttctctactgaagacattagggacaatttcctaccatattcatattaattgtttaaaactgaacatatgtataagatggagttgcagaatcattgttaaatactcccgccgttccaatttataattcgtttg

SEQ ID NO: 2041 - DNA, 833 bp, Zea Mays
ctttgttgcataataaagttgaggatacgttctctgaaaaaagagatgaataagccctgctgcatcatgatcatagctgcaggttcctgcctagaagaacactcaagcaaaggttacacaagtgagcagtaaagatgggcctgtagaatcactagtattagaggatgaatcacatgttatcgttgagaaggacttggtttctcagggagaagaggaggacattgaggctcttcttggcaattatgttatggccattggtgaagcagaggctttttccgaaaggatgaagcgcgagcttgtagcgctagaatctgcaaatgtttatgccttgttggaaactgaatctgttgtagaagaggtattgcagggtctcgaaatagccagtatatgtgttgaagatatggatgaatggctagggattttcaatataaagctcaggcatatgagggaggatatacaatctgtatgcttactttcacctttactgatgtatatgggcaaatcatgtttccttagagttgttgtgattaaaattattttctcttttaatgcccgatacatttaaaaccaaactatatggatgtctgatgaggcccaataagagcttaacgaaataatatttgaattgtttgtcacatgcttacaacttatagttatagtgcatcttggctgttgaaatttacacttagtgttgtctctagttctctactgaagacattagggacaatttcctaccatattcatattaattgtttaaaactgaacatatgtataagatggagttgcagaatcattgttaaatactcccgccgttccaatttataattcgtttg

SEQ ID NO: 2042 - DNA, 3811 bp, Zea Mays
gcacccagtccacccaggccccagcactgccgctgccttgcctgccctcgcttcggcgctttctgctttctccagtgagccgcacccgcactaccgctgacgctaattaaccacaagcgaccgtcgccttcccccacctcctcccttcctcaaaaaaaggcggaggcgggagtggtggtggtgctcgtgggcacgcagcggagcaccctgtacagcagcagcgctgcggcagtagagagtgccattggtggagctggtaactagccctcccccctccgttcccgtcccgcgcgcagccgtctgccgagcctgctcagtgcccatcatggtgaggaagaagagaactggccctggtggctctggagaaacttctggagagtcttcaggagcctctggacaaggttcctcacagcagcctgagcgaactcaacaacctgggggaggacgtggctgggtgcctcaacagggtggccatggtggtgggcaacaccagggtcgtgatcgacattatcagggacgtggaggaccagggccacatcaccttggtagtggggcacctgagtatcacccgcgtgaataccagggacgtggtggtgaatatcagggacatggtggtgagtaccagggacggggtggtgactaccagggacgtggtggtggccgctccagaggtggaatgccacagccatactatggtgggcataggggaggtaatgttggacgcaatgttcctccaggtccgtccaggacagttcccgagctgcaccaagccccatatgtccagtatccagccccggtggtttcgccctccccatcgggacctggctcatcctcacagcctatggcagaggtgagctctggacaagtccagcaacagtttcagcaacttgccgatcgtggtcagagttccacgagccaagaaattcaagtggcaccagcatcaagcaaatcggttcgattcccgttacggcccggcaagggcacttatggggacaggtgcattgtgaaggcaaatcatttttttgctgagcttcctgacaaagaccttcaccaatatgatgtatctataacacctgaggttacttcacgtggcgtcaatcgtgctgtcatgggtgagcttgtaacaatatatagacaatcccatttgggtgggcgtctacctgcatacgatggaagaaagagcctgtatactgctggaccattgccatttacttctatggcatttgaaattaccttgcaagatgaggaagatagtcttggcggtcgccaaggtggacataggcgtgagagagtatttagggtggtgatcaaatttgcagcccgtgctgatctccaccatctggctatgtttctagctggaaggcaagcagatgcccctcaggaagctcttcaagtgcttgacattgtactacgtgaattgcctaccgcgaggtattctcctgtcggtaggtcattttactctcccaacttagggagacgtcaaaaacttgcttcttaacagagatatctcagttaggccattgtctgattctgatcgcgtgaagattaaaaaagccctaagaggtgtgaaggttgaggtgactcacaggggaaacatgcgcagaaaatatcgcatttctggcctcacctcacaagcaacaagagagctatcgtatgtgtctttcattgctggtatgagattccctgttgatgatcgtggtactgtgaagactgtggtgcaatacttcatggagacttatggttttagtatccagcacaccactttaccatgcttgcaagtgggtaatcaacaaagaccaaattatctgcctatggaggtttgcaagatagttgaaggacagcgttactcaaagcgactcaatgagaaacaaatcactgctctactgaaagtgacctgccagcgccctcaagagcgcgagctggacatcttacagactgtgcatcacaatgcatactatgaagacccctatgcactggaatttggtataagaattgatgaacgtcttgctgcagttgaagctcgtgttctgccaccaccaagacttaaataccatgatagtggccgagagaaggatgttttgcccagagttggccaatggaacatgatgaataagaaaatggttaatggtggcagagtgagcaactgggcatgtattaacttctctcggaatgtgcaagatagtgccgctaggggtttctctcatgagttggcagtcatgtgccaaatatcaggaatggattttgctcttgagcctgtgctgcctccagtgactgcaaggccagaacatgttgagagagcgttaaaggcacgttatcaagatgcaatgaacatactgaggccacagggaagggaacttgatctgctgatcgtaatactgcctgacaacaatggttctctttatggggatctcaaaaggatctgtgagactgaactcggattggtctcccagtgttgtctgactaaacatgtttttaagatgagcaagcagtaccttgcaaatgttgcactcaaaataaatgttaaggttgggggaaggaatactgtacttttagatgctttgtcaaggagaatcccccttgtcagtgacagaccgaccataatatttggtgctgatgttacccatccacatcctggagaagattccagtccttccattgcagccgttgttgcttcgcaagactggcccgaggtcacgaaatacgctggactagtgagtgcgcaagcccatcgccaggagctgatacaggatcttttcaaagtatggcaggacccgcagagaaggacggtaactggcggcatgataaaggaacttctcatttctttcaagagggcaactggacagaagccccagaggatcatattctacagggatggtgtcagtgagggacagttctatcaagtattgctgtacgaacttgatgccattagaaaggcctgtgcgtccctggagcccaactaccagcctccagttacttttgtcgtggtacagaagcgccatcacactaggctgtttgcgaacaaccacagtgatcagcgcacagtcgatagaagcggaaacatactgcctggcaccgtggtcgattcgaagatttgccatcctactgagtttgacttctacctgtgtagccatgctggcattcagggaacgagccgccctgctcactaccatgtcctgtgggacgagaacaagttcacagctgacgagctgcagaccctgacgaacaacctgtgctacacgtacgctaggtgcacccgctccgtgtccatcgtgcccccggcgtactacgctcatctggcagccttccgagctcgcttctacatggagccagacacctctgacagcgggtcactggccagcggtgcccgtggccccccacccggtgcggcacgcagcagcacgagaggggccgggagtgtcgaggtcaggcccctacctgctctcaaggagaacgtgaagcgtgtcatgttttactgctgagacgctggtgggctgccttcgccaaggaaaatgccctggagcattcccatgtacccgcactgtttcggtgatacagtactatctaacgccgattttgcgcgttaagacttccagtgatctgggaaatttcttgtacgactgttgtagtgttgtgtattcgtaatgtgatgacgcggcagttcttctaggagcttagtgccgtgtaaaatatctgttgtaagttgtaacctgtcaccctctagtgttatgtcatgatgaaccaaattatttgttgtcattccatgtacttcgccaagtatttgttgtcacgatgttctaggatgatttttttt

SEQ ID NO: 2043 - DNA, 3972 bp, Zea Mays
gcacccagtccacccaggccccagcactgccgctgccttgcctgccctcgcttcggcgctttctgctttctccagtgagccgcacccgcactaccgctgacgctaattaaccacaagcgaccgtcgccttcccccacctcctcccttcctcaaaaaaaggcggaggcgggagtggtggtggtgctcgtgggcacgcagcggagcaccctgtacagcagcagcgctgcggcagtagagagtgccattggtggagctggtgtgcagtgctcgtattcgggtggactgattacttcgttaaagcctcagcatagtgatgtagccttcctccctctgctggctatatgctttgcccatcatggtgaggaagaagagaactggccctggtggctctggagaaacttctggagagtcttcaggagcctctggacaaggttcctcacagcagcctgagcgaactcaacaacctgggggaggacgtggctgggtgcctcaacagggtggccatggtggtgggcaacaccagggtcgtgatcgacattatcagggacgtggaggaccagggccacatcaccttggtagtggggcacctgagtatcacccgcgtgaataccagggacgtggtggtgaatatcagggacatggtggtgagtaccagggacggggtggtgactaccagggacgtggtggtggccgctccagaggtggaatgccacagccatactatggtgggcataggggaggtaatgttggacgcaatgttcctccaggtccgtccaggacagttcccgagctgcaccaagccccatatgtccagtatccagccccggtggtttcgccctccccatcgggacctggctcatcctcacagcctatggcagaggtgagctctggacaagtccagcaacagtttcagcaacttgccgatcgtggtcagagttccacgagccaagaaattcaagtggcaccagcatcaagcaaatcggttcgattcccgttacggcccggcaagggcacttatggggacaggtgcattgtgaaggcaaatcatttttttgctgagcttcctgacaaagaccttcaccaatatgatgtatctataacacctgaggttacttcacgtggcgtcaatcgtgctgtcatgggtgagcttgtaacaatatatagacaatcccatttgggtgggcgtctacctgcatacgatggaagaaagagcctgtatactgctggaccattgccatttacttctatggcatttgaaattaccttgcaagatgaggaagatagtcttggcggtcgccaaggtggacataggcgtgagagagtatttagggtggtgatcaaatttgcagcccgtgctgatctccaccatctggctatgtttctagctggaaggcaagcagatgcccctcaggaagctcttcaagtgcttgacattgtactacgtgaattgcctaccgcgaggtattctcctgtcggtaggtcattttactctcccaacttagggagacgtcaaaaacttggtgagggattggaaagttggcgtggtttttaccaaagcataaggccgacacagatgggcctttcactgaatattgatatgtcctctactgcatttatcgagcctctccctgtgatcgattttgttgctcagcttcttaacagagatatctcagttaggccattgtctgattctgatcgcgtgaagattaaaaaagccctaagaggtgtgaaggttgaggtgactcacaggggaaacatgcgcagaaaatatcgcatttctggcctcacctcacaagcaacaagagagctatcgtatgtgtctttcattgctggtatgagattccctgttgatgatcgtggtactgtgaagactgtggtgcaatacttcatggagacttatggttttagtatccagcacaccactttaccatgcttgcaagtgggtaatcaacaaagaccaaattatctgcctatggaggtttgcaagatagttgaaggacagcgttactcaaagcgactcaatgagaaacaaatcactgctctactgaaagtgacctgccagcgccctcaagagcgcgagctggacatcttacagactgtgcatcacaatgcatactatgaagacccctatgcactggaatttggtataagaattgatgaacgtcttgctgcagttgaagctcgtgttctgccaccaccaagacttaaataccatgatagtggccgagagaaggatgttttgcccagagttggccaatggaacatgatgaataagaaaatggttaatggtggcagagtgagcaactgggcatgtattaacttctctcggaatgtgcaagatagtgccgctaggggtttctctcatgagttggcagtcatgtgccaaatatcaggaatggattttgctcttgagcctgtgctgcctccagtgactgcaaggccagaacatgttgagagagcgttaaaggcacgttatcaagatgcaatgaacatactgaggccacagggaagggaacttgatctgctgatcgtaatactgcctgacaacaatggttctctttatggggatctcaaaaggatctgtgagactgaactcggattggtctcccagtgttgtctgactaaacatgtttttaagatgagcaagcagtaccttgcaaatgttgcactcaaaataaatgttaaggttgggggaaggaatactgtacttttagatgctttgtcaaggagaatcccccttgtcagtgacagaccgaccataatatttggtgctgatgttacccatccacatcctggagaagattccagtccttccattgcagccgttgttgcttcgcaagactggcccgaggtcacgaaatacgctggactagtgagtgcgcaagcccatcgccaggagctgatacaggatcttttcaaagtatggcaggacccgcagagaaggacggtaactggcggcatgataaaggaacttctcatttctttcaagagggcaactggacagaagccccagaggatcatattctacagggatggtgtcagtgagggacagttctatcaagtattgctgtacgaacttgatgccattagaaaggcctgtgcgtccctggagcccaactaccagcctccagttacttttgtcgtggtacagaagcgccatcacactaggctgtttgcgaacaaccacagtgatcagcgcacagtcgatagaagcggaaacatactgcctggcaccgtggtcgattcgaagatttgccatcctactgagtttgacttctacctgtgtagccatgctggcattcagggaacgagccgccctgctcactaccatgtcctgtgggacgagaacaagttcacagctgacgagctgcagaccctgacgaacaacctgtgctacacgtacgctaggtgcacccgctccgtgtccatcgtgcccccggcgtactacgctcatctggcagccttccgagctcgcttctacatggagccagacacctctgacagcgggtcactggccagcggtgcccgtggccccccacccggtgcggcacgcagcagcacgagaggggccgggagtgtcgaggtcaggcccctacctgctctcaaggagaacgtgaagcgtgtcatgttttactgctgagacgctggtgggctgccttcgccaaggaaaatgccctggagcattcccatgtacccgcactgtttcggtgatacagtactatctaacgccgattttgcgcgttaagacttccagtgatctgggaaatttcttgtacgactgttgtagtgttgtgtattcgtaatgtgatgacgcggcagttcttctaggagcttagtgccgtgtaaaatatctgttgtaagttgtaacctgtcaccctctagtgttatgtcatgatgaaccaaattatttgttgtcattccatgtacttcgccaagtatttgttgtcacgatgttctaggatgatttttttt

SEQ ID NO: 2044 - DNA, 596 bp, Zea Mays
cgactcacaagttcacactccacagcaagttcaccactgagtagcagctaccgccatgttgatcgccaccaccatgccacgaggtttcgctttcgcggcgccatgccgcagcctccagacgacgacagtcaggtgcaaggctaccggcgccgccgaccgccgcgacgtgctcctcggcctcggcggggcggcggcgtccggcctcctcaggtcgtcgtcctcgtcgagcagcggcggcgcgcccatccaggcgccggacctccggaactgccacccgcccgacctccccgacacggcggaggatgtgaactgctgcccgagcccggggatcgtcgacttcactccttcgccgcggctccgcgtgcgcccggccgctcacctggtggacgcggagtacgtggccaagtacgagaaggccgtggcgctgatgaagcagctgccggacgacgacccgcgtagcttcgcgcagcagtggcgcgtgcactgcgcctactgcgacggcgcgttcgaccaggtcgggttcccggacctggagatccagatacacaactgctggctcttcttccaatggcacagcttgattagtttcacaaatt

SEQ ID NO: 2045 - DNA, 1650 bp, Zea Mays
gctcgctctccttctaccagcctgctccggtcctcttggagttgggcctgcccacctcccggccggtccgccgcgcggttccagtttcgcctctcgtcgccggtcctggcgagccccgcctccttgatctccgaccagcagcttccccactgcccactccccagccccggacgtgcccttcgccggtgctgtcatggcgttcggccgacggagccccggatcctcgcggcaccctcccgcgctcaccatcgtcacggcgctactcctcgcctccctctacttcgccgccgcggcggcggctctatcgcccaccgacgcgatgcacaacaacaactgggccgtgctcgtgtgtacctcccgcttctggtttaattatcgacacatggcgaatacattgtccctatacaggactgttaagagattaggaatacctgatgagcgaatcatacttatgttggcggacgatatggcctgtaacccaaggaacagctatcctgcccaagttttcaataatgagaaccaccagctaaatctctatggtgacaatgttgaggtcgattatcgagggtatgaggtgacagttgaaaatttcttgagagttttgactggccgacatgaaagtgctgtaccaagatcgaagcgtcttcttagtgatgaaggaagtcatatacttttgtacatgactggacatggtggtgatgaatttttgaagttccaagattctgaagagcttcagagccatgacttagcagatgctgtgaagcaaatgaaggagaagcatagatttaaagagctgctgataatggtagatacctgccaagctgctactctcttttcacagcttcagtcacctggtgttttggcgattggtagtagcatgaagggtgaaaactcttattctcaccatcttgattcagatgtaggtgtttctgttgtggataggtttacctattatacacttgctttctttgagaaactgaacatgtatagcaatgcctcactgaacagccttttcacctcatacaatccttccatgctgttgtctactgcatattatcgaatggatctttatgaacgtcccttaaatgagtcatgaagactctccacactgattcagcctacacaggtttcttggctgcgcatgacaatgaaactccaatgtccacgggagataaccttgatgatcatttcatgttaaagggcagggctatcgcacgaagatcaaccatagaaaaggaggcacaattaacaccgcatggatggactgaagttctggctgaacagctggagggaaagaatactgatactgttgtgatgtatggtctgggagctatgggtatactgttggcactttcaacctggttatcaatgtaggcaccaaaaaagtgtggttcgtagtctcttacgctatccatctctggtccgcgtgcgagagagagaaaagagataatatgtttgggaggtcttttagattttttctcttggtttttaaattcattaacgatgattagagttctttagaaaatgctgtatgtagttctttagggattactgtgttatcgttttatttatttaacatgatcttttgggaaagacttgtgcatatggaagtttggttatcttgatagccatttgagtatcttgtctccg

SEQ ID NO: 2046 - DNA, 1355 bp, Zea Mays
ctactatacacttgtgaagtggaacttgatgatatcttcattttttgactttttgtgctttaggctcctcttcttggatcgactgcagcagttagatctgcacatgtatatctttgtttaattatcgtctccgtattgtaagattaatttgagcttccattctacttttgctccacatatgaaacattaaaagatactctaattatgctatttaactccaagggtggaggtggaatgggtgattataaccacctgcaggttgtgtacatatctttagtacatatccattatgctatttaactccgaaaggagacaatatgcatcagtttcaacaactttgttgtttccttttcatgctgtcttataggatggcattttctgctcaatttgtccgttgctgatttcagtcggagattagattagattagatatgtcgctgatggaagtccaactaatagcgaactgaagaccgccgaccttgtgtctacacccgcacattctgttgcatctatacctccttctacaccagcacttcatgttgctcctgcacttttgtctacccctgtcagatgctcatctccatttatcacgccaccatattgttcctcaggtatgcaagcaatttttatttttgatctttctccttgttagcttgattgatctttctccagtatttatttgtgggcttggttaatctaggttccatttagttgttgaattagttctaaaatcatagtggaaccaaaataatgtgtggatatttgcaaacgagtttctcttgaagtcatggtgtgaggaaaaaagctgcacaaattgagctgtaaagctaggcttcccaacaaggagttaaaacaacaattcctcaaatttgtgctagaagcaagaggctgttaaagaagtgctctttagcaaaggtttcgtcattcttgcctaccgctgtccctttgcttcagaatacggtgaaacagaagtccttcattggctcttctcatcttggctcacatgcagtacttgaataccagtttcttcctgagcagccaagtgatgcatatgagaggggaagccagttgcgcttctatgatgctctagcagaagtgttaaactcaaggaaagaagaacaaatgtagagggaaatggagagacatgatcacgagagatgtaatgaagagaggttcatgcgtgaaaggcaaaggaaagaagaaaattccattagcaacagagacgtatacttataactattatggtagataaaaaatgttacaatgtctctcttctatagaacgaaactgggatatcattcattgatatatgttcgattttattcaataattattatataattgtgcaccgtcgca

SEQ ID NO: 2047 - DNA, 1367 bp, Zea Mays
aacaaagagtcttcaaaatggtgaaagggatggcattttctgctcaatttgtccgttgctgatttcagtcgggtaatgttctttctgcacaatgacttttgcttgcaaagtcgagtttggcattatgctttgtgtagatgtatctgagaattgcatgactgcatacccttaacatgaaatttcatttttagagattagattagattagatatgtcgctgatggaagtccaactaatagcgaactgaagaccgccgaccttgtgtctacacccgcacattctgttgcatctatacctccttctacaccagcacttcatgttgctcctgcacttttgtctacccctgtcagatgctcatctccatttatcacgccaccatattgttcctcaggtatgcaagcaatttttatttttgatctttctccttgttagcttgattgatctttctccagtatttatttgtgggcttggttaatctaggttccatttagttgttgaattagttctaaaatcatagtggaaccaaaataatgtgtggatatttgcaaacgagtttctcttgaagtcatggtgtgaggaaaaaaggtaatgtccttcacattattctggtttagtataccttgttgattattgacatatgttggtcatgttggtgctccactaccttgttcgtatattaaggcatgctacatttcttaactacgtaccaatgatgtggatacgatttttgcagcaaagctatttttatcctggtgttatcttatctattctcatgacagtgaatttagttttattgttgacctcccacggttcttgacttcctaacatcggccactttatttttagttgattgactggcatgagggtggatacttgactgttgatttaccaatgtctcggggagaagttgtcattgggggtccaaatgtttcgtcattcttgcctaccgctgtccctttgcttcagaatacggtgaaacagaagtccttcattggctcttctcatcttggctcacatgcagtacttgaataccagtttcttcctgagcagccaagtgatgcatatgagaggggaagccagttgcgcttctatgatgctctagcagaagtgttaaactcaaggaaagaagaacaaatgtagagggaaatggagagacatgatcacgagagatgtaatgaagagaggttcatgcgtgaaaggcaaaggaaagaagaaaattccattagcaacagagacgtatacttataactattatggtagataaaaaatgttacaatgtctctcttctatagaacgaaactgggatatcattcattgatatatgttcgattttattcaataattattatataattgtgcaccgtcgca

SEQ ID NO: 2048 - DNA, 1391 bp, Zea Mays
agagtcttcaaaatggtgaaagggctcctcttcttggatcgactgcagcagttagatctgcacatgtatatctttgtttaattatcgtctccgtattgtaagattaatttgagcttccattctacttttgctccacatatgaaacattaaaagatactctaattatgctatttaactccaagggtggaggtggaatgggtgattataaccacctgcaggatggcattttctgctcaatttgtccgttgctgatttcagtcggcgaactgaagaccgccgaccttgtgtctacacccgcacattctgttgcatctatacctccttctacaccagcacttcatgttgctcctgcacttttgtctacccctgtcagatgctcatctccatttatcacgccaccatattgttcctcaggtatgcaagcaatttttatttttgatctttctccttgttagcttgattgatctttctccagtatttatttgtgggcttggttaatctaggttccatttagttgttgaattagttctaaaatcatagtggaaccaaaataatgtgtggatatttgcaaacgagtttctcttgaagtcatggtgtgaggaaaaaaggtaatgtccttcacattattctggtttagtataccttgttgattattgacatatgttggtcatgttggtgctccactaccttgttcgtatattaaggcatgctacatttcttaactacgtaccaatgatgtggatacgatttttgcagcaaagctatttttatcctggtgttatcttatctattctcatgacagtgaatttagttttattgttgacctcccacggttcttgacttcctaacatcggccactttatttttagttgattgactggcatgagggtggatacttgactgttgatttaccaatgtctcggggagaagttgtcattgggggtccaaatgtttcgtcattcttgcctaccgctgtccctttgcttcagaatacggtgaaacagaagtccttcattggctcttctcatcttggctcacatgcagtacttgaataccagtttcttcctgagcagccaagtgatgcatatgagaggggaagccagttgcgcttctatgatgctctagcagaagtgttaaactcaaggaaagaagaacaaatgtagagggaaatggagagacatgatcacgagagatgtaatgaagagaggttcatgcgtgaaaggcaaaggaaagaagaaaattccattagcaacagagacgtatacttataactattatggtagataaaaaatgttacaatgtctctcttctatagaacgaaactgggatatcattcattgatatatgttcgattttattcaataattattatataattgtgcaccgtcgca

SEQ ID NO: 2049 - DNA, 1818 bp, Zea Mays
cgtctgcccaccgggctatatgcgcatgcggagtcactcacactgtccatgggcccacgtgtcagcctcacactaggctcgcccaggggcttctgtgtcacaggcatgtggacctcaacccttcttccacctcgcgttcattgcgacctggcgataagttcgcctaagaacgcgatcgcgtaaccactgcggtgcccagaccgcttcggttgaaggaatccctgccttggcttcgcactatatctctacaattccttaagagtataaggagggcgtccaccaccctcaccctggttccgccctccccccgccgctcgccgctaatctcgccgcgcacgccccctccctcgcgtccacagctagcttgccctcgccttcgctgaatccgcccctccccgcactcgcgcatggaaccacccagcctccgcccccgtccaccttggccccggcaccgtaggcggatctgtgcctttcctcgcccgcgtccacccccatcgcctcctcctacaccttctccgccatcggcatcatcgcctccgtcctcggccctccctgcacactgcaaccgcctcctgacgatgctcgcgtgggatggtgacggtgacgcggcgatccgtggcttgtgccccctccgccgcctccagcaccttctctgccatcggcatctccatccttggcgcggcatggttggccctaccctgctctttttaaggctgaaatgccctggtcagcctgaagaggaaatctctcagagaaacaaagagtcttcaaaatggtgaaaggctgcacaaattgagctgtaaagctaggcttcccaacaaggagttaaaacaacaattcctcaaatttgtgctagaagcaagaggctgttaaagaagtgctctttagcaaaggtttcgtcattcttgcctaccgctgtccctttgcttcagaatacggtgaaacagaagtccttcattggctcttctcatcttggctcacatgcagtacttgaataccagtttcttcctgagcagccaagtgatgcatatgagaggggaagccagttgcgcttctatgatgctctagcagaagtgttaaactcaagggtagattcgttttctataggatcacactttacccatgtagttgagcaggcacctagctatacatttcacagtcaatcatctggttctagctgtttgtcaaatattattgctagcatggctcaaatccaaatattattgctagcatggctcaaatccacggtcaaaaattggcatccctcaagttgtcagatttgaaagctccctcgcatcccctaaaagattgggttatcatgatgaagaacatgtcacgtggacagaaaaacacaagaactatatttatggatatactatttttttcttcttttgtattattatattcatatccttttttacctttatattattattttttatatatgttgtatttgtctaatattacttcatcataatgaggaagctaagattgctagggaggttgaggctcatgaaaagagaattaaaaaggagcttgagagttgagaagcaaggtctactaaatagaaagaaagaagaacaaatgtagagggaaatggagagacatgatcacgagagatgtaatgaagagaggttcatgcgtgaaaggcaaaggaaagaagaaaattccattagcaacagagacgtatacttataactattatggtagataaaaaatgttacaatgtctctcttctatagaacgaaactgggatatcattcattgatatatgttcgattttattcaataattattatataattgtgcaccgtcgca

SEQ ID NO: 2050 - DNA, 1901 bp, Zea Mays
atggctgcggcggaggcgcggcgccggtcagcggtctgggccctgctgccgctgctgctgcggctgctccacccggtcgcgctcgtgctggccaacaccgaaggttggccctaccctgctctttttaaggctgaaatgccctggtcagcctgaagaggaaatctctcagagaaacaaagagtcttcaaaatggtgaaagggctcctcttcttggatcgactgcagcagttagatctgcacatgtatatctttgtttaattatcgtctccgtattgtaagattaatttgagcttccattctacttttgctccacatatgaaacattaaaagatactctaattatgctatttaactccaagggtggaggtggaatgggtgattataaccacctgcaggttgtgtacatatctttagtacatatccattatgctatttaactccgaaaggagacaatatgcatcagtttcaacaactttgttgtttccttttcatgctgtcttataggatggcattttctgctcaatttgtccgttgctgatttcagtcgggtaatgttctttctgcacaatgacttttgcttgcaaagtcgagtttggcattatgctttgtgtagatgtatctgagaattgcatgactgcatacccttaacatgaaatttcatttttagagattagattagattagatatgtcgctgatggaagtccaactaatagcgaactgaagaccgccgaccttgtgtctacacccgcacattctgttgcatctatacctccttctacaccagcacttcatgttgctcctgcacttttgtctacccctgtcagatgctcatctccatttatcacgccaccatattgttcctcagctgcacaaattgagctgtaaagctaggcttcccaacaaggagttaaaacaacaattcctcaaatttgtgctagaagcaagaggctgttaaagaagtgctctttagcaaaggtttcgtcattcttgcctaccgctgtccctttgcttcagaatacggtgaaacagaagtccttcattggctcttctcatcttggctcacatgcagtacttgaataccagtttcttcctgagcagccaagtgatgcatatgagaggggaagccagttgcgcttctatgatgctctagcagaagtgttaaactcaagggtagattcgttttctataggatcacactttacccatgtagttgagcaggcacctagctatacatttcacagtcaatcatctggttctagctgtttgtcaaatattattgctagcatggctcaaatccaaatattattgctagcatggctcaaatccacggtcaaaaattggcatccctcaagttgtcagatttgaaagctccctcgcatcccctaaaagattgggttatcatgatgaagaacatgtcacgtggacagaaaaacacaagaactatatttatggatatactatttttttcttcttttgtattattatattcatatccttttttacctttatattattattttttatatatgttgtatttgtctaatattacttcatcataatgaggaagctaagattgctagggaggttgaggctcatgaaaagagaattaaaaaggagcttgagagttgagaagcaaggtctactaaatagaaagaaagaagaacaaatgtagagggaaatggagagacatgatcacgagagatgtaatgaagagaggttcatgcgtgaaaggcaaaggaaagaagaaaattccattagcaacagagacgtatacttataactattatggtagataaaaaatgttacaatgtctctcttctatagaacgaaactgggatatcattcattgatatatgttcgattttattcaataattattatataattgtgcaccgtcgca

SEQ ID NO: 2051 - DNA, 642 bp, Zea Mays
gttagcttctccttctgcactgagctgtggtgtgatagatctggagataccagcatgtaagcaccaaatacgttttgatggagcgtagtttcagactactacaaaatagacgcaacgggcattccttaatcaaatcatcagtctccttggatcgtgttccattttgccagtgccagtttctatgtgtggttccatggttcaggtgggtcgagagcattctcgaggcgctcagagtccacaggacagcatcaaaagaggccccaaaacgttgaaaacgggcggatggcggagcttcttcttggcgttggtagccgtccgcagtgtcgaagaaattctttgcttctttgacgacaattgccccccgttgagggaggtggtggtgtcaagccatggctttccactggcccagtttgtaatggattcttgggccgaaaggcccatctctatatgtcttgactcgcaaggcgattgcatcagtccatccatccatttcatggagggttttagcagtgccgtctctgtttcgctaatcggtgatggcagccagccttgttgtactttgtgggtttgttgacgcagccggtcggattcttcttattgccggattggttgcgtaacgctaggtggttctgaatatcggcg

SEQ ID NO: 2052 - DNA, 1827 bp, Zea Mays
agtgggagagaagcaaacatgagaggagagaagcaggggagagaagcaggggtccagcgtccggtaggggtccggcgtcagccgtgctggagagaagctgcagccgcgtcttcggcgtccggtggagctgcagccgcgtctctggcgtcagccgtgcaggagagaagggagaagcaagcgtcgaaaggggaagaactgaagaagcaagcaggcacttttcaaccgcaaaccctagaccctatcccccgcgcgcgccacccttttccctcccacgcgcgcgtcgcatttttccctcccgcacgcgccgcatttttccctcccgcgcgcgcgcccctttcctgcgcgctatttcccgctcgcgtgcgcggcgcgcgcgtagctcgcctaagcgccgctgagtcgccgcggaatcgccgcccggcgccgcctaggcgctccaatcgcctaggggcccgcctacccccctagtccaggcgggaggccgtagcctagagactaggcgcgcctaggcgcgtcgtaggcgacgattttcaaaaccctgctctatgaccacatattcagaaaaaactcatcatctgcatcttgttgtgccgcttcctgtagtctgtagtgcctgttttgtagcatgaatatttacattactagcatcttgcgatatttatttcatctcagtgttagtcattggtcttcacatggacccagtttttcaacagtttaggttaaaattcctatagtgagctctagaagtcactagttttcaacagtttagtcattcctgttggttaaaattctagtgagcttgacagtcaaaaataataataatcctagtgagctcttgaactcactaccatccatggtcatctattcatttgctagttgcttaacctcatggatcatgatgtactttgagcgtgacatttggtattgatacattcacagcttgccttcttttctttggcagtggcatttagttctgtaagttgattgtgacacacttgaccagagtagagatttttctatcgagaatcagaaagcactgaccatcggtttcatattatttttgacagtttctttacatgaatataacacagtaacatatgaaggtgttgtgtgtgcgcgcaggttcctgtagaagatgtcgacccgctgacattaaaccttgctatatcagctccagttgttgcgttagcttctccttctgcactgagactactacaaaatagacgcaacgggcattccttaatcaaatcatcagtctccttggatcgtgttccattttgccagtgccagtttctatgtgtggttccatggttcagaccactgcgtctgcagcgaagaaactgggcctgaagagcatatattacccaacgacccctggacttgaggggtgggtcgagagcattctcgaggcgctcagagtccacaggacagcatcaaaagaggccccaaaacgttgaaaacgggcggatggcggagcttcttcttggcgttggtagccgtccgcagtgtcgaagaaattctttgcttctttgacgacaattgccccccgttgagggaggtggtggtgtcaagccatggctttccactggcccagtttgtaatggattcttgggccgaaaggcccatctctatatgtcttgactcgcaaggcgattgcatcagtccatccatccatttcatggagggttttagcagtgccgtctctgtttcgctaatcggtgatggcagccagccttgttgtactttgtgggtttgttgacgcagccggtcggattcttcttattgccggattggttgcgtaacgctaggtggttctgaatatcggcg

SEQ ID NO: 2053 - DNA, 675 bp, Zea Mays
caaacatcaacataggagcgcccccagtgctatgtccactccggtagaagatgaacgattcgagctaggtgatctcgatgggacaaagaaaagaattcgggatgtctttttgccaaggtaggatcacgatcctcttgtcacagtcccctttagatatctgggagagtctagccgccacctacatagcgcttgaggctgccgacgatgagggggtcggtctctgtgaccgtctgttgcaggcggaccaccgtgtcatggagctggagtcgaaggttgtgggcctccatgagggtgtagatgaagtggtcgccttcgtccgtgcccagggtgccgatcgaggagagtgactcctcgacgttactaaccgggtgcgcctggccatccgccgtggtgctgcaggggctctggcctttgtgcagttctagtcgggctataagctcgacactagcgatctgttggaggacacgaccgctggtgccctggaggacttcgaagataactttagcatagctattggggttgtggttgaaatccttccactagaggatgtaatcaacgaatccccctagttaggatgtttctgcaagctgcttctgggatatgtatgcccctatgcttttataatgtttcctgaactttgttgatggaatgattctccttcctttcctgcccctg

SEQ ID NO: 2054 - DNA, 2280 bp, Zea Mays
gggacccctaggcgcctcaaacaacaacacaagtgcagccaacaattgtatacatcactcggatcgattctctctctccctcttgtgtaaatctctctagtttgtgtgaaggcaaagttataagcctttagagagtggagaggtgctgcaaagagctagagcaaagtcttgagcgcattgttactccgccggagtgctgtcaagaagattgtaagcagccgcggctttgttgtaacccaactcaacatagtggaaggctctatctgtcatactgacagatctgagcaaacggaggaaggagttgaaatagactccaagcccaggtgtggctaactccaacgaggactaggcaagcatttcaggcttggccgaacctcgggataaattcctgcgtctgtgtgcttcgctctgtattgtgtgctgactctctgtcttactcactttttatatctgcacttcaacacttatctgtggtacaagttatatttgaagtgcagggcattttgagacaggatcttctattccgctgcaacctactcgaaggatctttcattccactgcgatctggtccttgagtagagtaagaactaaagttttaaagtgataattttttattcgcctattcaccccccctctaggcgacatccagatcctgttcccgggcaaagggaactttcactatgtactcaccaaggcacccattacgaggcgtggaacatcgtcgtgcttgttccggtgacgttgtcctgcctctatgagaggaagagggaactcaacaaccaaaaatggacctaccagatcagcctgcaccgtgaggtgctaggcgtgcgttccatcgtcaggagctcctccgtcgagtggggttctgtggccaaaaagcagcccatgacatggcacaaggacacaaggttgatttgttatttatatgttgattgctcctgcaaatcagtggtggatttactgcagcgtgcataatctggagtctttcttttacactgcttcgatgaaatctgatgtattcactacatgcaatttctgattattattcatatttcataaggaccaaaaatacctagcatttattatcccacgctgatggatgaaaaaagcgacgcacaccggccagcgggcagctcttcctctcaggccaagtctactctcacctcccccgtctctcagatccacgctgcctagttgttcggacttcagaccccgccgtgcgctgcccatggccgcgggtcgcggcgacgcggcgagcatggtggcggtgggtctggtgtggggcgccaccaacgcgctgatgcggcggggcgcgctcgtctgggaccgccgcgcccgtgcctgcccctccggcaacgtcctccggcggtgggcggagctgctcctgacgtggcagtactcggcgccgttcgccgccaacctgagcgcgtccgcggccttcttcgcgctcctcggcggcgcgcccatctccgtggccgtccccgtcaccaacgccgtcactttcgccgccacggccgccgccgccgcggcccttggcgagcgcgtccggccagcgcccgcggtccttggtaccacgctcatcgtcctcggcgtctgggtctgcatctcgtaggcttaggctgaagatctgcttggtttagttctggcattacagtcgtcgcatggggggaaaaaaggaagttttgagggcaattctcagattccatttcactcctctgtgctgtgttgccaattgccatatgagtgaattattcccagtttgttgatggcagcggcgtttcattagctagatggtcagaatataatgcagtttcattctggtaattttggttactgaatccatttctgcttaggtgatgaatgaatataacactacggttccattcattacatcctgagggttgacatcccacagcagagcattcttctacccttggagctaatttgagaaccttattttatcaattgatttctaaattctccttggcattgaattggatcaacagagttgtttttccaaattcatttcaagctgaaatggtattggggcacgtttctgtttcatatgttttgatgttcaattccagcaaataccaagctcctcggttccgtattgggggtgtgtggtttgcttctgtactgatatcatggtgaattgagggtcaaattctaaggctcaattccaagacatccaaacacgtggtggtattggagatatacaattccaattctccaaatcctagcttaatgccagcatccaaatggggtgttaggtttttg

SEQ ID NO: 2055 - DNA, 1270 bp, Zea Mays
atggtgctgtgggtcttcggctacggctccctcatctggaaccccggcttcgacttcgacgacaaaatcctcggcttcatcaagggctacaaccgcacctttaatctcgcttgcattgaccacagaggcacaccggagcatccggcgaggacctgcacgcttgaaaccgacgacgaggccatatgctggggaattgcatattgtgtcaagggtggtccagaaaaagagctaaaagcaattacttggagagaagagagtgtgagtacgaccagaagatatccattgatttctacaaggaaggagatcccttgaaaccagctgtgacgggcgtcttagtgttcatttccactccagatccaattggcaacaagtactatcttggccctgctcctttgcaggatatggcaaggcaaattgctacagccaatggccctactggctataatagggattacctgttctcaatggagaaggcattagccatcattagccacgaagatgattcgatcctagagcttgcaaacgaggtgaggaaggtgctcaacagaacaaaggagaccaagatcactgggtgcgtgaactcttctactacctcaagggtgagcaggtggactatggcgaggagcacagcaaggcttgtggccacaacaggtttgggagaatatatcacacagggcactatcctgtttgttacgagcacaacccagtgcattttgtggggcactctgttggcacacaggttgtgagggtgctgcatcagatgcttgccgacaagctaattgcacttgatatgggtgcattaattgctggtgccaaatatcatggagagtttgaggacagacccaaggctgttctcaaagaagttacatattctgatgggcagaccattcttttcattgatgagattcacaaattgcaaatgccatggctgcaaaaagcaaagttgctattgcgggagctgaaaactgtgaaggcagatttatcttttgcaaaggaacgctatgctcagcttgaagaagagaataaaatgttgcgtgagagttatgacatgggtgataatccagaagctaatgatcaggttatgttcctcaagtttgagcctcgacaatgcatgcttattctggcatcccgatttcttactgctacatttcgccctcttgcagtcaggttacgagcgcctttgctgcctaaggtgcatacaaacgtgaccaaaggaatcaccttgtgtgctctcagtgggcttgagagtagcatcatccttcaaacatga

SEQ ID NO: 2056 - DNA, 2833 bp, Zea Mays
gagagcctgtttcggtgtgttatttttgtaagtcgcctagggccgatgctagaagagaaaagttctaggttgcgagtcttatgtttgtaaatatccgcactcgtaagtggtatcctcacctcacataactacataagagaccgaaacatatttccctccagaatccctcaacggaacgctgcagcagtgcaggtcgctttcttccccaaaattttgaaccccgaaccctagctctgctcctcagttccccgtctccatggacatcggcggcagcggcggcatcatattgtcgcccggatcggaggatgataagtttgcgcggaggcgctcccgccgtgtgagcttcgcggacaccaccgcggtgcacgtgttcgaccgcgacgaggacttcgagacgcctcccgaggagcgcgagcccgactccacccccgcacccccttctcccaggaggtcctcggttggccgggaggttgaggacgacacggaggaggatttcaaccgcccccctgtcatcttcctccacgacgtcgactcgtcgtacccagacagcgccgctgaatccatcgcctccgccgatgatgaaaacttttttggacctgtgtcggcaagctttattcaaacaggaagaccatcagattctggaatgtcagaggatgacaaccatgatataactatggattccaggacgttctctttgcattttcgcaatattgctccaccagatgactgtacagcctactcagctgggagtctaatgacacctaatactgcatctgagggacccctgaaggaacttactgcatctaatcctgcaagagcatcaattaatggccgagatacattgactgacatgagtttgttgagtggtaaccccagaacttatggttatgataagttgtcacccacgttgaacagtatgatgaagaagataaaagggagcaagcaaacaaactctcctaaacttggtatttctgatgtaacttctgattgtgtattaaccttgtctacatctgaggaagaaagtagggaagaaaatttatgcattgacaatggtgtatcttctgatgagctggtcatggttaatacaattgcagagcacatttctatgagaaatccagtttcgaccagcacagatctgattcaagatgacaatgaaatgataattgatgtccaggagaattcaaagaactgcaaccatgatcacatggatgatgaccctggtgccaataatactgcagaacctcctgcaaagatttccccagcatataagtcattcatgattaatggtgatgtgcaatcccacctagtcgatcaatcttcgtcaaaagatcgaccatctggatcaaattgcactgcaagtgtttcctccatgtgtaatgttgacatggaaacccatcttttggatcaactacctggtaaggataacacatatgctgcccagtcgtcaagtgaagctactgccattttgctgatggatgctgagcagctgcggcagaaaaatgaggtgatggatacagaaacagttctacacactccaagaactgcaggtctgcagttgcaagttccacgaggatccatatcctccttacgctcaaaaaggcataagcttttcactaatactgtatccaatagtaaagtagcaagacaggagggttgttcttcgggtactgagtttgttcaccatgacaagagactttcttctctgaagcatcaagaattggctgcagcttcccagttacaattggttgagaagaatgaacttggtcatcgagcaagtgacatgttcagcaatactgaagatcatgattctacgttatctgtttcttctcattctgttccaaagctgaagaaaaccaatgaatcttttgtcctaggcactcctcgaagacatgggctaaatgagtctactaaggtcctagatacattatgtcatgcctttactttggatagccaacctagtcgtgaatgcaactctcatgtggatttaaatggtgttggaagaaagagaactgctgaggaaaatggttatgctgtgcaagagtgtcctgaaaaaaccactaagacagcaagaagccctagaaaatctagaaaagagattccttgtgtatctcagccttctatgattgaagaaaaacagaatggtgctcatgataatggaaagtccgtggatattgattggagcaaggtagtatgtactataactaatgccacggagcaagttttgccagcatcaataagcaagtataatctacaacagcttgacatgctaagcgataggttggatgagattcatatggctagaaaatataaaaggctttctactgctgtgaggatcaaagctttctgtggtgataagcaaaagagattagaggaggcaaggtttctccatgacaagcttttctatgaaaaggcgaagctacaaataaataatatgaagctagttaaactccaaaaaaaggctcaactatgtcaagatggaattcaagagtgctgctttctgaaatccaagattttgggcgctggacacatggaggattcttcacttcctgcagctactacagtcagtgctggtgatagacaggtcggcgatgaagggatccccatccctagcgagcgcggtggagaggatggcggttgtggtgcgagcatgggcaggaagggcaatgcaggacgcagagatggggacgaggccacccgcagcggcggtggcgtgctgcaggcccgacgcggagatgggaacgaggccgctcgcgtctgcggcggtggcgtgcagtccccgctctcgcgtccgcacggaggatgctcgcgcgtgcgtcgtgacgagcaagattga

SEQ ID NO: 2057 - DNA, 3441 bp, Zea Mays
ccgaaacatatttccctccagaatccctcaacggaacgctgcagcagtgcaggtcgctttcttccccaaaattttgaaccccgaaccctagctctgctcctcagttccccgtctccatggacatcggcggcagcggcggcatcatattgtcgcccggatcggaggatgataagtttgcgcggaggcgctcccgccgtgtgagcttcgcggacaccaccgcggtgcacgtgttcgaccgcgacgaggacttcgagacgcctcccgaggagcgcgagcccgactccacccccgcacccccttctcccaggaggtcctcggttggccgggaggttgaggacgacacggaggaggatttcaaccgcccccctgtcatcttcctccacgacgtcgactcgtcgtacccagacagcgccgctgaatccatcgcctccgccgatgatgaaaacttttttggacctgtgtcggcaagctttattcaaacaggaagaccatcagattctggaatgtcagaggatgacaaccatgatataactatggattccaggacgttctctttgcattttcgcaatattgctccaccagatgactgtacagcctactcagctgggagtctaatgacacctaatactgcatctgagggacccctgaaggaacttactgcatctaatcctgcaagagcatcaattaatggccgagatacattgactgacatgagtttgttgagtggtaaccccagaacttatggttatgataagttgtcacccacgttgaacagtatgatgaagaagataaaagggagcaagcaaacaaactctcctaaacttggtatttctgatgtaacttctgattgtgtattaaccttgtctacatctgaggaagaaagtagggaagaaaatttatgcattgacaatggtgtatcttctgatgagctggtcatggttaatacaattgcagagcacatttctatgagaaatccagtttcgaccagcacagatctgattcaagatgacaatgaaatgataattgatgtccaggagaattcaaagaactgcaaccatgatcacatggatgatgaccctggtgccaataatactgcagaacctcctgcaaagatttccccagcatataagtcattcatgattaatggtgatgtgcaatcccacctagtcgatcaatcttcgtcaaaagatcgaccatctggatcaaattgcactgcaagtgtttcctccatgtgtaatgttgacatggaaacccatcttttggatcaactacctggtaaggataacacatatgctgcccagtcgtcaagtgaagctactgccattttgctgatggatgctgagcagctgcggcagaaaaatgaggtgatggatacagaaacagttctacacactccaagaactgcaggtctgcagttgcaagttccacgaggatccatatcctccttacgctcaaaaaggcataagcttttcactaatactgtatccaatagtaaagtagcaagacaggagggttgttcttcgggtactgagtttgttcaccatgacaagagactttcttctctgaagcatcaagaattggctgcagcttcccagttacaattggttgagaagaatgaacttggtcatcgagcaagtgacatgttcagcaatactgaagatcatgattctacgttatctgtttcttctcattctgttccaaagctgaagaaaaccaatgaatcttttgtcctaggcactcctcgaagacatgggctaaatgagtctactaaggtcctagatacattatgtcatgcctttactttggatagccaacctagtcgtgaatgcaactctcatgtggatttaaatggtgttggaagaaagagaactgctgaggaaaatggttatgctgtgcaagagtgtcctgaaaaaaccactaagacagcaagaagccctagaaaatctagaaaagagattccttgtgtatctcagccttctatgattgaagaaaaacagaatggtgctcatgataatggaaagtccgtggatattgattggagcaaggtagtatgtactataactaatgccacggagcaagttttgccagcatcaataagcaagtataatctacaacagcttgacatgctaagcgataggttggatgagattcatatggctagaaaatataaaaggctttctactgctgtgaaaaaggctcaactatgtcaagatggaattcaagagtgctgctttctgaaatccaagattttgggcgctggacacatggaggattcttcacttcctgcagctactacagtcagtgctggtgatagacaggaagaacttgatatcatttctgaaaagaggcttgaactcaaaattattcaacggaaggtggagaaattaaggagttcccttgaatgttttcacaatattgaaggtggcattggtagtgatagtgttgtgaggtatgctgaagagcagttgatgatgagaaatcagcatcgcatcatccactggcaagcagggctctgcaagttgaatgacatagttaaaaggggcaacaagtgtgatatcatcctcaactatcacaatttgttgttccaaaggatcatcttaaacatcagtgatacatctagcatatttgtgaacaattcactgaatggaaaccaaattggaaagacatttccaaatttggatgcatctttggcattcaattttgttttcgaagccgaggagaaccaaagagttagtgatttacagtccttgcagaagaagacaatggaaacaagcttgctgcttggaaatcttattgatgttttagaagaaatcaaattatctaagttggagttagtaaatcttacctccgctgcttttgttttggagtcccagacacgtaaacttggcctccacctgtctttcatgagtttcaagagtggcaagaagattgctttcatcatcgacatgacagacttgaaccgctcggtctacccttctgaaccatctgagctcattaaggtttttgaagcacatactacgctagcacagccaagcatagacgagaccatggcttctataaggaacctgcaatctggtcgcacagcaatactaagattgtgccggatggtatcccggctgattcatggttacaatgatgacctgatcactggagtgcaagctgtaggaagtaaacatcatccggatatgtggacgtgcaagcgattttggttactgcaaatccttgtaactgcccgtttattacagcaacaatgcataactggtagcttggtgcgttagagtgatggattacagtcttgcagatatgtcggcactgttgtatacgagttagtctaaaaggagccaggctaatgttttctccccgcagctgggactgttgctgaaagattgtgcattttttttacaacgactccaatatatttaattaagcattgttacgcaa

SEQ ID NO: 2058 - DNA, 3624 bp, Zea Mays
cagcagtgcaggtcgctttcttccccaaaattttgaaccccgaaccctagctctgctcctcagttccccgtctccatggacatcggcggcagcggcggcatcatattgtcgcccggatcggaggatgataagtttgcgcggaggcgctcccgccgtgtgagcttcgcggacaccaccgcggtgcacgtgttcgaccgcgacgaggacttcgagacgcctcccgaggagcgcgagcccgactccacccccgcacccccttctcccaggaggtcctcggttggccgggaggttgaggacgacacggaggaggatttcaaccgcccccctgtcatcttcctccacgacgtcgactcgtcgtacccagacagcgccgctgaatccatcgcctccgccgatggtagtcaggttgctgcatttttcaactggattatgtcagatgaaaacttttttggacctgtgtcggcaagctttattcaaacaggaagaccatcagattctggaatgtcagaggatgacaaccatgatataactatggattccaggacgttctctttgcattttcgcaatattgctccaccagatgactgtacagcctactcagctgggagtctaatgacacctaatactgcatctgagggacccctgaaggaacttactgcatctaatcctgcaagagcatcaattaatggccgagatacattgactgacatgagtttgttgagtggtaaccccagaacttatggttatgataagttgtcacccacgttgaacagtatgatgaagaagataaaagggagcaagcaaacaaactctcctaaacttggtatttctgatgtaacttctgattgtgtattaaccttgtctacatctgaggaagaaagtagggaagaaaatttatgcattgacaatggtgtatcttctgatgagctggtcatggttaatacaattgcagagcacatttctatgagaaatccagtttcgaccagcacagatctgattcaagatgacaatgaaatgataattgatgtccaggagaattcaaagaactgcaaccatgatcacatggatgatgaccctggtgccaataatactgcagaacctcctgcaaagatttccccagcatataagtcattcatgattaatggtgatgtgcaatcccacctagtcgatcaatcttcgtcaaaagatcgaccatctggatcaaattgcactgcaagtgtttcctccatgtgtaatgttgacatggaaacccatcttttggatcaactacctggtaaggataacacatatgctgcccagtcgtcaagtgaagctactgccattttgctgatggatgctgagcagctgcggcagaaaaatgaggtgatggatacagaaacagttctacacactccaagaactgcaggtctgcagttgcaagttccacgaggatccatatcctccttacgctcaaaaaggcataagcttttcactaatactgtatccaatagtaaagtagcaagacaggagggttgttcttcgggtactgagtttgttcaccatgacaagagactttcttctctgaagcatcaagaattggctgcagcttcccagttacaattggttgagaagaatgaacttggtcatcgagcaagtgacatgttcagcaatactgaagatcatgattctacgttatctgtttcttctcattctgttccaaagctgaagaaaaccaatgaatcttttgtcctaggcactcctcgaagacatgggctaaatgagtctactaaggtcctagatacattatgtcatgcctttactttggatagccaacctagtcgtgaatgcaactctcatgtggatttaaatggtgttggaagaaagagaactgctgaggaaaatggttatgctgtgcaagagtgtcctgaaaaaaccactaagacagcaagaagccctagaaaatctagaaaagagattccttgtgtatctcagccttctatgattgaagaaaaacagaatggtgctcatgataatggaaagtccgtggatattgattggagcaaggtagtatgtactataactaatgccacggagcaagttttgccagcatcaataagcaagtataatctacaacagcttgacatgctaagcgataggttggatgagattcatatggctagaaaatataaaaggctttctactgctgtgaaaaaggctcaactatgtcaagatggaattcaagagtgctgctttctgaaatccaagattttgggcgctggacacatggaggattcttcacttcctgcagctactacagtcagtgctggtgatagacaggaagaacttgatatcatttctgaaaagaggcttgaactcaaaattattcaacggaaggtggagaaattaaggagttcccttgaatgttttcacaatattgaaggtggcattggtagtgatagtgttgtgaggtatgctgaagagcagttgatgatgagaaatcagcatcgcatcatccactggcaagcagggctctgcaagttgaatgacatagttaaaaggggcaacaagtgtgatatcatcctcaactatcacaatttgttgttccaaagaatctcagttgcaaatttctgacaagaaactaggtggttgtctgattccagtgaacttgctttggcttgagaaactgcaatcttttatgtaacaaggatcatcttaaacatcagtgatacatctagcatatttgtgaacaattcactgaatggaaaccaaattggaaagacatttccaaatttggatgcatctttggcattcaattttgttttcgaagccgaggagaaccaaagagttagtgatttacagtccttgcagaagaagacaatggaaacaagcttgctgcttggaaatcttattgatgttttagaagaaatcaaattatctaagttggagttagtaaatcttacctccgctgcttttgttttggagtcccagacacgtaaacttggcctccacctgtctttcatgagtttcaagagtggcaagaagattgctttcatcatcgacatgacagacttgaaccgctcggtctacccttctgaaccatctgagctcattaaggtttttgaagcacatactacgctagcacagccaagcatagacgagaccatggcttctataaggaacctgcaatctggtcgcacagcaatactaagattgtgccggatggtatcccggctgattcatggttacaatgatgacctgatcactggagtgcaagctgtaggaagtaaacatcatccggatatgtaggtagtaggcattaacagtgttggttttgtttttgtttttgcatgtaggcttaagatgtttgaatgcataaagcagtccttttcaggtggacgtgcaagcgattttggttactgcaaatccttgtaactgcccgtttattacagcaacaatgcataactggtagcttggtgcgttagagtgatggattacagtcttgcagatatgtcggcactgttgtatacgagttagtctaaaaggagccaggctaatgttttctccccgcagctgggactgttgctgaaagattgtgcattttttttacaacgactccaatatatttaattaagcattgttacgcaa

SEQ ID NO: 2059 - DNA, 3724 bp, Zea Mays
ctagaagagaaaagttctaggttgcgagtcttatgtttgtaaatatccgcactcgtaagtggtatcctcacctcacataactacataagagaccgaaacatatttccctccagaatccctcaacggaacgctgcagcagtgcaggtcgctttcttccccaaaattttgaaccccgaaccctagctctgctcctcagttccccgtctccatggacatcggcggcagcggcggcatcatattgtcgcccggatcggaggatgataagtttgcgcggaggcgctcccgccgtgtgagcttcgcggacaccaccgcggtgcacgtgttcgaccgcgacgaggacttcgagacgcctcccgaggagcgcgagcccgactccacccccgcacccccttctcccaggaggtcctcggttggccgggaggttgaggacgacacggaggaggatttcaaccgcccccctgtcatcttcctccacgacgtcgactcgtcgtacccagacagcgccgctgaatccatcgcctccgccgatgatgaaaacttttttggacctgtgtcggcaagctttattcaaacaggaagaccatcagattctggaatgtcagaggatgacaaccatgatataactatggattccaggacgttctctttgcattttcgcaatattgctccaccagatgactgtacagcctactcagctgggagtctaatgacacctaatactgcatctgagggacccctgaaggaacttactgcatctaatcctgcaagagcatcaattaatggccgagatacattgactgacatgagtttgttgagtggtaaccccagaacttatggttatgataagttgtcacccacgttgaacagtatgatgaagaagataaaagggagcaagcaaacaaactctcctaaacttggtatttctgatgtaacttctgattgtgtattaaccttgtctacatctgaggaagaaagtagggaagaaaatttatgcattgacaatggtgtatcttctgatgagctggtcatggttaatacaattgcagagcacatttctatgagaaatccagtttcgaccagcacagatctgattcaagatgacaatgaaatgataattgatgtccaggagaattcaaagaactgcaaccatgatcacatggatgatgaccctggtgccaataatactgcagaacctcctgcaaagatttccccagcatataagtcattcatgattaatggtgatgtgcaatcccacctagtcgatcaatcttcgtcaaaagatcgaccatctggatcaaattgcactgcaagtgtttcctccatgtgtaatgttgacatggaaacccatcttttggatcaactacctggtaaggataacacatatgctgcccagtcgtcaagtgaagctactgccattttgctgatggatgctgagcagctgcggcagaaaaatgaggtgatggatacagaaacagttctacacactccaagaactgcaggtctgcagttgcaagttccacgaggatccatatcctccttacgctcaaaaaggcataagcttttcactaatactgtatccaatagtaaagtagcaagacaggagggttgttcttcgggtactgagtttgttcaccatgacaagagactttcttctctgaagcatcaagaattggctgcagcttcccagttacaattggttgagaagaatgaacttggtcatcgagcaagtgacatgttcagcaatactgaagatcatgattctacgttatctgtttcttctcattctgttccaaagctgaagaaaaccaatgaatcttttgtcctaggcactcctcgaagacatgggctaaatgagtctactaaggtcctagatacattatgtcatgcctttactttggatagccaacctagtcgtgaatgcaactctcatgtggatttaaatggtgttggaagaaagagaactgctgaggaaaatggttatgctgtgcaagagtgtcctgaaaaaaccactaagacagcaagaagccctagaaaatctagaaaagagattccttgtgtatctcagccttctatgattgaagaaaaacagaatggtgctcatgataatggaaagtccgtggatattgattggagcaaggtagtatgtactataactaatgccacggagcaagttttgccagcatcaataagcaagtataatctacaacagcttgacatgctaagcgataggttggatgagattcatatggctagaaaatataaaaggctttctactgctgtgaggatcaaagctttctgtggtgataagcaaaagagattagaggaggcaaggtttctccatgacaagcttttctatgaaaaggcgaagctacaaataaataatatgaagctagttaaactccaaaaaaaggctcaactatgtcaagatggaattcaagagtgctgctttctgaaatccaagattttgggcgctggacacatggaggattcttcacttcctgcagctactacagtcagtgctggtgatagacaggaagaacttgatatcatttctgaaaagaggcttgaactcaaaattattcaacggaaggtggagaaattaaggagttcccttgaatgttttcacaatattgaaggtggcattggtagtgatagtgttgtgagatctctctctatccaacttacaattcttttatttattcagctctgcaagttgaatgacatagttaaaaggggcaacaagtgtgatatcatcctcaactatcacaatttgttgttccaaaggatcatcttaaacatcagtgatacatctagcatatttgtgaacaattcactgaatggaaaccaaattggaaagacatttccaaatttggatgcatctttggcattcaattttgttttcgaagccgaggagaaccaaagagttagtgatttacagtccttgcagaagaagacaatggaaacaagcttgctgcttggaaatcttattgatgttttagaagaaatcaaattatctaagttggagttagtaaatcttacctccgctgcttttgttttggagtcccagacacgtaaacttggcctccacctgtctttcatgagtttcaagagtggcaagaagattgctttcatcatcgacatgacagacttgaaccgctcggtctacccttctgaaccatctgagctcattaaggtttttgaagcacatactacgctagcacagccaagcatagacgagaccatggcttctataaggaacctgcaatctggtcgcacagcaatactaagattgtgccggatggtatcccggctgattcatggttacaatgatgacctgatcactggagtgcaagctgtaggaagtaaacatcatccggatatgtaggtagtaggcattaacagtgttggttttgtttttgtttttgcatgtaggcttaagatgtttgaatgcataaagcagtccttttcaggtggacgtgcaagcgattttggttactgcaaatccttgtaactgcccgtttattacagcaacaatgcataactggtagcttggtgcgttagagtgatggattacagtcttgcagatatgtcggcactgttgtatacgagttagtctaaaaggagccaggctaatgttttctccccgcagctgggactgttgctgaaagattgtgcattttttttacaacgactccaatatatttaattaagcattgttacgcaa

SEQ ID NO: 2060 - DNA, 929 bp, Zea Mays
catgttttggttctggtttttgtctttgattcggtgttgggaatgataaaagaacgacgtttgtagcgcgcacacgatcggggtgacgcactgcgacaagttcgtgcggcggatctacacgttcaagcagcggctggcgtggaacccgccgatgaacctggacttcctgcgctcgctgcggcgggtgtgccccctcagctacagccccacggcgttcgccatgctggacgtcaccacgcccagggtcttcgacaacgcctacttcaacaacctccgctacaacaagggcctgctcgcctccgaccaggtgctcttcaccgaccgccgctcccgacccaccgtcaacctcttcgccgccaacgccaccgccttctacgaggcattcgtcgccgccatggccaagctcggcaggatcggcctcaagaccggcgccgacggcgagatacgccgcgtctgcaccgccgtcaactaagcctgcattggctgcttgctgcttgcgtgcgtgggtttcacttatttcacttcttctttctcttgtttatatacgtacgtttgtcggatggattttggtagccatgagatgacatccttgctctgagctagcggacctgccccgattggatgatatagattgatccagatgttcttctagtagattctaattctttagggcttgtttgggatcaaaggtaatggagtggattgaggggactagaatcccctactacttaattttgaatagtgagggattatagccccctcaatcccctccattaccctttgtcccaaacaagcccttatggatgtttcccattgacacgcggttacgcgcgcttcaaccgtacgcagctcacgaacttcctctacctctatatcatcagtatgtctccaaaagtccttcagcaacaacttccatgttctcaatcatg

SEQ ID NO: 2061 - DNA, 745 bp, Zea Mays
cgcacggacgacatcgaggaaccctagactagagcacattgcacgggcgacggcgcgccaccggtgactggcgtcccctcctcggtcctcactccccagcatggcgacgccctgccgcagcaggggcttcgagcgtgtggagctgcggtgtcccagggagctggacccacggccgagctggacgctcggcgatgtgctcgctgagcttgacgcgctggatgccacccgccgcgctgcgccacccacgcccctgaagcagccgccggattgggctaacggtggtggtgagaaggcctttgtgatgcgggttgatgacgacgacgaagacgacacagaagatgaagacgatggtacaagtggtgggaagtcccgggctctggtggccaaaggagcaaggttctcgtgtaatgatcttgcatcaagtgattcagaggatgaattagatggtcaggttgccccataccacttaatggagaaaagggacctagcgaagagcattcttcttgagctggaacacgagcatcatctaaaagttcaagaagaagttagaagtaagctagcttcattggaggtatgccaccaaaatgaaattcggagaacgatctctgcatttgcccgacttcagaaatatgcagaatcaagaaaggagatagacagaagacttgatgtacacttccagagaagaatggtttcgagttcaatgaaatgttgaatacttctatccttcatacagcatgcgtgtctt

SEQ ID NO: 2062 - DNA, 2397 bp, Zea Mays
aaacgatcaaccgatcggaaaacattaatttgtattcgatttgaaagcgcacccggcacctgctccgttcctgcgctgcttggcttccggtctgtgtcaaagcttgcatctcacgcgagtcgcacaaggacgaaccctatacagctccaggaggtcggtgccctagccacctaggccaccttcctggagaccgggcggcgacgacggggacgaacgaccgcgatgggcttcgagcgtgtggagctgcggtgtcccagggagctggacccacggccgagctggacgctcggcgatgtgctcgctgagcttgacgcgctggatgccacccgccgcgctgcgccacccacgcccctgaagcagccgccggattgggctaacggtggtggtgagaaggcctttgtgatgcgggttgatgacgacgacgaagacgacacagaagatgaagacgatggtacaagtggtgggaagtcccgggctctggtggccaaaggagcaaggttctcgtgtaatgatcttgcatcaagtgattcagaggatgaattagatggtcaggttgccccataccacttaatggagaaaagggacctagcgaagagcattcttcttgagctggaacacgagcatcatctaaaagttcaagaagaagttagaagtaagctagcttcattggaggtatgccaccaaaatgaaattcggagaacgatctctgcatttgcccgacttcagaaatatgcagaatcaagaaaggagatagacagaagacttgatgtacacttccagagaagaataagtactcgataaacacttatctatggtccaaagggatcatgaacaaaaatcccagattgttgaacgccgaataagagatgatgcagctcttgaagaagctaaaagaaaagagcaagctgtcaaggaagaaaagttaaggcaggaaagagcccagcaagaagcagaggctagacagaaggaagctgcaaaattagcagctgaagcacgaaaaacagcatttgaggctgctaaaaaggaagcagcagaaaaggaagcagcagaaaaggaggctgctaaattgagagatgcagcagcttctcaacctagtccgaattcccagaataatactgcaggaattcagcaaatatgaccgacaaattgccaaatccataagtaaacttatgccaactactgacagtgtcagaacaagggctagtgagcttgttaaagctttaaatggacaggattgtccccgtccaatctcttgttgtctatttgctaacaagattatttccattgtcaagagtagaaatacaaaggacaagacctttggaaatttggcctttgcgtgtggatatgtcatgctattagttacaaatcaggtaccagacgcaatggattatcttttagctgagttcaacagagtttgcatatacacggttccaaagcatatgcatgctttgaatgcacaagcacgaaatagagattattacagactgataggttaccaggaagaaaatggacagctcgagagcactgaaagttatctaacatacgtcgttgcatatgttaaactctacgcagcaatgattcagacggaaatcaaaggtgttcgtcatcctcatggtttagctgagggatggaagtggcttgccatgttcctcaattctctcccagctactacagccactgcatgtgcccttcacgctttcctcaagatggctggttttgcacttcacaagaaatatgggtcacagttcatgaaaatcctggatgtaatatcacggtgctttttaccagctttgaaggaacaaggcaacaagatgcaggctgaggctgtcaacaatctacagaattacctgaacgacaagatctacctggaggaaccagaagggcagtacctcgtccagcaactactatccaaggagttgttcatgtaaagatcaaaacaccagatcggtatgagacatcgtgtgtgatcgtctgaagggcggtacctcgtccaagctaccactatcgcaagaggggcctcatgtagagatgaaagcaccagatcgatatggagctgttcgtgtttcagaaacacgatcgagcctttcaaatctcacgaacattatttatgggacagtcccccagatcatttcccccctctgcacgggatcctgacgatgtatttgtttatgtgacttgtatccggccaaggacaggtatgataggttgaggttttatgtttgttgtagttgtacatgtactactagaatcgtgaccagaacaaaataatactcgaccacttcggcgtgggcccagcggtggccaaagtcaaggtcaacttgacacgcgacactttgtctactctgtttgcaatgaaatctaatgtttgtgcttcaaacaaaatagttttaatataaa

SEQ ID NO: 2063 - DNA, 2410 bp, Zea Mays
atcacacactacgcacggacgacatcgaggaaccctagactagagcacattgcacgggcgacggcgcgccaccggtgactggcgtcccctcctcggtcctcactccccagcatggcgacgccctgccgcagcaggggcttcgagcgtgtggagctgcggtgtcccagggagctggacccacggccgagctggacgctcggcgatgtgctcgctgagcttgacgcgctggatgccacccgccgcgctgcgccacccacgcccctgaagcagccgccggattgggctaacggtggtggtgagaaggcctttgtgatgcgggttgatgacgacgacgaagacgacacagaagatgaagacgatggtacaagtggtgggaagtcccgggctctggtggccaaaggagcaaggttctcgtgtaatgatcttgcatcaagtgattcagaggatgaattagatggtcaggttgccccataccacttaatggagaaaagggacctagcgaagagcattcttcttgagctggaacacgagcatcatctaaaagttcaagaagaagttagaagtaagctagcttcattggaggtatgccaccaaaatgaaattcggagaacgatctctgcatttgcccgacttcagaaatatgcagaatcaagaaaggagatagacagaagacttgatgtacacttccagagaagaattgcagaagtactcgataaacacttatctatggtccaaagggatcatgaacaaaaatcccagattgttgaacgccgaataagagatgatgcagctcttgaagaagctaaaagaaaagagcaagctgtcaaggaagaaaagttaaggcaggaaagagcccagcaagaagcagaggctagacagaaggaagctgcaaaattagcagctgaagcacgaaaaacagcatttgaggctgctaaaaaggaagcagcagaaaaggaagcagcagaaaaggaggctgctaaattgagagatgcagcagcttctcaacctagtccgaattcccagaataatactgcaggcattaaagtttttggcgataaatacgcactagaagcagagtcacggaggcatgcattagtacagaatcaagtgccagaaaacattcatcacagcaaggaattcagcaaatatgaccgacaaattgccaaatccataagtaaacttatgccaactactgacagtgtcagaacaagggctagtgagcttgttaaagctttaaatggacaggattgtccccgtccaatctcttgttgtctatttgctaacaagattatttccattgtcaagagtagaaatacaaaggacaagacctttggaaatttggcctttgcgtgtggatatgtcatgctattagttacaaatcaggtaccagacgcaatggattatcttttagctgagttcaacagagtttgcatatacacggttccaaagcatatgcatgctttgaatgcacaagcacgaaatagagattattacagactgataggttaccaggaagaaaatggacagctcgagagcactgaaagttatctaacatacgtcgttgcatatgttaaactctacgcagcaatgattcagacggaaatcaaaggtgttcgtcatcctcatggtttagctgagggatggaagtggcttgccatgttcctcaattctctcccagctactacagccactgcatgtgcccttcacgctttcctcaagatggctggttttgcacttcacaagaaatatgggtcacagttcatgaaaatcctggatgtaatatcacggtgctttttaccagctttgaaggaacaaggcaacaagatgcaggctgaggctgtcaacaatctacagaattacctgaacgacaagatctacctggaggaaccagaagggcagtacctcgtccagcaactactatccaaggagttgttcatgtaaagatcaaaacaccagatcggtatgagacatcgtgtgtgatcgtctgaagggcggtacctcgtccaagctaccactatcgcaagaggggcctcatgtagagatgaaagcaccagatcgatatggagctgttcgtgtttcagaaacacgatcgagcctttcaaatctcacgaacattatttatgggacagtcccccagatcatttcccccctctgcacgggatcctgacgatgtatttgtttatgtgacttgtatccggccaaggacaggtatgataggttgaggttttatgtttgttgtagttgtacatgtactactagaatcgtgaccagaacaaaataatactcgaccacttcggcgtgggcccagcggtggccaaagtcaaggtcaacttgacacgcgacactttgtctactctgtttgcaatgaaatctaatgtttgtgcttcaaacaaaatagttttaatataaa

SEQ ID NO: 2064 - DNA, 957 bp, Zea Mays
atggaggaggaggcgccgcccatggagttggtccgggagaagaagctctctgagaaggtaaccagccgctgtctcttgcgttctgggtctggccgttggttagttgaattgctagccggtttttgatgatgtctggtgctctgggagtctgggttcgtgtgttaggagaggagggcgcagcttcattcgatccatgctgagtcacagaggctgctgcgagatccgcctttgtaagatggaggttctgaagaaatcacatacctctgttgaagacagtgatcacatatttctagagtcctctggcttgcaggatggtttgagttgcaagaaggatctccatagttgcggcaccaaagcttcagatgaggaaatttctgatcggttgcaagagaatcatgacaacacccagccaagtgataaccataactattcggtagatcaaactcaactgccctttcttcaagccctactgagagtacagatgaaacggagtcatcgtttcttggacaaactgccagtggttcactggcatcttctcacagataagtctatagatcctacgtatttggtagtgatgacagcaacagcagcagtaggagctgcaactctactgcagagagtaattcagatacggaccaagccaactcctcccaacccacgaaggccaagttcagttcaggcgtttcactcttcgacatcctgcgcaggacatcagagcagagcaatcaggaaagctgtagcacagtcagcggtgcatcggttctcggcattcaaattattaaagaggttttctagggtgagctcgaaaaattgacaactcccaggaggttcaagacagatcacagtctcacagatggtgcctgtatggttggagattctgaattctgaccactggcctggaagttcacgacgaaagctgtctagaaaaaggcttcaggcgaggctcgtgaaaaagga

SEQ ID NO: 2065 - DNA, 2405 bp, Zea Mays
cctccctcccgtctcccgaaacctcgtccgccggttcccgtcgccatggtggtggtagtgtccacctccctatgctccttcctgcccgcgcacccgttcagcctcgcgcgccctcgccgtccccacccaacgaacccgaccgccaaacccctctcccgtaccctctccatccgctgcatcgccacaaccgcggcgggacccccgccgctcccaccgccgaagctggtccgctgcccagctctcgaccgccaggcggcgcgcgcaagccgactccgctttgcgcgcaagctcctcaccctcctcctctccaagccgcgccatttcctcccgctccgcgtgctcaaccgctgccgccgcttcctcggcctcccgcgccgcggccgcccgctcatccccatggtcctccgctacccgaccctcttccgcctcttccaggcccacacctccctcccgctctccccgtccctctccaccctcgcggtcgcgctcactcccgccgccgaggcgctcgccgccgatcttgcggcgctccgcgccaccggcacaggcgcaggcgcgctcgccgccaagatccaccgccttctcctcatgaccccgcgccgaaacattccggtgtccccgttcgagccactggatgagggcgctagtctggagatgttggagcggcgggcgtgtgctgtggtgcgggaggtgctggccatgacggtggagaagcggacgctggtggatcacctcacgcacttcaggaaagaccttggcttgccaaaccggctgcgcgccatgctggtgcgacatccagagctgttttatgtcagtgtgaagggggtgcgtcactcagtgttccttgtggaggcgtttgatgatgatgggaggctcctagtggaggatgagatgctggttgggagggataggctggaggagcttgttcgggagggaaagcggatgaggcgtgctcggaagaaaggtgttctcacgttcgatggtgacagtgatgaggatgaagatgatgatgcagcagaagaggaaggttcattaaaggtggatgatgaatttggggacttgtttgaggatggtgtcattggggaggactgggaggaggtaggcgatggaggtggaagtgatgcatatgaagagtacgatgctgaatcaggtgacatggaggagttttgggtcaagaaggctgtggctcaaggactggttggcaatggtaatgagcaggatgtttggtgagtgcatcagcttgtgggactgctcaggaagttaacgaagattgagaattcctcaagtgtgcttttctcagcaatgcacataaaccagtaagcatcagtacatatccgggtatcttggacctcttggtcccatttgccgcctgtctgttggtacttgcaagacagatgaagcggctccgttatccttttactttgttctggagaggagctatttggacagtcacgatgtccgtcctccagggcactgtttctgctttgatgcttatgaggcatgctctcttacttcccaagatctcttgcacggaaacacatcacaaacctaatgtgtcacttcttatgctaaagtgtgcagagtgcgatagcttctctgctacagaaaactttgaaaaagatggcgtttcatctcttaaggaggcagccactgtatccgtgttagagttgaatgtgccctcctgtcagaagcgtttatgtattataggaggtactgctctaaggtgaaagagcaatgctcagcagatatgatacatgctgaggatgcattcaaaagctcttggatttatcatgctgaggtgatgatggctgagttttgtactgtctgcattgaaaagaatttaattgataaaatgattgatctgccctgggattccgaggaagacaaacatcttcacaagttcctcttcaactctgctcgagaagtgcgcatgaaaccaaatgatagtctgcttgttgtctactaccttgggatacaggtctctggatatgctgagaaacctttcatcttaaatggaactggtgtagcccaaaatggccctgctaaaaggtctgtctctggatatgctggctaccagccaaggataacatcttgattctgcacgctggtttgtggcgatatgtttcgtcgtggtcctggttttaatttgggagttcaaaatgtaatatcagtggaatgaaattcgtgcgttttgagtagctcggggtatagaatttgaatctgactacgtttcaaatactagagttagatgactgcagtggctggcttccagcttctttattatttttgtctattattctcctatctgtcaatgtggccggtttacagtcaattagcgctaacagaggctacatcattcagtgacaaaaaaaaatagtgaatggtgaaggtatacaaactgagct

SEQ ID NO: 2066 - DNA, 1116 bp, Zea Mays
gacgaactcttggttctcaagctttcccggccagtctcgcagcaaccctttccctaccccgatcgagcgtgcgtcaaggtcgggatccggcgccgccgcatcccgatccgatgctctccggcgtcgaccacgacgttcccgacggcatcgggatggcgcggctcgcgtggacgcgcctccccaccgccgacggggagggggcgggcccctccacttccgaggccgcggacgacgaactcttatcgggcgctgccatagagagcctcgactacgaggtcatcgagaactacgcgtaccgggaggagcaggcgcagcggagcaagttctgggtgccctactacgtcatgctcaagtggctgttcgctctgctgatcggcgttggtactggattagctgctatattcataaacctggctgttgagaacttctctggatggaaatatactgcgacatttgctataataaagcactcgtattttgtgggattctttgtgtacacagttttcaatttagccctggtcttctcttctgtatatatagtcacaaactttgctccagcagctgctggatctggtattccagagatcaaaggttacttaaatggagtggatacacatggaatcctccttttcaggacattagttgggaagatctttgggagcattggatcagttggaggtggattggctctagggaaagaagggcctcttgttcatactggggcctgcattgcttcgcttcttggacaaggtggatctgcaaagtaccacttgagttctaggtgggtacggatttttgaaagcgatcgtgataggcgagaccttataaacatgctctatcagactctttaatttctggaaccaaggaaaaaaaggaaagtattatggaaagaatacatatatacattgtcgaatgcattctggacttttttttaagaatgaaagggttataatattgaagctctcaaaactattaatgtttcaaaaggtgacatgtggatgtgcagctggagttgctgctgccttcagagctcctgttggtggggtactatttgccttggaggaagttacttcctgttattcctttagctgctggcaacaaattcttcagtactaa

SEQ ID NO: 2067 - DNA, 5525 bp, Zea Mays
gtcctgtttccaagagtaatttttttaattgtaagtagaagttcaaattttgcagtaaaaaaacacacttttttttgtcaagcatgcaagagagatgcacatatttgcatgaagaagaaaaaaggcgtaataaccactacaacacaaacccacacactcaagaatcttggaagaacagtggctaagttattcaaaacatcatataatataaaaccacagaaatatcatatacgtaactaaaaatactatgggaaagaacatttcactcaagattaaggaataatggagcagagtaaaatcataaatttgttggtgcccaggggaaccatgagcaaagatacagtttatccaacattttgctatgttccaaaaaaactcaagaaatgataatatttcagacacaatttatccaacacataaggtaatcctgtaaaaatgaattttaacatcatcatccatatcgatattcaaaaaaggaaggaagaatggttcctgtgtatataagttaactttaacaatgattgttggttttggggtaacaacatgatgttaacaagagataggatggcgacccttcctttcccgcctgacccttcctatcccctgaccatctcctctacccccgacgcctcttcacattcctccaccagccccacgccggagaccactccgatcccggcggccaatcacctctcctcttccccggcgtcggcggggccctctgcatgcggtggtcgttccaaggcgcagcggtggtgtgaggacggcgcagcaggcgcggcgggcgtgggtgctgtcccggcgcacgccgcgggtgcaggtgttgtaccggtgggcgcgggtgttgtcccggcgggcgcgggtgttgtcccggcggccgtgggtgtggccccgtctcagaatcgccgctcctacagggatgcgctggtgtcctcacagcgccctgtttctcgggtagcggtggtgagtgctggtggcggctgggagactgtccagagtcgccgcggccgccgcttggctcgtcgccctccccagccagaacccagacccgttccggttgatctgcggggcagatgtttcaactgtttctctgctgatcatcgggcggcgcggtgttcaaacagggttcggtgcttcttctgcaggcggcgggggcaccgtgtgagcgagtgcccgcgcaggcagacgaacctggtcgctcttcagacaaacctggccgctcctgtggccgctcctgtgcgcagactggtgtggcggccaatttccaaggagacatcggcggcggtctctggtgccgatcacgccatggcgggtgctggtggcgaccatgccatggcgggtggctcgacgcttggtggttccgatgtcgcgatcagcgggaagcggcgtacccgtcgtgggcagcgaaagcgcagggccgggactggtggtggtcttggcggtgatcctctgctgctatcttcgggaaacttgtcgcccgcggctcaggatggtcctcgtcctgtgaggtttattgggcggtccagaatgatcgaccgtgctgagttggagcttcgccatgccctgatcgtcagcgttgttgggcaggaaggaactggttgcgccacggaggttagagaggcgctcgcctcaaggtttggccttgatgccgatgcgctccgcctacgtcgtgctgcgccaggttcctttattgtcctcttcccttcggaggagctggctgggcgagtgtttagtggaggaccgtcgctctttgtccctccattgaggttgcatattaagagatggactaggcaggcttttgcttcgggaggcagtgtcttgtcttccctcattgacgtcgaactccgtggtatccctgctcacctttggggactggagacagcggagggactacacccggattctaccagcggggaggacttgtcagtcatcaggttgagtgcatggtgccgctctcccgtggagttgcctgaggtgttggaccttcatgctgtggagccagcggtccccgatgaagacgaagtctggattccacgttcgttggtgttccctgtgtttgtgaagattattgggccggagggtgttcttgtggaggagcagctgcagccacctccatcggatccctctgatgatgagccggagcagagtcgtcgggctaggcgggtgcagaggctgggtgatcaggcctcattgcctcggacttcggtgcactcgcggctgggtcctcgtcttcattcctcgtcgacgcgtgttggaccctctgatgatgtggagcttttggatgcattaatggataacagtgatgatgtggcggcgtctgtctcttcggattcgttggcagaaccagttgatgcccctaccctcccgtgtgctgcggttgagaagctggcggcgcctggtgttctggccttgtgtgatgttgtggttcccgtttattctcctgatggtgcctctgctgatttggctgctgagttgagggaggattcgttgttggcagtgagttgtgttgtcaatacttcttctgctagatggaatttgaagccgcctgtttttaaagtctactctaggaggttgagaccatctattttggatgatcaggatggcccgttggttcagtcgggtcttgataattctatggtgatttcttcgcccttgtgcgagttccaatgtttggtcactaaaccggtggatgccttgctgccaactccacagattccaaagagaaggaagaagcctctacccagtaattttataccaaggcggagcaggagggtggccaaatttcctccagaactcggttctgaggctgctgcccaggatggcagtaattatgcggagctatttgtttctgggctctctagcgtccatattgctgctttggcagcgctgtttggctggacggttctggtagcttttgagcctgactgttttgaaccagcaattgagctaccggtgagtgaagagcagcaagacaaagatgatgatggctacaaaaaaaagagtagaatggatgataatggtgatcaggttataaagaagcaaacaagcgctgttaatagcagttcctcaccatctaatcaagagaatggtggccctgttcctatgcagacaacaagtttttctttgcttgcatctctttcgtcagtgggggtaaccaattcccctcccaggacagaagggcttagtgcaaccttgtctcatcttccactgtccttgatcggctgtcattctgtgcatcttgctggtatcaatccagagcatcaaaagcagggaagtgatatgatacaggagcaagtcggaacaggcgctgggacggttatagccgaaggtgtcaacaacgatgtgtttgcagcggctactaccactatggaaaaacttgaagtctcaaaggctgaccagaggattgaaggtactgtgcagttggtacagcactctgcaaagcgatgaggaggaagacgactctgaacttagatggcgcgaggaatagtacgatgatggcagactctactccaaatatatcacaaccttctcggtagtatccatccacgagtggttgaggtcggcgtccgcgttgacagcagcagcggtattgggaggatcaacacgattgttgcgagatctgaaattttgaccagggatgggacgttgtgagcgcgatggtcggagcgaggcgaggggcccgggagcggcgcgtgcggatctggcatgggggcgtgggcggctgtttcaccagttggcgtgggatgggactgggagcggcgtgcgcagatccggatgggggccgtgggcggcagtttcgccgagagcatcgcacgcgaaggggatgggggccccgctgttggccgcagccacgccggcggagaagtcgagcttgccgatgaggttgtccatggactggctcctgacttggcgagccatgggcgcacggggcggtggggaggtgtgggagggtggggcggtcgtggatggagcgggggaggaaggggcagggggcggcggcggtcgcagtcgcggattgagcaagttaggaaggggcgggggcgacgagctgggtcacgaatggagcgaggggagggggtggtcgcggctggagcaccatggagatgcgaggcgggggcattggccgcgccaggcgcccacgctccgtacttaattagtagtaaggataaggatgtccctcagtgggttattaaatcaattgataaaattcggcgaggatttctttggagaggaagaaaggaagttaatggtggtagctgtcttgttccatgggaagttgtcacgaggcctctgaagcttggtgggcttgggatccctaaccttaagctcaaaagctgggcattgcaggcaaaatggttatggttggaaaagacggatctaagcagaccttggtgtgggctgtcccttccagtgcagcgtcaggttagacagttctttgatttgtcggttgttaccattttagggaatggggctactactctcttctggtcggatagatggattcatgggaataatatccaagacattgcccctgaggtggtgggtatggttggccgcaaggcgtattcttccagaacggtggcacaggctctggataattggcattgggtcagtgatattcatggtgctctttccttgagtgggttgcagcaatatctgttgttatgggatactttgggggaagttaggctttctcatgatgctgacagacatgtttggatgcactcttcttctgggatgttctcctcaaagtcttgctataaggcttttttcatgggttcaatttcgtttgagccatggaaacgtttgtggaaatcctgggctcccccaaaatgcaagttctttctctggctggcgataaggaataagtgttggactgctgatagattaaggaggagagggctgcaacaccccgttgtttgtgttctttgtgaccaagagcaggaaacagtgcaacatcttctgtgtacttgcagttttgccaggcaattttggcatgctattcttgttcccttgtgtcttggggatctcattcctgctgttcatgaaatctcatttgctgattggtggaggaaggtgcttaagaaggtgcccaaaaacagaaagaaaggcttcgacagtctcattatcttggggtcttggtgcctatggctgactaggaacaaagctgtttttgatggtgtaaacccttccctgtgttttgttaaaagcttatttctgaatgagttaagttgttgggagagggctggggctaaacagctagcaagttttggtcttcctgctattatgagtagggtctagattgtggtcaagtgttctgtttgccctacgggcattgtactttggtcctcttggacctttttcctctcttaatataatgacgtgcagtcctcctgcgcgttcgagaaaaaaaacatgatgttaacaaggattaatagcagagttggacaatcctgtcaagacttccaaagtaaaatgctaattttgaacactactagttgtcatgtagtagcatattaaataaa

SEQ ID NO: 2068 - DNA, 1709 bp, Zea Mays
aaaatataagaactataaatcagtcactagaaccaatcaccgctcaagctcacggcctcacctcacccacccgcccgcctcgcctccatccacagcgccacagcggccacgccatctccgtctctctgctcacctccacttcttccgttcttcttcaccgtctccgtccttgacacgggcgcacccgtccccctccgacttccccgtggcctcgtcccgatccgtagtcaactcgaccttgttcaagagggtgagcccgaaccacggcgcgcgggagggctctttttattttgacccaccggaggacagccgccccatgggctggtcgcctgagcgcgctatgtatcagctcatcgaccggcggaaagtggaaagcatgagcttctgaagttatcctctaccagagtaatcagcattacagagtatttcaaagaagtgtctttactggacagggcacctaggaaccgtctcgttgaagatattgacgataacctcccgtttttaatccatgataggcaattcgtgaagctcttcaaggctcttgtgggtaagtatcctgaaagggatgcaatcttcaagctacctaagtcacttgatctgcattttaaattccttgagttgcttattgtaaaggactatcgtgtgatatatggtccagtcctcttccccaagcttttgatctctataatctattctggtgctcatggtgagagggcaaagaagcacattgtgggcagtgaagatggaagtgatgagacgctgatatatgaagttagtgatgacactaaagatctcaaagcgtcgaatgtcccactgaaagttagaaattttatgggcaacaaagagctcagtgatgagaccaaaagtactaccgcagaaggaaacgttgagattgttccaggagatgagctgacaactactcttttggacgctgtgaatactattcagcgcactactggatatggcttcttaagctgctacaagagaaagatatgcacattccaaactctcgccctcgatctcgctcctctccgctctcgcatcatgacgctgcgactccgctcccgtcctcgtgctcactgctacggagtcagatccagttggggtcatcaaggccgccggaccctccgtcgcggttacaggagggtgatgggaagggctcgtgcttccacttcctctgctccatccggcaccgatggcggcaggtcagggcttcctgctggtggcgttggcgatcctgacagtgcaggggcgttcatgagcctgaggtcggggcctaggatcaggtggtgttggaggccagatgcgtgcgcggtgcgcgccagccatcggcgccggtcggtgcgccgcgacgtgtggacgcgtgatctcggaagacctcacgcatgggacacacacatctgatgtggatcgcggctgctaaaccatgtagaaacaatccaatcacgaagaggttattgagattcttcttcgattcattccataagtgcagcagtttaggaaagaaaattggtcaacgggaaaagaaaaaagtcctactgctgtacagctaggaaaaaagtattagctccattttgtgcatatctttctcttgtagcagattaagaagctgaatctggtacatcctcatctgtttgacgtgtgacatcacttttttctttgctgaacgaatctaataatatccagtagtgcgctgaatagtattcaca

SEQ ID NO: 2069 - DNA, 647 bp, Zea Mays
atggacttccaatttccaaacgtcgacgcagccacaggagtgttgtgttacacggggcatggagaagctgggttttggctgggaaacccgcgggtttcgagagtcccaaacgagttcgtaatctgtgaaggagcattgcttgcatcgggatcggctgactgtactgtaaagctctgggatgtcgcttctagcacaaaaaccctgaagacagaggataccaaaggcagctcagctaaccgactgagactgcttaaagctctccctacaaaatcaactcctgtttatagcctgcggttttctcggaggaaccttctatttgcctctggtgctctctcgctaagctcgtcgtaagctgtgttttttttttgcagaaaactagaactggtcctgttttgacattgagtagtgaagctggcatttcagagactgcctattgtacagctaatattttcattagcaattccaacgaactcagcatgtactgccgaattgagcaccgcagattcgttgtagcgggttgtgatattgtaacaatattattaggttgtgaccttatgaacgcaactaaatgtacaagtgctgacaggcgatagcgtgaatgcaatggtctatcaggtctggagtttggtttagtgaccaggtaattc

SEQ ID NO: 2070 - DNA, 2721 bp, Zea Mays
tttcctgctataattattagagtgtctccaccctgtggatcgtggttgaggaagacgatcactgtgcgctgctacctcatacagctacgttattgtggttcacctgtagttaattttgtaaattattgttatatctgtagctgccccaatggaagttgagctgccaaacatccataaagctacttcgagtgaccattggagtttaaccagcagccaatacccgtctggtaaatttcctaaggtctcagtgggtatcatgattccgaaggcaggtagtataccaagagccagaggtggagatgctaccccaactcctacatttgacaggaacttgtctcaaggaactgatggtttatctagaccaaaaggaaccttttcctttggaacaagaagagaacaaggcatcagcgttgaaaaattggagacacctgagtttttaagttcccaaagaaaacggaacacggagtctgcagataaagccaaacccaatagtgagatgctcaggatgaagttgtgggagatccttggtggcacttcacaaaacaagcaggccgctgcttcaccaaaccctgatgacatggagacacctgatcagcctaaaggtcaaactgtcaaaggaccatcttcagggaacaaggaggttttcacttcaccttttcttgataacatcaagacaccagatccactgaagcgtcaaacggtgaacttcacaaagtgtaaactgtcccttgatccaattgaatcagattctgatagtccaaaagttgatgaaagaagacctgttactcgctccttgggacgtaagaaagcactggcatcctccaagaagcagagccgaagttcaaagaaaccattatctacttttcagtctacacccaagaagaaaatgctggacaatgtgtttatctttaatgagaaatgcacacctaaaacagtggatcagggtgaaacaaataaagcgactgagtcacgtggtagcaggtctcctgattctgccaaaaaaagagtaaacaggaaacagccatacctttctccaactgaggatgaagggattaaaagttctgaaacaagttttgcaaaaggatataaatctcacaaatggccttcagatattgatgttcctgataaatctcctgttgagcatatgggtaggaaatcaaatctaaaagaggacagaatgagcaaaagacgcttatcttcagctgctccttttcccactgctgcaacacaagaaaatactgattctgataaagaacaagaacaatgcccggaaaacttcctaaccagggcttttgatcaagcctccaaggagctgagcaaaagcgcaaagaaaccattttctacttttcactctacacctaagaagaaaatgcagggtaatgtgtttaccttcaatgagaaacgcgcacctaaaacggtggatcaggacaaaatgaatcaaactactgagtcgcctggtagtgagtctcctggttctgcagaagaaagagaaaacagtaaacaaccatctcattcacccctttctccaactgaagatgaagggactcaagggagtaaaagttccgaacaaagctttgcaaaaggatataaatctcaaaaatggattccagatatcaagggcacagataaatctccccttgagtatgttggcaggaaaacaaaactaaaagaggatagaatgaacaaaagatacttatcttcacctactccttttgccacttctggaacacaagaaactatagtttctgacaaagatcaagaacaatgcccagaaaactacctaactagggcttttgatcaattgatagtggttctgggaaggtttcaaactaagatcaagtctgaaacaagcaagaaaagttctgagattcttgcagctactagagagactatatgtcagcaccttgagggggttgaggcgcagatgcaggctgacgtggacaaattggtcaatgcaggcaggtctaaaaggaaacgcctagaatctacatttgaagatcaacaagaaaagttaagaattcttcatgagaagttcaaggaggaggtcaacaagcagcttctgaattgcaggagttctcttgaggattttgaatcctaccatgcagaacttaagggagtagctgacaagcaaaaatcatcccacaagaagctcttagcaaatgccgagaaaacagtaggcgctcagctcaacgatgcagaaaccaaaatcgcagaggtccagaagagagcacgcaagaggatgaatggcctgaaatacgtgctcaaggagcttatcacagagactgttgattgactgatcgaagttgcttcactttgtccaagtacatatcaccggtgcgaagattaggatacgcaggatgcacatgcgaacacgtctagggttccatttgaaaggggtacaggagaatcatgatgcacataggttttgtcagaaatcgagatttgcaaaggctattttacttctagacgtccttagtattattttctgggtcgtaccttccgttagggtttttgctacctggtcgatgtgcacagtgcactgctgcactgcaacacccagacgtctttcagcgatatgcgacctgtaggatgtgtgtactgttcctcttcgttctagccaaaccctgttgctagctggaatactaatgaagaggtgtcttgatatttacgtgatttgacgcttgcttgatgctgtgcactggagtctaatggtgactggtt

SEQ ID NO: 2071 - DNA, 4457 bp, Zea Mays
gggatctccagaatagcagggacgggcttgttgtagctatccaccagaaaccttatcatgttggcaatctgtcacccacaattaatagacatcagcaggaatacaacttataagatgggcgtttcttctattacctagctggtacagtggtactactgttcatgatttacataatgctcctagaacctttccccaccatttctcgaatatcagtaggggtatccaaaagcaaattgcccaacgattggcactgatgaacacacgctgtacttaattacagcttgacttaaaagagctggaagaaaggttcagtaaattaatctgcaagtaaaaagggccaccaacaaggaggataataaacaatatttatagtaaaaggagatgagactaccaaaggataatactgggagaaaaggaactggaacctaagtccaagtatcaaagcattatcttgatcaaaatgccaactttatcctgaagcacaacaatctagcaggagtttgaaaagcctactagtttagagccgctactcttagtatacaagtgaaaactcgaagacagctttgaaggttccaacaagcttgctggaattgtttacacttcatagaagggagatgcctccaaagaaactaaacaaaattaattgagctgaaaaaaaaatcataacctcccctctccctttttcccttgtctatctatatatacatatgatatgcttaaaaggatctgacttaacaatgcatcaatgtataaataatatgcatgcttgtgtggtggttcacttacatactgactgatgagcacaatagcaatatcctccctcgtagtaaattctttgaacgcatcctcgatttgtttaactgtcgtctctgtggcatgaaacaacaaacagtattgataatgaaccatcaggatcaacaacagtaactaatgtatgaagtaatgcagcacaaataatggggattgcagaatgaaataatgactagagatcctagtcactgatatggttacaaggtacaaggtaaaagcatcattcaagattatctgcatcagctgcacaagtacatgaaagctcacaaataaggaaaccagtactaggaaggaaaacccagatatatgatatatcctaatatagtaggcctgctttggtccgacggcatcagttaactgcatgtgaaaagcattatatcttactgtaagatccattagcaagaaacggccaaggtaagaaacagtatgacccatgtgactggaagggattttgttgtggaaggaacatgacatgaagcagaaatatatgcaccacgctactgtaagatccattaccacaaaaaaaacatagggaatcaaaagcgagagagagaggtgcatgagtgaaagtgactgttttgcaggaacatgaaatgaagcagaaacatatagtgcatgctactgcaagatccatcaccacgaaatacatgtatgagtgaagggattgttttgcaaggaacatgaaatgaggaagaaacatggtgcacgctactgtaagatacaacaccatttaacgcctagggaaacaaagatttcagaggtgtatgaatgaaagggtcagagagtataacaaaacagcggttgtaagctagtactaggcttctttgctgtctgcttgggtgtaagctgtacaagtacaagttcctcttgtgagctctagaactcatctatggatttgtataagagcagagtgtaaagggaagacccagtgccagaggctccgacatgagtagagtctggggcagggataacccgaggcaagcctaaacccttcctggtcctaggggtagaagacgaccacaaaagaggagggctgagggtactggaagcagcagcacttggctacctggcatcagagatggaggtgaggagattcggccacaaagcctgtcagattctcaaatccctcagcaaattggttgattcaccttctcggaggcaagatgaactgccagcagggaacacagagaagggacgatggtggaggcttcagtgcttacagagatacagatgatgcttaaagaagggaagggaatgaaacccggagggccctccccctgtccaacgaaagtcgaggtggtgattacagaggattcatccagaatagagatgagatgtggagggatgaccatgggaactatgttttagtcaggaaaccctaggttcctacagagattatagtactggccgcacttacaaacgtcgatccacgggaaaaatgacagcatgatggaaattgagaaggatctgaggcaaaacctgagaaatagagatgaaagaaccttcctgagaaccaaaatagagctatgtatgataacaggcagaatttcaatagaagaaccaaacctgggaaagatattacatactataactgcaatgggaccagtcaccatcatggacaatgtccaaatcaacctttcttatagaactgcaagaacagtgaacacaaagaacagtggacacaaagctatgttttgtttcagcattcacatcccctctgataagggtaaaggtaaacagtaaaaggttttaagcttgatgagaattattgagggagaagcaacattgcaaatcataagaattgaaatgtatttaaatatatgagcatggttagaaaaatcaggaagttgtctcccgaaaaaattctggtttacttttccttctgaatagataaggcaacaccttacaagattttagagagtgaaatttagaactcatgagatcattgaaacggtagagaacgtgctagaaacagttttttgtgtgaaaaatcgcgaaccctgaaatggaaaacgatcgagatgcagagggggagaggaggaagattcgccaagaaccgatttaggaatagccgagctcgctaagaaattagaaggaaaagaaaaacgtaagcaacaaagagaaaggctcaacatcccatcaaggcaggaaaggccaaggagactgtaatgtctaaaagtctaaatccacagaaagtaaacctgatgattccatggagttagacccagctacgattgactcccaagaagaattggtggattatgaacttgaccccttggagcaggaaaaattagaggtgaaaattattgaccaaaactttaaagagagaacaaaaaagctttctaatgtgctcaacaatgactccagtgcaattcatttgccaccagattggaaaaatatggacatggtgccagatactagtcatactacagacaaggagaagcagagttcagacatcctgaaggttggagaagcaaaccaagggagagttattaccaagatctcggccattgctacaagatcaagctcaagagttgctgatctgggagaaggaaattgtgacatcaagtcaggtactagttctctcactgccttctctacttctgatcctgaatcattaatgcattttacttcattttgcaatattaaattgggacacgacctagtagaatcactagatactatccctaccatccaagatcaagaagcagccaatgctgcctgggcagaaaataaagtaaggactgtccagtccaaggattgggttgatgtcaataatgcttccaacgaagaagctttattgactttttcagagttgtaaatcagtctgcagaaacacagacacctgtgagtccctcctcggatgtgagagatgcaggacatagaaccttcaggatgtctgaactctgctacagttcaatgaaggatcacttagttcagtttttgtgtagtttcatgtatgggtgaatttatggaccgttgaaacaagaaccagtgtggcagtgcataacattaagcagtgaaccttgagatgatagtagagagcagtgggcttcttggcttattaattgagccaagtgtgctgagggttcaacatacagtgtcccgtggaccatcaaggtcttgcagggaagtggtgtggatcgacacacaccatttgcagttctgccgatgacttacctaggaattctagtatgtagctactactccctctgtttcaaattggaagtcattctggcttttatagataagtagctttgagtgtgtattagagataatgtgtatccaggtgcttacaatttggaacggggggaatacttaagagcggcaggttttatttagctatttactagatgagaaggtgatgaaaagaatgggcacttggcaaagtcctttcctgtcttcaggggtaactccataatagcgatattgatgatagataataaggctcagcaataataatatgcagcagtaaagaggatattcgtttcactcactgttgtcgacgaggaggtagttggttttcttgcgcagatcaacattgccaacgccggccatcaagaagccagtgacggtgtcctgcaagaataggtgacaaagcgtgcgtttagataatcgcggatccccagatgcaacccagatgttgg

SEQ ID NO: 2072 - DNA, 852 bp, Zea Mays
cgcccactcgtcctctcggctctcgtccagacgcccagtcgccctagccataggcccctagccctagcacagcagcacaacagcgccgccccccgcccccggtggcccggccccccgcccgttcacccgcgcaaccgcgccgcgcgacccgcgtccggcggccgcccatcgccagtgccgtgacacgtcactccgacgccgtcgccaccaaatctcctggcaacgcctcacgtcttctagttctaattccagcctcactgctgccatcacctccgcctgctgtgtgtcttccacctcgcgctgccaaagccgacaaaccctagcccaactctccctaccctcgcccatcccactcctttcgtccgattcgtggaggcgacggaggggctaaggcatgacgaccgatgggcagctcagggagtgggtctccgacaagctcatgagcctcttgggctactccaagagcgtcgtcgttcagtacgtcatcaggcttgcgaaggagtgctcttcacccggtgacctcgtgggcaagcttgttgagtttgggttcagctcgtctgcggagacccgcaccttcgcgtcggatgtctacgccaaggttccccgcagggccagcggcatcagtaagtagtggcaacagattctggaaggaatgtccgtcgacgaacagaagaggaggatgaagaaggtggcatcggcagttctgatgaagagaaagaaatgattagagatcagcaggaaaaggctcagctagaaagaaacatgagagaaagagatgcagctaacacaaggaaggaataccatttagtaagcaatatatcaaagttcaggaaacatttctgcttcttgtga

SEQ ID NO: 2073 - DNA, 1638 bp, Zea Mays
gggttcgttgcttccccagcacagtggtgttttctgcggttggtgtgggatccatggagatttcctgcctctggaaatgaaatacacatgtgtagaatcaaacaacagtagatttttatgaaatttaggattgttcatggagctgaatatggatacatgcaggtggcctttttatagaggaaggaatgagtattaattaagttctaattagttgcgagtagtgttttgtcctatagaactagggagttttgcttcatggtaggtgttcctaggctgcaaattttgtctgatcttgcattgagaatatgatgggtgaagtctgtgacacgtcgcgtcgcgccgtcggtcgaagccagctcaatagtgaggttgaggcctcacaactttctgcaaaactacatgtcaagtgctccaccttgtcagaattttaaagaaacattttgttgtttcaccttgacttcttattgacatggcctattggagagagatctctgtgtgtttctggtttctaattggacatagacatgccagtgaggagcagtttagccggttcttgcattatgaagtggatgcaattagaaaggcgtgtgccagcttggaagagggctaccttcctctagttacattcatagtggtgcaaaagcgccatcacacactgttttgtcctgaagatcatcgttcacacagacaaccagatcgacgtggaaatattttgcaagccactctggcattcaggtgagccgatgatagatgttgcgattctccagaaagaaaacaaattctcgtctcaacacatatggttttaatcattttgcacttttggcaagggacgagccggtcatcacattaccatggtggacatttgagatttgcaaccttgttgtgcatagttttacacactaagcacccattgcaccgaaaaaacttacaggatgaactagatgcaaaacctgaagagctggaaggagaagagttggaatctaagcttctagagcctgttgcagctctttcggtgcatccagtgcatgtcccaggaaacaagcaactagcttgccctacttcacagaaagttatagctaaatacgatgagctggctgcactacaagctgaaatggcattgtgatcaggacactttggagacaatagttcttatggcgcagtcaggctagcaggctgccatctgagtttgaaattaccgattgctgccatccttgtgatccagacaaggaaaatgttcttgctatttaagttatgaggtggagtgatggctcttatcttgaagatcaggatcactggcggttgggttactccttgattcttacatggattaacgcatggaccgaggaagcgcaatgacaagcctaatagcctgcaactgatgaaaggaatggtctctactacatgtattattgtccatcccatctttgtttaatggtcgtagctgctttatacaattattcctacctatgctagactgtgagccattgtatatcaatgtattttatcatattgatttcgtagcaacgtacgagcatatacctagtatatttataaacaatgtgtagcacttgccacatttaaacagctaatcttaaaaagacacgacatgcgaggattgttaatcaatatcgtttgtat

SEQ ID NO: 2074 - DNA, 2026 bp, Zea Mays
gggttcgttgcttccccagcacagtggtgttttctgcggttggtgtgggatccatggagatttcctgcctctggaaatgaaatacacatgtgtagaatcaaacaacagtagatttttatgaaatttaggattgttcatggagctgaatatggatacatgcaggtggcctttttatagaggaaggaatgagtattaattaagttctaattagttgcgagtagtgttttgtcctatagaactagggagttttgcttcatggtaggtgttcctaggctgcaaattttgtctgatcttgcattgagaatatgatgggtgaagtctgtgacacgtcgcgtcgcgccgtcggtcgaagccagctcaatagtgaggttgaggcctcacaactttctgcaaaactacatgtcaagtgctccaccttgtcagaattttaaagaaacattttgttgtttcaccttgacttcttattgacatggcctattggagagagatctctgtgtgtttctggtttctaattggacatgtaaaagtttatgattagttgttgcataaatggattggctagaattttcaaagtataggtgcttggtgtcttctcatggtcatagggaaaatatcatagctgatattttcacacaagtgaaggatccacaaaagggatttgttccctatggaatgatcaggcatgctaaacatcttagttgtctaacttagttcttcagataaatgatttgtcctttttttaaatgtcatatttttgcttcagggaactactcgtgccattctataaggcaaatgggagccgcaaaccaaataggaaaattttctatgggttcgtaattgtctgtttgaatgaattttgttgttgtctaaacttaaatctcttttccttgcatgtaaagaaaaagacctgccagttttctttatagacatgccagtgaggagcagtttagccggttcttgcattatgaagtggatgcaattagaaaggcgtgtgccagcttggaagagggctaccttcctctagttacattcatagtggtgcaaaagcgccatcacacactgttttgtcctgaagatcatcgttcacacagacaaccagatcgacgtggaaatattttgcaaggtgagccgatgatagatgttgcgattctccagaaagaaaacaaattctcgtctcaacacatatggttttaatcattttgcacttttggcaagggacgagccggtcatcacattaccatggtggacatttgagatttgcaaccttgttgtgcatagttttacacactaagcacccattgcaccgaaaaaacttacaggatgaactagatgcaaaacctgaagagctggaaggagaagagttggaatctaagcttctagagcctgttgcagctctttcggtgcatccagtgcatgtcccaggaaacaagcaactagcttgccctacttcacagaaagttatagctaaatacgatgagctggctgcactacaagctgaaatggcattgtgatcaggacactttggagacaatagttcttatggcgcagtcaggctagcaggctgccatctgagtttgaaattaccgattgctgccatccttgtgatccagacaaggaaaatgttcttgctatttaagttatgaggtggagtgatggctcttatcttgaagatcaggatcactggcggttgggttactccttgattcttacatggattaacgcatggaccgaggaagcgcaatgacaagcctaatagcctgcaactgatgaaaggaatggtctctactacatgtattattgtccatcccatctttgtttaatggtcgtagctgctttatacaattattcctacctatgctagactgtgagccattgtatatcaatgtattttatcatattgatttcgtagcaacgtacgagcatatacctagtatatttataaacaatgtgtagcacttgccacatttaaacagctaatcttaaaaagacacgacatgcgaggattgttaatcaatatcgtttgtat

SEQ ID NO: 2075 - DNA, 2076 bp, Zea Mays
cgcggccgtgacatgggatgggaggaagcttcccttcggtgaggtaatcaaggagattgggttcgttgcttccccagcacagtggtgttttctgcggttggtgtgggatccatggagatttcctgcctctggaaatgaaatacacatgtgtagaatcaaacaacagtagatttttatgaaatttaggattgttcatggagctgaatatggatacatgcaggtggcctttttatagaggaaggaatgagtattaattaagttctaattagttgcgagtagtgttttgtcctatagaactagggagttttgcttcatggtaggtgttcctaggctgcaaattttgtctgatcttgcattgagaatatgatgggtgaagtctgtgacacgtcgcgtcgcgccgtcggtcgaagccagctcaatagtgaggttgaggcctcacaactttctgcaaaactacatgtcaagtgctccaccttgtcagaattttaaagaaacattttgttgtttcaccttgacttcttattgacatggcctattggagagagatctctgtgtgtttctggtttctaattggacatgtaaaagtttatgattagttgttgcataaatggattggctagaattttcaaagtataggtgcttggtgtcttctcatggtcatagggaaaatatcatagctgatattttcacacaagtgaaggatccacaaaagggatttgttccctatggaatgatcagggaactactcgtgccattctataaggcaaatgggagccgcaaaccaaataggaaaattttctatggagacatgccagtgaggagcagtttagccggttcttgcattatgaagtggatgcaattagaaaggcgtgtgccagcttggaagagggctaccttcctctagttacattcatagtggtgcaaaagcgccatcacacactgttttgtcctgaagatcatcgttcacacagacaaccagatcgacgtggaaatattttgcaaggtaaaacaaaattgctattgtgcaattgttcttgaaactgatgagggcacattactactatttgatgaatcatatatgtatgtgtgtgtgtgtgtgtatatatatatatatatatatatggctctcctctgcattcttagtgtttctagatactaattttattgtgttcttagtaactgtggttgacacaaagatatgtcatccaagtgaatttgatttctacctttgtagccactctggcattcaggtgagccgatgatagatgttgcgattctccagaaagaaaacaaattctcgtctcaacacatatggttttaatcattttgcacttttggcaagggacgagccggtcatcacattaccatggatgaactagatgcaaaacctgaagagctggaaggagaagagttggaatctaagcttctagagcctgttgcagctctttcggtgcatccagtgcatgtcccaggaaacaagcaactagcttgccctacttcacagaaagttatagctaaatacgatgagctggctgcactacaagctgaaatggcattgtgatcaggacactttggagacaatagttcttatggcgcagtcaggctagcaggctgccatctgagtttgaaattaccgattgctgccatccttgtgatccagacaaggaaaatgttcttgctatttaagttatgaggtggagtgatggctcttatcttgaagatcaggatcactggcggttgggttactccttgattcttacatggattaacgcatggaccgaggaagcgcaatgacaagcctaatagcctgcaactgatgaaaggaatggtctctactacatgtattattgtccatcccatctttgtttaatggtcgtagctgctttatacaattattcctacctatgctagactgtgagccattgtatatcaatgtattttatcatattgatttcgtagcaacgtacgagcatatacctagtatatttataaacaatgtgtagcacttgccacatttaaacagctaatcttaaaaagacacgacatgcgaggattgttaatcaatatcgtttgtat

SEQ ID NO: 2076 - DNA, 1319 bp, Zea Mays
acaagaatcccccgcgtcgcagacatgcggccgcttatccgaaccgctcgctgctggctcctccgcgcgcgtgttcgcggcatggccacgcttccaatggcgctctcccccgccgccatttcccccttcaccaccctccccctctactattcttcgcgtcctcaccgccgcctcctcgcccgcttcttctccgtcgcttcggcaccgggcggagcgaaagggcaccgaccggcggcctccgccgttgaggtgggcggcgtcaagatcgcgcgcgaggatgttgtgaaggaggatgatccgacaaacaacgtgcccgacaatatcttttcgaagatcggcctgcagctgcacaggagggataaccatccccttgggattttgaagaacacaatttatgattactttgacaagaacttcactgggcagtttgacaagtttgatgacctttgccctcttgtttctgtcaagcagaattttgatgatgtcttggtcccttctgaccatgtaagccggagttacaacgacacatattatgttgatggtcaaacagtcttaaggtgtcataccagtgctcatcaagctgagctgctaaggcatggacatacacactttcttgtaactggagatgtttaccgtagggattccattgattcaactcactatcctgtcttccatcagatggaagggttccgtgtcttctctcctgatgaatggtcagggtctcgcatgggtgggacagcatatgcagctgcagaactcaagaaaacactggaaggcttggcaagacatctatttggtgctgtagagatgcgatgggttgacacttacttcccatttaccaacccatcctttgagctcgaaatatactttcaggatgattggttggaggttttggggtgtggagtcaccgagcaggaaattttgaaaagaaatggcaggagggaccatgtggcttgggcctttggattgggcttggagcgccttgcaatggtcctttttgacattccagatattcgactcttctggtcgaatgataaacggttcacgtcccagttctcagaaggcaagcttggtgtcaagttcaagccattttcaaagagaacaacttatgtgaggttgtcagaggaattgctggtgatcttgttgaggaggtatgataacagtgcatttgatgcacattggcttagcttagtcatttcaagtttttatgatccttcagctttcatgttgtcatttcgtataataactgaattcaaacaatagcataatcaatctatactatacttaaagcaccagtttcaacggtcgtcccgcgtcat

SEQ ID NO: 2077 - DNA, 1189 bp, Zea Mays
ccgcccgcggccactaatcaacgccgcatcccgcccgaggccttccttcaatggcgcgtggaaggtcgtctgttattaattggtgcgaccacggacgacaccatggctccgcccgacgcccctctccccgcaactcgcaagcccgatattgtcggcgttctcgcacccaccgatttggcctgcctcccccaggattgccggcgttctcccccctccccgtcgcgccgcgcgatgccagccgtgattcccgcgtccgcccgccccacatctacaaacttgctctgcagatgtcctcccgcccatcgtcatccatcccctgccgccgccacggacgaccttcctcggccgccacaagggggcttctgtaagcgagcgtgcagggggagctataggcgagcgcgcagggggacccgcacacgacgacgcccgcgaggatgctggaggacgtcatcgccgtcgcgctcaacattagggcctccgacgcgctctttttggcctagaaacggaggaggcgatgcggcgccgtctcgcccgtcagccggtggccgcaccaatgagttccacgccgccacgctgcaccttcctcgtcgtcggtgtcctcctcgaacctgcgatcgttttctgcctgacaaagccattgacttgattgatgaagctggatctcgtgttaggctgaggcatgcgcagctccctgatgaagccaaagagctggacaaagagctgcggcagataagcaagcagaaaaataaggctgtacgtggccaagattttgagaagaatctgtagcaaatggctaacgatgaggacatccatcacttgtttatgacaatagaactgatatgttcaagattccgtagcaacgcacgggcacccaactagttctccacatatgggaataacagggcgaccataattcatgacgagtcgtcaatgtccactgcctcagctaaaagaagtttatcaaagatgaacttattgaaaaactattaaaatcaactatgtggcatgaaagattaaattgtatagctacatgttatatggacaagggtatattgaaaaatgtggatctaaacattgtcctcacatattttgcttcaataaatattcgagtgagttatttattttgagagacattagagctatatgtaacctaaagttgcaattaagaatactctgaatttatggtccc

SEQ ID NO: 2078 - DNA, 2355 bp, Zea Mays
gctgccagactgcaacagccaccggcggtcggcacgacagcacggtccttccattgttgctcccagctccaacgcagcattactcatctccattctccagtccgataatccactcattacctcatcatcgtttccaaaagcaaagctttccacgcagattccaccattaaattgggcgaacttttttgaattaaaaactcaaatcctggaaaacgagatgcggtaggctggtagtaggaggactaatcatgtgggcgacgctacataaacccgtcgcgcacgccaacttgcgtctcctcctcacagtctccgccttctccggaccactccacttaggcaccgccagcgctgtcgcggcggcggttacgacccgacgctcgagttctagcaggggcgtcgcggccaccgcgatgccttcgtcgtctccgcctccgctgccaccagccgaggagacgaccgcctctgctgccgctctcgcccctgagggtggattctccctcaccgagccctcgttcctcgagtccctcatgccgaagaaggagatcggcgtcgaccgcttcctcgccgctcaccctgagtatgacgggcgcagcgcactcatcgctatcttcgattctggagtcgatccagctgctgctgggttacagactacttcagatggaaagcctaaaatccttgatgtacttgattgcactggtagtggtgatgttgacacgtccaaagtggtgaaagctgatgctgatggtgctattgttggtgcttcaggtgcccgtttggttataaacccctcatggaaaaacccttctcaagagtggcatgttggctgtaaattaatatatgaactgtttactgacacacttacatctcgattgaagaaagaaagaaagaagaaatgggacgaggaaaaccaggaatcaatttccgatgctctgaagcagctgaatgaatttgaaaagaagcatcctaagcctgatgacaccatgctgaagaaggcacatgaagacatgcaaagcagacttgattacctgaggaaacaagctgaaggttatgacgataaggggcctgtaattgacattgttacatggaatgatggtgatgtgtggagggttgctgtcgatacccagacccttgagggtaacaatgatggtggaaaactagcagattttgttcctctgacaaactacaggcttgaacgcaaatatgcaattttcagcaaattggatgcttgctcttttgtagcaaatgtttataatgatgggaaccttgtcagtatagtaactgactgctctccccatgctactcatgtcgcgggcattgcagctgcatttcatccagatgaacctctgctgaatggagttgcacctggagcacaattgatttcctgtaagattggagacactcgcttaggatctatggagacagggacggggctggtgagggccttgatagctgcagtagagcacaaatgtgatctgattaacatgagctatggagagcctacccttcttcctgactatggcagattcattgatctttctaatgaggttgtggacaaacatcgcattatatttattagtagcgccggaaacaatggaccggctttgaacactgtgggtgctccaggtgggactagtacaagcattattggtgttggtgcttatgtttcaccagccatggctgctggagctcactgtgttgtacaaccacctgcaaagggaatggagtacacatggtctagccgcgggcctactgctgatggggatcttggcgtttccattagtgcacctggtggtgcagttgctcctgtaccaacttggacgcttcaatctcgcatgctcatgaatggcacttccatgtcatctccttctgcctgtggtggggtagctcttcttgttagtggcatgaaggctgaaggcattccattaagcccttattctgtaagaaaagcaatagagaatacagccgcatctataagtaatgcacctgaggagaaactgaccacaggaaatgggcttttgcaagttgatagggcttttgaatatgcacagcaggctaagaagttgccacttgtttcttatagaatctcaatcaatcaagtgggaaagtcagttccaaaactaagaggaatatacctccgcgggggcaatgcatgctgccaaacaagtgagtggactgtgcaacttgacccaaaatttcatgagggcgcgagtaacttggagcaactggttccttttgaggagtgcctgcaactgcattctactgatacctctgtggttcaaattcctgagtatatactggtgacaaacaatggacgcagtttcaacgatagcataagctcttcaattgaagctgaat

SEQ ID NO: 2079 - DNA, 1325 bp, Zea Mays
cagcataggcctcaactgacagaaggccgaagcaccagccagggctcgcgtcgtgggaccacgtcaagaagagaacaacagcaaaccaaggagatggtggacatggagcagcaactaacagcaaatcagtctccatccatggcttccggccaacgatgccagcaaatcgtacatgtcggcaacgataaccacaagaatttggaagaaagggctagagcagttcgtcgactcaacaaggtcaatcccagcgaggtgcgcaggtgtcggtggggcagatttgactggaatttggtggggattggtgctgatctaaagcttgcaagagcatgggaagctgcaactgcaatggggaaagcaatatgtatggtgggaccaagaaaaaaggtactggccgggccgtgctcgcgttgtatatggagtcgagagcagcctatctgtccgcgtcgcgagtccagtggtgtcaaacgagtgtcctcatctatctaagtggagaatgaactcaaattgaggctaaaaacgctgttagcttgcattgctcgtgaccaaagctaagaggcacgtctgcaataacataatacacatacaatgattgcatatgggtaggcacatattttaagcaatgtcgttgaaccacctacagggaataataaactagtgccacacaagctttgttcaattattggttaagagagaagtgctgcgcagctaaagaaactggtcgggtcctattgatgtatccacctcaactccctcctgatgggtaggtaagtcactgatagctgcagcaaacaacaaatgatgacctatagaatttcccatctatagtgacacacgcaaggccaattgggcaacggcactgttccaacatgaattccattcgccgtgacaccgacaagagaaaaccttacacacaaaaagcaactcaatatgcggtgtactacacaaattcagaaacagattcagcgaatctctgagcctaatcccgaatccacgacaggtaactatggcaaagccatcaacagatccccgccaaatcttcaggtttgggatctgaatccgcgtactgcgagcccagatcacagcgtctaggcagaggcgatgctccaaggccgacacattccgtagacctcgagcaacacattcaggcgaagatcctacccccattcccccgatccacaacagcgagaacccgcgcactgtgccgcagcaccaggcaggccgtcctagttagacacggaactgctggactccgcgcctagaaattcgaaataaatttctaccggatcgcgcgaatggcgcgggccaacgcacggggtcagatttgg

SEQ ID NO: 2080 - DNA, 1311 bp, Zea Mays
gcccgcctgccattgccagcgtgctccctctgccccagaaaccgcgtcgcccccagggtgcccttccatccatggcgtcgccgcggccgcccccgcgatcaactcccagatcccgtgctcacctccccgcaatcaaggttgtcacgcccgacgaggatggctgccagtcaccgcacggccggtccgggccccagcgacggctccagcgcaggcgcgaggaagaagctccaactcaccaatgagcagtcgacgctgctcgaggacaccttccgcgcccacaacatactctccaacgcgcagaagcaggagctcgcacggcaggtggatctcagcgccaggaaacaaccacaatcgaattgttgcaagtgcgtcccacgatctgaagacaaaaagatctgttgtccattagcaacaaagtgctacagaggctgtgttctgtgtaccagtacttgatagtgagtttcagaatgaacctataactatttccaacatcgacaagaaggatggtgaaaattttcatgatatgtataaatgtcttggcaaggctgtttcgtgtcctctgttaccttatgagcatcgtcatctgaatacacagagaacggaatctgcagaaaaattgaaagtctgcatgcttcctgatcatcaaactgcaaataaattgacaaaaaagagtaatggtgagctgctgacatttggaccaaagtcaaaggaaatgtatacaggttcttgtaaccaaagaaggtcttatttctttgaaaagttaatgattccttccaaatcacaaagtgtacatcctaaaaattctgtgtcttcagtaaaatctagcgactttggagtttgtatgtatggcaccaatatcagcagtcagttattcagagcacagaatcaatcttcagctaagactgaaacattgcacagcgattcactagtataaacacgctcttagctggtactctattgtagagatgctagacctcacctgctggtgtcaattttcagttggttgtgaactataagctttgcgtcctgcggtttgtctacattacttccgaggcagtgatgatgatttattaatcactgaggcctggttcgcccttttgttttgcaagattctgcacccttctgatcagttcagaagagaacatggagaaccatgcacttgtggagttgttcatctggaaagtgacaccattattgaatatgattggtaagaataataaattctacatgattgcactggctctcaagttcagggcttcctgcaacgaataatcttaaagtagtttgctataatctatgttttcatataag

SEQ ID NO: 2081 - DNA, 1631 bp, Zea Mays
caatatacagggcggttttgtcttaagccagcagctccccggccgatggcaataagctgcttcaacggcggcgccggctggccggagcccgtggtgcgcgtccaggctgtgtctgacacgtgcggcgacacgatccccgagcggtatgtgaagcccctgtcggagcggccccggctctcaccggcctccgatggcagcggcccgaatatcccagtcgtagacctgtcaatgctagacgtggacgcgacatccagcgccgtggcggcggcgtgccgggagtggggctttttccaggcagtgaaccacggcgtccgcccggagctgctgcgcggcgcgcgcgcggcgtggcgtggcttcttccggcagcccgcggaggtgcgcgagcgttacgcgaactcgccggcgacgtacgagggctacggcagccgcctcggcaccgccaagggcggcccgctggactggggcgactactacttcctccatctgctgccggcttccctcaagagccacgagaagtggccttccctgccttcctccctacggggggcaacggaggagtacggcgaggaagtgttgcagctgtgccggagggtgatgcggctgctctccagcgggctggggctggaagccgggagactgcaggcggcgttcggcggagagggcggcgaaggggcgtgcttgcgggtcaacttctacccgcagtgcccgcagccagagctgacgctgggcgtagcggggcactccgaccccggcggcatgaccatgctgctggtggacgaccacgtcaagggcctgcaggtaaggagccccgacggccagtggatcgtcgtcgaacccgtccccgacgccttcatcgtcaacgtcggcgaccagatccagcacggcggcatcaagaaaagaagcgcttcaaaactgaggcagagcgtccccggatctgattgatcatatgtcaggactcaagatttgcgacaaaagcatggaccgatatgtacatatgttggaccatttttgtttggacataagccatccaacacatgtccttacccaccaggtgctgagcaacgcggcatacaagagcgtggagcaccgggtgacggtaagcgcggcagaggaccggctgtctatggctttcttctacaacccgcgaagcgacctgcccatcgcgccgatggcggagctggtggggcccgaccgcccggcgctgtacccggagatgaccttcgacgagtaccgtgtttttatccggcaacgtggtttggccggcaaggcgcagcttgagtccctgcaggtcaaagccaccgccggcggaggaggctgtagcgctgcagctgcctcctccaccagctagcatagctactgagctatatatatacatatatcatctgcagggccagccggtttcagttagctagctgtgcataatcaacgttggatcgaccagtgaataatatacaattatttgatgttaatttctacacaaatgttgtacgtgttgtacattcatcccatgtaactgagcagtaaatgtaagtgtgtggaactcccgttgctatttggtcttcgctcttgagttcaagagggaagtaggacaatgatccaaatcaatataatactactaaccatcgattatt

SEQ ID NO: 2082 - DNA, 826 bp, Zea Mays
tcaggcttcatcatgcttccatcctgtgggccatcctcggaagtcctcacccccacatactgccattcacggactgaacgtagatgaaagatgaagccttcagtccgcgtctcttcgtctcgagatctcgcgcccgcgccgtcgatggaaggctcgcctccagtccgcgcctacgcccgcaacctcgcccgcgcccaagatgtcgccctctcccccaccgttgtcctcgcttcctccctccagcacctgctgtctttctcactcaatggcgtggatcaggatggtcctcgcggcggaagccacctgagaaagccatgtgccccagcactcgcccccgcctcgcccgatcgatctgacacagtgcagctgactggcacacagtacgcatcgtcattggacttgctctggctcttcacctacaacaccctgaatgactacaagaggtaattgtatcgactccaccctgtctgctgagaccgtgttcgctgttgaagttggagaagttcaaagcacatcaattcaagtctgcctagcaggtgacgttggagccctacgagcatgaccatgcatgtgttgtgggcggttatagaatgcccaagaagcagaaggctacctgatcacctcatagatcataatccgcgctcatcttgtccaataaggatgcttcattgtattatggtttattaagatgtctgcatgatactgatggttacaatatagtggtggttagttgcaatgtagtggtgaaatagctagattaaaataacaatatttatgtatggctaggagcctagaatcacaaatagattatgaaatcttttttcat

SEQ ID NO: 2083 - DNA, 872 bp, Zea Mays
ctgtgggccatcctcggaagtcctcacccccacatactgccattcacggactgaacgtagatgaaagatgaagccttcagtccgcgtctcttcgtctcgagatctcgcgcccgcgccgtcgatggaaggctcgcctccagtccgcgcctacgcccgcaacctcgcccgcgcccaagatgtcgccctctcccccaccgttgtcctcgcttcctccctccagcacctgctgtctttctcactcaatggcgtggatcaggatggtcctcgcggcggaagccacctgagaaagccatgtgccccagcactcgcccccgcctcgcccgatcgatctgacacagtgcagctgactggcacacagtacgcatcgtcattggacttgctctggctcttcacctacaacaccctgaatgactacaagagttaggatcttaacccttaatgcttcatacttcttgaagaacgatggccactttgtcattttaatcaagggtaattgtatcgactccaccctgtctgctgagaccgtgttcgctgttgaagttggagaagttcaaagcacatcaattcaagtctgcctagcaggtgacgttggagccctacgagcatgaccatgcatgtgttgtgggcggttatagaatgcccaagaagcagaaggctacctgatcacctcatagatcataatccgcgctcatcttgtccaataaggatgcttcattgtattatggtttattaagatgtctgcatgatactgatggttacaatatagtggtggttagttgcaatgtagtggtgaaatagctagattaaaataacaatatttatgtatggctaggagcctagaatcacaaatagattatgaaatcttttttcat

SEQ ID NO: 2084 - DNA, 1518 bp, Zea Mays
ctcggaagtcctcacccccacatactgccattcacggactgaacgtagatgaaagatgaagccttcagtccgcgtctcttcgtctcgagatctcgcgcccgcgccgtcgatggaaggctcgcctccagtccgcgcctacgcccgcaacctcgcccgcgcccaagatgtcgccctctcccccaccgttgtcctcgcttcctccctccagcacctgctgtctttctcactcaatggcgtggatcaggatggtcctcgcggcggaagccacctgagaaagccatgtgccccagcactcgcccccgcctcgcccgatcgatctgacacagtgcagctgactggcacacagtacgcatcgtcattggacttgctctggctcttcacctacaacaccctgaatgactacaagagcttaatgttcatgttgcgccattggctaagctctagcgctgtggtggcggactttgccaaaagtctggtcctggcgagccctcttcgtcccgccgtcgcgacaacagcggggcacctcgtccgcagtggccgggccagggcaggggattcctatgcaattcttgtggctatgctggtttctcctctaattctgcttcaacttttggttttttcttggtgttgtttcattagagaatattgttttaccatctagctgagttggaagcccaataatataccaatattctttgtttttgcctttgaaatataacaattcttcagtttgttggaattaacgagtaagtgttttttgccatttaacgctaggggatgctctttgaagtggttattgttcagttaaaacttacacatcagtttattttcgttcttacttgatagcctaaacttactaattgatgtagtggaactgtagatgggcaaaggtttactgcatcaagaattctgaactaaacaagaacacaaataattttgttaagaatgctcattcattcacatactagaaaattttcaaacatgatgcagccattttggttgggggaaattgtcatgccagtgttttatgacttttaaatattgtgtgaatgtgttattctgtaggttaggatcttaacccttaatgcttcatacttcttgaagaacgatggccactttgtcattttaatcaagggtaattgtatcgactccaccctgtctgctgagaccgtgttcgctgttgaagttggagaagttcaaagcacatcaattcaagtctgcctagcaggtgacgttggagccctacgagcatgaccatgcatgtgttgtgggcggttatagaatgcccaagaagcagaaggctacctgatcacctcatagatcataatccgcgctcatcttgtccaataaggatgcttcattgtattatggtttattaagatgtctgcatgatactgatggttacaatatagtggtggttagttgcaatgtagtggtgaaatagctagattaaaataacaatatttatgtatggctaggagcctagaatcacaaatagattatgaaatcttttttcat

SEQ ID NO: 2085 - DNA, 1512 bp, Zea Mays
ctttcccgtcgcagaaatgggctgccttcgcctcttcaacggcaggttcaagaccaagcgctccaagaggcggccgttggcgacggcccccgcgccggcgcctgccgcctccgctgaggcgcggtccatggcgtccgcggcagccgccagctgcgcctcgttcgcgtcgtcggcgaacgtctcggagacctcggcctccggctcgggctccgcttcgtcggcgcggagcatcccggagctgtacgaggagaggggcgccctgcgggagttcggcctccgggagctccgcgtcgcgacgcgcgacttcagcccactgctcatggtcggcgagggcggcttcgggtgcgtctacaggggtgtcctccggctccccggcagcacgccggtcgccgtcaagaggctcaacctcaacggacgtcagacggaccgaggcccgcagcggctgctggtgtacgagttcatgcccaacaagacgctggacgaccacctgttcaaccgggcgtaccctgtcctcccatgggaagtcaggctgcagatcgcactgggcgcagccgagggattgctgtatctccatgagggactggaacttcagatcatataccgcgatttcaaagcgtcaaacgtactgctggacgaggagttcagacccaagctatcagactttgggttggcaagggaggggccatcagaaggacagactcacgtgtccacagcggtcatgggcaccttcggttacgcagcgccggactacgtccggaccgggcacctcaccaccaagagcgacgtctggagcttcggcgtggtgctgtacgagatcctcaccgcgcggcgctccatcgagcggaaccggcccaagaacgagcagaagctcctggactgggtgcggcggcacccgcccgagagcgaccagctcggccagatcatggacccgaggctccaggggcggtaccctacgcgaggcgccgcggaggtggccaggctcgccaacggctgcctcgcgaagctcggcagcaaccgccccacgatgagggaggtggtcgaggggctgaggcgggcgatgcggcacacggagatggacggctttgtcgtcgtcgccggtgcggcaacggagtaccagggctcgcctcctcgtgcggaggaggaggcgccggggacgccgggcgcagaggatgccagtgccgtggcgatggcagccgaggcgaggaagaggcggatgcttcatcttgctgctctagggaatgccgctgacgctcacgcgaggaggcggctcatgctcatgacggctgccgccgctgctccgacgtgatctcctgccgctgttgatgcccttgacttcattcatctacagtctcaacctatgacctctgaagtatatttgtttaatcgagtttataggcctagttttgaaattttttacatatagttttgaaactttttgcatatcttactctgttgttgtgtggtttagatggttgacatttgatttgtccattgctaggaaaatccacagaa

SEQ ID NO: 2086 - DNA, 6332 bp, Zea Mays
ttccattcgaattagcgatcgcccactacccgcaacctcctaccttaggcagcgccaaaccctaaccttactcgggtacgccaccaatggctgagtcggaggacgccaccgccgccgagcccgggtccgggccgccccacgaggacgaggatgcgctgctcgcccgcgcccacaccgtcatctccaggatcatcgaccgcgagctcgaccccaacccccgcctcctccacaccctcgccaccatgtgcgagctccacgaagccagatatcttgagttacgttcagctgacacaatgttcaatagcacgaacacaaggactgcatttacaattgggaagctggccaatttgctccgggacaatgacgagttttacgagttggtgttttgtaaattcttgtctgacacctcctactctgttgctgtacgagctgccactgctaggttgctcttgagctgtcaccctgcctggacgcctccgtatcctcatgtctttgaagactctatcatagataatattaagaagtgggtaacggaggatcctgaagcgtctaatgaatgcaaatggaagtatctaggaaacaataaacccacagatgctgagatgctgagaacatatgggattggtttgcttgctatggcgttgtgcagcagtgggcaattgatagaggatgtcttgactttgggggtatcagcgaagctcatgcgctatttgcgcataagagtccttggggatgcctcatcttctcagagagatgctaatcatccacaggacaccaagcatccttggggcggagacgacagtaggggtaaatcacgtctgtcccaagatggttctcgattggacggaacaagggttgggtatggaatgttaaccaacccgacagcagagaagaacaacgaaccttgtgttggaatgatgcaagcatatggagcaaggtcattggatgacagttttgcttcattggatgattctgatgtccctgaggctgattggaccaatgatagatcttatagcacacgtgtttgtgacacaaagtcaaaacatggggaaaggaattctgtgacgaggttgcttaaagatgaagaggtcagcgaaaatggtgaactgttgaagagaaagctgaatcgagccccctcccgacttagagtgaagggaaaagcaggtgacagcttgccagaatgtgaaatgacacctttatcgccaacctctggattgagaataggaggtcaggctacaagagacaggaatgtggcgagggttgatgatccaaaggaggcaactgatgtgaacaatagattgtttaacaccatttccaaagaagaatacgaagatcgattcagggattgcattattggcttgaaggatatatctgacatcgttttgaaggcagtgagagccgctgaggctgaggccagatctgcaaatgcacctgatgaagctgtgaaagcagcaggtgacgctgctgccgagcttgtgaaatttgctgctttggaggtttggaaaagcgaaaataacagtgatgcggttgtagtagtggcggagaaagctgcatctgctgttgttgaggctgcattgtcaattagtgtctcacgaagtgcaaatcaagttggtgaagagcgtgcaatggaagaagctgtccaaaccagcgaagaccaggatttggaaaattttgttatcagtgacaaagcacagctattacaacttagagaaaattatagcatccagtgtctacagattttaggagagtatgttgaagctttgggtcctgtactccatgaaaaaggtgttgatgtttgcctcacattattgcaaaggagcatgaaaaaccaggagggatgtgaccactttgctcaactccttgatgtccttaaattggtttgtgcactggctgcccatcgaaaatttgctgcactctttgttgatcgtggtggtattcagaaaatcgtctctatgcctagagttacccagacatatatgggtctttctgcctgcttattcacttttgggtctcttcagtctaccattgaacgtgtttgtgcgctttcctcagacacacttgacagtgttgttgaattagcacttctacttcttgagtgcccacaagatttagctagaaaaaatgtggccatctttttcgctgctgcttttgtgttcaaagctgttctggatctatttgatgcccggaatgggatgcaaaagcttctcgatatcctttgtggatgcgcgtctggaaggtctggtagtaattctggaggagcaggatcctccaatgtaaatcaagggaatgatcggtcgcctgctgaagttttgactgcatcagagaagcaagttgcataccatacatgtgttgctctacggcaatactttagagctcatctccttcagcttgttgattccattcggccaagcaaaagtatccgtagtattgcccggaacacttctagtgcaagagctggctgcaaaccttttgacatcagcaatgaagctatggatgccatcttttgtcagatccaacgggacagaaagttaggccttgctcttgtgagagcttgctggcttgcgttggataaatttgttgcctcaaatggtcacatgactatgctggagttgtgtaagtttcaggcacatggtgatcggtatttgcgtgacttaactcaatatgcaattggagttcttcacatcataacacttatgccacagccacatgtccgcaaatcaatagtgcaggggacattaagcaacaatcgtgctggcatggctgtcttattagacacggtgaaaagtctcgactatattgatcatgagttttgtgagaagactactcaagtaatggtgatctgtccagcactgaatgtcctcgtcaatcttgtatgcccacctccttctatcagcaacaaaccattgtcaagttccaatcagcaacctgcagctgcacaagcgcttgcttcagaaagcagagaaaagaactttgaaaaaactatttcagataggaatctacttacaaacctgggtgaatctcgtgaaagatctggtgatggcaaccctgctgaaaagaacaataccttgcatcaaggaactcctagcacacctgttgtgccatctggagtagtcggtgatcgaagaataatgttaggagttggaggtggtggtcctggtcttgctgctcaattggaacaagggtaccgccaagctcgagaagttgtaagagccaataatggcataaagattcttttgcagcttcttggttctcggatggttacacatcctgtggctatagattctattcgagcccttgcctgccgtgttcttcttggcctggctagagacgatacaattgcacatatactgacaaagctccaggtggggaagaaattatcagaactgatccgtgatatcagtgctcagacatctgggggcgatagtggaagatggcaaactgagctgacccaagtggcaattgaactaattggggtattgacgaattctggaaaagaaacaacactagcggcaactgatgctgctgccccagcattgaggcgcattgagcgagctgggatagctgctgctgctcctatctcttaccattcgagggaactgatgcagttgatacatgaacatctccttgggtctggttttgctgccaccgctgctatgctccagaaggaggctggccttgcacctttaccattgacagcagcggtgcttcctgcccatcaagttgctgccctggaagcatcatctgttcagcaacagtggccctctggacatgttcagggatttctctcagataaaataaacacgtcgacatatcaatctgcccagagatcagatcctaagctgccttcatctaagaaaaaggcactggccttctcatccagtttctcacgaagagctcggtctccgcatccaagcaacatccttaaaagtcctgtacctattgcggctgatactggagatgcagaaatgttgaataaagcaccactgtcgctgccacttaagcggaactttgtggatgtgaaggatattagttttgcatcagcatcgaagcgccttgcaataactgatcaaatataccaatcctctgcattccaaactcctgctcctactcgcaaaggtctgtcggtatcagttgattctcctacttcatctcattgcggttggacaaacttcaacaatgcttttactgaaaacttggacaattctcaaggcacaccaggagcattgaccaccacagcacttcctggtgtaaatgaccaacaatcaggaaatttggagcgtatgacacttgactcactggttgtacaatacctgaaacatcaacaccgccaatgtcctgccccagttacaactttgccaccactttctcttttgcaccctcatgtttgccctgagcctagtcgcagccttagtgcaccggcaaacatagctgctcgagtgggaagccgtgagataagtaggcaatttagtgggatccagatacctcgtagggatcgtcattttatatacagtaggttcaagcagtgtcgtgtttgccgtgatgaggcatcactattgacttgcttgacatttcttggagatgcagctcgagttgtggctggtaaccacacaggtgaattaaggatatttgactgcaacacggcaaatctccttgagactcaaacgtgccaccaacatcttgttacaatgatggaatcgacatacactggtggaattgagatgattctcacatccagcctaaatgaggttaagatctgggatgccttctcggtatctgcagggcctttgcacacatttgacgactgcaaatctgctaggtttaaccactatggaacttcatttgctgccctttctactgatacagctcaacgggaggttcagttgtatgatgtacagacgtatactcttgctacacggcttcctgataacactagcagttcaggttcaggccgtggttatgtacaacccattatacatttcagtccttcagatacaatgttgctttggaatggagtcctgtgggatacaaggcaaccaaatcctgttcatcagtttgaccagttcacagattactgtggtggtggattccatccagcaggaaatgaggtgatcctgaattcggaggtgtgggatctgaggaagttcaagcttttgaggagtgtcccttccctggaccagacagtaataaagtttaacggaactggtgatgttatctatgccaccctgaggcgtaatcttgatgacgtgacatcatgcatcaatgctcgtagggtcaggcatcctcttttccctgcattcagcacgattgatgcggtgacttactcggatattgcaaccgtccaaatggaccgctgtgtacttgatcttgccactgagtccaatgattctcttattggggtggttgctatggacgatcaccaggagcttttctcttctgctcgcttgttcgaagttggcaggaagcgaataactgatgatgattccgatccagaggacgcaggtgaaactgatgatgactccgatgacgacgacgacgactccgatgacggtgttcttgcgccggtgctggaagggggtacagattctgaagatatcagtagcagcagcagcgatgacggtgatgaagatggtggtgacgatgatatacccagttcggatggcattgaagatgaccggttcattgatgagagacgacgggagttcatgatggatctttttggtgacggttgggacgacgatgaggcttatatgatgggatcctttagcagtggcgacgaggagggttggatcatatgttcgtggcgtgggcgtggcagaagctgacgccgcaggccgcgcaccagctgctggaacaaattattaaaggatacaccggaaaaaagcacaaaggcctgaagaacgtaccgaaatagataaacacctcatttttcaaaaggactcttccacccctggtaaattttcgagtacactctcccacctcgactaacgtacgtgtgttggtttgcggtttgcacgttcattgtaaaatagcaagcaagatcacaagaggtcaaaaccagacaagaccgttcttttaggacgtatgcaatgcaatacaatagtagtgacgagcgcgagaagatagattaatgaagaatatagctagggcaaagagattcggtccctagtaccgtcgtcaaaaagtatatatgttgcaggaaagtttcagtctatagtagtctacacctggccaaatgagcccggccggtctagcttgtttcgagcagctcccaacaatactcggtcgacatgatcaaatttctctctataaaaaacagtgtagtttcgtatatc

SEQ ID NO: 2087 - DNA, 1802 bp, Zea Mays
aaagcagcagctgctcttctcttctgctagcagctttatttgcctgcctccctaccggcgagggtatcgatctgtactctctatcctttctttgcatgcatgtgcagattgcagtgtcttctttcttgctatagcttcctccgatccctgaccctgatcctgatgactcactacaaggaggtacgtgcgccgatcgagaagcagcagcagcaattaataactaaacatggatcaggcggcggaggagtcttgtgttcccccaggcttcaggttccaccctacggaggaagaactggtgggctactaccttgccaggaaggtggcctcccagaggatcgacctcgacatcatccaggaggtggatctctacaggatagagccatgggatctgcaagagcggtgcaagccgcagcacgccggcggtgggcacgacgagcagacacaggagtggtacttcttcagctacaaggaccgcaagtaccccagcgggacgaggacgaaccgcgccacggcggccggcttctggaaggccaccggcagggacaaaccggtgctgtcgtcgtccaccaggaccaccaggtgtagcagggtcatcggcatgaggaagacgctggtgttctacaagggcagggcacccaacggcaggaagagcgactggatcatgcacgagtaccgactccaatccaacgagcacgcaccggcgcaggcaagttcattcatcttgccttgcgtatatattatcaattcccatcggatagctagatggctagctgtggacttttgttttcgatcggtcgaccaaaacaaaagcaacaaaacaaaagagcaactttttgacacttttacatacactgctggtgctgttgttgcctgcaatggatatgacgtttgctcctcggatctatcaggaggaaggctgggtggtgtgccgcgctttccagaagcctatccccaaccagcggcccttcttccccaccagctacgccggctactacgaccacaacctctcaacgacggcacggctgcacgtagacggcgaccgccatttcctggcgggctcatcagcagcagcagcagcactgctacagcagccaccagggcttgcaggcagcagcttcccgcagctgtactccgacgacgacttggagtccaagaagcagctgttgagtatcccgccgctggagagccccactgccatggcctgctgttccgacgccggcggctacgcgcagagaagcagctacgatgaacatgagatgatgatgatgatgatccagcagggaggaggaggaggagagcaagctgcagccgccatcgactggaactttctggacagcctgctgtccgcgacgtcgcaactccatgggccctcgggatccttgttgcagtgacctccggccatcgtcgatcgatccatctttctttgatccagcggagaacattattcattcatcggcattatacaatatatttattagttgcatacacacacagagtatacgtatatgctaataattcagatgtgttcatacacacttccattgtcatgtgtagttcgttgcgacttacattacagactgccttagatgattcaggtatactgtatacaacatgatgcacagtatagtaggagtaagtgcaccagtctcagcagctggtagctagctagctatgtaaaattcctccttaattacagctatgtaacatatatatacagttattattacttactgatatgatctatctatctatctgctgggcgcttcaatttagtttcagactgctgaagccttcagtttttg

SEQ ID NO: 2088 - DNA, 846 bp, Zea Mays
taaacagctagcaagagatctgtgcaccagtgaacgaagaatcctgtatcgcacacaatatattggatatgactcagcatgtttccatgatttcaattacactgtcccccagagagctggacaagcacactcccgggtaccaagctccagtgtatgttgaacaaccaaggcaacagcaggtgccaccaccacatcgccaaccacgcagaccaccagcacaattccagcagctggagtatgaagattcttatgcacggggtcgaggaagaggcgtgggcgtggaaggggctggggtagaggtggctacggtggctatggtggatatggaaacaaccaaggtggctatcatcagggtggtgggtattatgacaatcaaggtggagataatggctatgataatcaagacagatatagtggctatgataatcaaagtgggtatggtggtggatatggctataaccaaggcagatatgggaactatcaaggcaatgacacatcttgataagttgatccagaaaatggtggatataaccgagacacaggaagtggtatgcgaggaagaggcaattggggttaccgaggaggggtgaaccaagcacaaaaacatcagctcatgctcatgtggtattttaagccctgcctctatatggacgccggcctcgcttccgcggtcaccgcgcttcggacctgcaccgatgtcgcgcacgtgctcgagcagtttcgcctcgcctggtgcagcaagctcgcccgggacgcccgcaccgtcgttccgttaaggacctctgcttcgacctattcatcattaggggtggaaacagagctttcaatgcatgctggaggtgcgcg

SEQ ID NO: 2089 - DNA, 2644 bp, Zea Mays
ccaatacccgcctccccatccgcgcttgactacgtccgccctagcgctcctccatcccatcgtctccccggaaaccttgtcgtcaccctctcccgcgaactccgtgtcgatagttccgctcttcggctcgggcgctcggtcgttccgttccccattcttctcgtacgcggccgattgtgaccctcgccctcgcctccccacaccacctaaaatgccctgcctccgcgcccgctcgtcatccccgcgccgcctcgtggacgccccggtcggcgatgtggcgggagcatgcggcccgctcctcaggctcctctcggcgtgcggcggggtctggcccacctcgccggtccccggcgccgcggcctcctcctccaccttctctagggacgactcagaaggcagtgacggcctcctccggggatgactcggaatcgaggccggcccgtgctcgtgaatcctccgtcgggcgcggcgccatcggcgttcctctgctgtgtgatccctaaaaccccgcggtgctctagcgaccccgcgatatgggacgacgacgacgacgggaggcgtttcggccgtgcttcgtggatttatatccttgatttttgtttttgatctcaagtgggttgctgttccagttgcagttctgtggtttgctgttctccagtgtgggttgccgttggtgtggttctgacttctgaggtctccttaaaacttgtacggtgcagggattagctgggaatacgatcgtcgcagttgctgcactcgggctcttcctcgccaagaggaacataaacacacctcaggcgtccaagtagtgatgttctgcctcccgacgctcccctcccgggatctcggtcgcgctttcgtcgccgccatcatcggctccgctccctcccgggatctcggtcgcgctttcattgccgccacgcccatgcccctccattatctgtgttgtgcccttccattctccgcacagtacccctccatcgtcgtcccctcgcccccatccgtcgtctccctcgctccgctcggacaatcgtcgccttccccaatgccatcgagacaatcgccgccttccccctcgctgccccccgcgatttgaaccaccactcaaaggcgagggcgaggggcaccaaacaccaacccgagtcccgagcacgagcgcccaaccaaatggcgccgcacaccactgctggaggcgagggcggggccggggccgaggatgaggtgtccgaggcggcgactgcatcccccgcgctgcggcaccgccacgcgggcaagggcgagggcgaggggctgggcggcaatggcgtcgctgggggcgacgaccaggcgtatgtggagcgggtgttcgcggacaaggcggtgccgtcgtggcaggagcagctcacgctgcgggcattcgtcgtcagcgcgctgctggccgtcatgttcagcgtcatagtcatgaagctcaaccttaccacggggatcatcccctccctcaatgtctccgctgggctgctcggcttcttcttcgtccgcatgtggaccgccgccgccgagaggatgggcttcctccgccagcccttcaccaggcaggcctaactgtatatcatcactgacttgagagataatggcttatgagatactactctgaaagtctgaattttagatttctccaagccacatctcattatcatacatcactaaattaacgatagtgactgatttgaaatgggtgtcctgtcaatttaagcatgcacgtcctactatgctatcctactaatagtaggccctcataaatctaagttgtgtgatggtatataggtcactgctccctgcttctagatgaagggcgcctcatctcatctcattattagtgatgactgatgatgaaggaagggtcctttcatttcggttcatgggaccatgcatctgatttgggcaagaaaaaaatgtgtctgtgacaactgaaccatttctctgaagacagctgattcatgccttgcataaacactacacgtcacatgtggtgcaaaaagtcaaatctcctgccatgtgtgcaaggtttaggtggtactgatgcagacatgcctagctatgtactaactcacctctcaagttattgacactatcttaattcagtagcacaggtctgttactgttaactgcataattataatggcgtgtgcagaggtttaatgtggcctctcattgccaagaagaaggggagttggtactgtttgcatctggcttattctggtggtatcctctcatggggtttaatgtggcctctcattgccaagaagaaggggagttggtacccagctaacctggaagactcaagtttacatgggttgcaggcttacagggttttcatttccatcgctttgatccttggagacggtttatacaacttcattaaggatggccagttgagcgatggcttatgccttccttgtggttagtccacctgacatgagtcaatgctttgaggagatggctgctgctaaatctaataaaacttcatccaaacctggattgaattatcctggcctggaagaacagacccttcagtttatcttggactgctgtgaatctaatatagaaaatatacaaagtacttagagggtggcgctggctctccagaagtttcaatgaatgcaaa

SEQ ID NO: 2090 - DNA, 272 bp, Zea Mays
atgggtggcgaggagcggaccccggatccaaagccccggtggaaccccaggccggagcagatccagattctggaggccatcttcaactacggcttctgcggcggtgccccttgctgcgtcaccgggaaccgctgcgagcgtggagaccgctgggctcacagctttgcatgcaaattctttcgagcatccggtggaggcttaaaagtgcagtgctctctatggcctccggcgcaaatgcagtggaatcatgcgacacaaggtcaatcgtgtga

SEQ ID NO: 2091 - DNA, 720 bp, Zea Mays
catcaccaccccctaaaaaggcttcaccccctaggtcaagctacattccgtgctattcaaaggccccaaggatgacgcaatggcaatgactatctaccaatggacatcgtggagctatcttccgatcatttgatagagaataaacctttgctgctaaaggatgtcaagttctaaaacgtacacgggcttaccagtgcttatggacctttgtttgttcgggacactacctttgctaatggggaacaggcaaggggaaaatcttcttatagatctgttccgtcactgtgacaatcatttgggagagaaacaaaaaactccatctggaagtgcacgacagccactacagttgactaacgatgtaaccaagatgatgcaaaagcatcagctagaaacgccacagttccatcagacccgattttccgttttacagaatgtaccgaggagcacagagaaatgtcatttccatccttaagacaaacaagaactacaggctgcttccgtcttcacccaatcagggatgaggatgccaagttcaagctctgcaacaggaggtctgttcagtttgacgtcggcaacatggtcatggtgaccggcgggaggaacactgggcgtgtaggagtgatcaagaactgggagaagcacaagggcatcttcgaggaaaacatagaatggaattcaaatttggtggtcgtaaaagtgtggagacttgaattcaaataa

SEQ ID NO: 2092 - DNA, 871 bp, Zea Mays
cccgcggtacgtgccctccttctcgcgctcctaaacaatcgcccgacatcctccccttccattctaggctccgtgtctcgctgtccccactacgtctcctccggctccatctcatcccgctgccgctccttctcatcgtcgtcgtcccagtcccggagtcgctcccctcctctggctaagcgcaggtcaagctacattccgtgctattcaaaggccccaaggatgacgcaatggcaatgactatctaccaatggacatcgtggagctatcttccgatcatttgatagagaataaacctttgctgctaaaggatgtcaagttctaaaacgtacacgggcttaccagtgcttatggacctttgtttgttcgggacactacctttgctaatggggaacaggcaaggggaaaatcttcttatagatctgttccgtcactgtgacaatcatttgggagagaaacaaaaaactccatctggaagtgcacgacagccactacagttgactaacgatgtaaccaagatgatgcaaaagcatcagctagaaacgccacagttccatcagacccgattttccgttttacagaatgtaccgaggagcacagagaaatgtcatttccatccttaagacaaacaagaactacaggctgcttccgtcttcacccaatcagggatgaggatgccaagttcaagctctgcaacaggaggtctgttcagtttgacgtcggcaacatggtcatggtgaccggcgggaggaacactgggcgtgtaggagtgatcaagaactgggagaagcacaagggcatcttcgaggaaaacatagaatggaattcaaatttggtggtcgtaaaagtgtggagacttgaattcaaataa

SEQ ID NO: 2093 - DNA, 1179 bp, Zea Mays
cccgcggtacgtgccctccttctcgcgctcctaaacaatcgcccgacatcctccccttccattctaggctccgtgtctcgctgtccccactacgtctcctccggctccatctcatcccgctgccgctccttctcatcgtcgtcgtcccagtcccggagtcgctcccctcctctggctaagcgcaggtcaagctacattccgtgctattcaaaggccccaaggatgacggtaagatttgcaactccctgtctgtctgggtctgtgagctaacggacttgtgccaaattgttagtttatatgttcaaagtagatagaagtactactttcctatgagttagtttcagcaacaaggatgtggaagtaaaccaactgctgctctaacggttacatgcagaattgcagaccatgagttcaaccccatcttttcacatggcactcatcagactctttatggaatagttaacattagtgttattaagaacaaaagttagattcataattaagtgagtctataattttgatgtccatataaaggagcactcatgtactagcgttgaatagatatttagctgaaatgcatatttatgtaataaatgtcagcaatggcaatgactatctaccaatggacatcgtggagctatcttccgatcatttgatagagaataaacctttgctgctaaaggatgtcaagttctaaaacgtacacgggcttaccagtgcttatggacctttgtttgttcgggacactacctttgctaatggggaacagaaaactccatctggaagtgcacgacagccactacagttgactaacgatgtaaccaagatgatgcaaaagcatcagctagaaacgccacagttccatcagacccgattttccgttttacagaatgtaccgaggagcacagagaaatgtcatttccatccttaagacaaacaagaactacaggctgcttccgtcttcacccaatcagggatgaggatgccaagttcaagctctgcaacaggaggtctgttcagtttgacgtcggcaacatggtcatggtgaccggcgggaggaacactgggcgtgtaggagtgatcaagaactgggagaagcacaagggcatcttcgaggaaaacatagaatggaattcaaatttggtggtcgtaaaagtgtggagacttgaattcaaataa

SEQ ID NO: 2094 - DNA, 1797 bp, Zea Mays
cccgcggtacgtgccctccttctcgcgctcctaaacaatcgcccgacatcctccccttccattctaggctccgtgtctcgctgtccccactacgtctcctccggctccatctcatcccgctgccgctccttctcatcgtcgtcgtcccagtcccggagtcgctcccctcctctggctaagcgcaggtcaagctacattccgtgctattcaaaggccccaaggatgacgcaatggcaatgactatctaccaatggacatcgtggagctatcttccgatcatttgatagagaataaacctttgctgctaaaggatgtcaagttctaaaacgtacacgggcttaccagtgcttatggacctttgtttgttcgggacactacctttgctaatggggaacaggtaagcggtaggctatatatcttgtttctcttttgaaataatgcaaaatactcttacatctttacataagctttaatgttgattgttgcagatttttttggtccagggttaattatattttattttgttaatataattagaaatgatcacaataagggagctacatttgagttatttgagttgtagggtgcgttcaggagactatagggtcgtgggtgtaagatatggtttagagaatgtgtctactggaacatcctttgtaccaattccctgtatacatctatctatcgttaaaacaccttctattggaacatattttcactatacatacacttatgagtaaggtatttagctcaaatttatctatacaatatccttttgtattcctaaatagcctgccgaaagaagaagatagccacaattatgcatgaaagctccgtttctacgattgtataccgtcacaacgtacgggtattggactagtttgtatagaaaagagagaagggaaaatctgaattttcttgcctctacatgtccatctccaacaaagcaacaactacaacccaaaaataatgtattatatatatatatttaaaactgctacttttagctacctctacagatctgctaaaaatgcttgaatgaaggcattattagtctataattttttagatagccaacatctgctaaatcctatgtattcgacattgtgtgtcctaatctccccttataaaaaataactgcatgactgcattctcaatgtaacactttttttttacagataaatttcaattactatacttatagaaaataaacaaggtccaacgttgtttgctttccatttcccttctactttgatattatgtgatttggtttattcatattactgtccatagcatatttgttgtggacacagttataaattcgttttctcgacactgcacaggcaaggggaaaatcttcttatagatctgttccgtcactgtgacaatcatttgggagagaaacaaaaaactccatctggaagtgcacgacagccactacagttgactaacgatgtaaccaagatgatgcaaaagcatcagctagaaacgccacagttccatcagacccgattttccgttttacagaatatgtcatttccatccttaagacaaacaagaactacaggctgcttccgtcttcacccaatcagggatgaggatgccaagttcaagctctgcaacaggaggtctgttcagtttgacgtcggcaacatggtcatggtgaccggcgggaggaacactgggcgtgtaggagtgatcaagaactgggagaagcacaagggcatcttcgaggaaaacatagaatggaattcaaatttggtggtcgtaaaagtgtggagacttgaattcaaataa

SEQ ID NO: 2095 - DNA, 2512 bp, Zea Mays
cgccacctcgtcctcctcgccccgcccccctctcgtctcgcccccattgcacggcgcgggtggcagcgatcgcgcgcgggggaggcccctagacctagctcgggaggggcgccgacccaatgcagggacatgcgtacagccgcctgggtagcttcggcgccgcggcgttcccgccgccgccgccttcatccccggggccggctggggccggcgctggcgggggcagctggacgcccgcgaaggcgggttcggcgaggcgtggcggcggtgtagcgcggagggtggccagggcggtgctcgcgacactgctgcggcggcaggcggtgttcctcttcgcgccgctgctatacgtcgccgcgatgctgctatacatgggatcgctcccgctcgacgccgtgccgcggataatcgcgcgccaaccgctcgggtcggtgtaccgcagcccgcaactgtacaggcggctccgcgccgacatggacgccgacaactccaccggcgcgctagcaactgtatggaggcacacttacataggtggcacatggaggccctgcataaacaacatgacaaatggtttacctgaatcaaatggctacatatacgttgaggcaaatggcggtttaaatcaacaaaggacatcgatatgcaatgcagtcgccattgctggttttctgaatgctactcttatcattccaaattttcatttccatagcatttggagggatcctagcaaattcagtgatatctatgataaagatcactttgtacaacgtctacaaaatgatgttcgagtagttgacaaaattccagattttataatggagcagtttggtcataatctgagcaatgtgttcaatttcaagataaaggcttgggcacgcattcgatattacaacgatgttgttcttccaaaattagttgaagaaagattcatcaggatttctccttttgccaatcgactctcatttgatgcaccttttgctgttcaacggttgagatgcctggcaaactttgaagccttaaaattttctaaaccaattgtatctttgtctgaaaccttaatttctcgaatgagagagagaagtgttgaaagtgatggaaaatatatctcagtgcatcttcgttttgaggaggatatgattgccttctcatgttgtgtatatgatggtggtgatgaggagaagaaggaaatggatgcagccagagaaataggttggagagggaaatttactaagagaggacgtgtaataaggccaggaattattagaatgaatggaaaatgtcctcttacacctttggaggtatgtcaggatctaaaagcagaaggttgggttaatgcttcgtggaatgggtttcagcaataagactgcaatctttttggcatctggaaagatttacaaagcagagaagaacatggcttctcttcttgaaatgtttcctctcctacagacaaaagagacactggcatcagaagaggaacttgctccatttaagaatttctcctcaaggatggctgctgttgactatagtatttgtgcccaaagtgaagtttttgtgaccacacaaggtggaaatttcccgcattttcttatgggtcacaggagatacttgtatggtgggcattcaaaaacaattaaaccagacaaaagaaggcttgctgtactcttggataatccacgtatagggtggaaggcattgaagcggcacttgcttaatatgagagcacacagtgatgccaaggggatcgaaatgaaaagaccaaacgaatctatatataccttcccgtgtcctgactgcatgtgccgcttgaacagaacagaacactcgaaatccaaacagagtagatagtatctcgtagttgcatttccagactaaccctattctttctgacatccagtttagtttgttcattcttcatatgccgtgcggcttttcatcacttcatctgccagcatacttgccagttctcacagcattgaaagcaatctgttctcccaatgtagcggtttttcccttgtattattgtatagcatatgctgctagaatggaaactccagattcctccgtggagtattagaccaatttgtgatgctaagttgctaactacatcaactgactataatcctcaacaacggatctgactccagtaggatactatccattgtcaatgaagtatcaaatggttttgggtggtattactgttgtacatggttcattagcagactgtcatcatgtacaaattttgaatggaagtcagccattgtaaaaaaaaatctcctcttgcccaaaaatgggcattgtttacaatagcctccctgtattcttttagctaggttgtctgttcacaattctaagaatgaaagctgcccagtagaacatgattcttgcttcatcagtatagaggcattgtatctgcttatttgcaatgatgtgtccaaaagctgcttgttgtagataaaaatgtgatgaaccaaaaccgttgaacgcagaatacagatatataagcaagtatctt

SEQ ID NO: 2096 - DNA, 4362 bp, Zea Mays
aaaaccgggaaaacacccgtcgcccgcccctcatccctccgtcgccgcgccgccgtcccatcgacgccacctgccgctgccgccgtccagcacacctcctccgcctcacgcgttcctgcagaaagcctctcctagaccacggcccaaggcccttcatatccacgcggcacccgagcagcagaaccctagataaaccctctcgggggctaagcaccggcggcggcgatggtgatggtccctcccggcgagtgggtcccccacgtcgaggcctacgtcgacgtctcccgccccgccgtgcagcattctgctagcgtggatgcacttgctgccctggtgaacaaagacaagttgaccctttttgatttggtgtccaagatggatctttatttgacgacaacagaccacattgtcagatcaagaggaatactgcttcttggggaaacattgtctcgaatttcatttaaatatttagatgttattaccattacaacattgtcagacttctttatatcaagattgtcagattggcaagcaatacgaggagcccttgttggttgcctggctttattgcacaggaaacatggtgttggttgtattgtgattgctgatgtcaaaagactagttgagtctttcttacagaatgttccagtgcagtcacttgcagctgctgaccgcaagctgtgctttgaaattctgagctgcatattggatcggtacccggaagctgtaaaacaaatggatggtgaacagctgtatgggatctgtgaagcaattgatgaagaaaaggatccagagtgcttgatgctttcttttcatgtagtggaagttgtcatgaagctgtttccagatccatctggtttggcagcacagtttgcaggggacgtttttgagattctgagcaagtattttcctgtctacttcacacacggagtgggtaatggtttggacactacacgggaagacctctctagagcattgatgcacgctttttgttcaacccaatattttgagccttttgtcatccctttgcttcttgacaaactttcttcctctcttccattggcaaagattgattccttaaaatatttggacaaatgcattcgcttctatggagctgatagaatggttagacatgcatcagctgtttggtacaagttgaaagaagtgatttttaacctttcttcagatcaattattaatatcagaggctctgaattgtttgaagactgctattatgtatactgattcttctgataaagatcttttcattaatttgatcttgttggatgaggatattgtgaacaagatccactctgtatcaagcgtggaaaagaccatattgagttcattagaggacctggcccaactgcatgcacttggaagtgttatttctatccttgctgaatcgtctacatatttctgtactagagttcttcaagagcactttgcacacttggtagatattgtgggaaccaaagctgactatgaatcctggcagttgaataattgtaatggatcatcttctgctcctgtcaactatggagcactctatttatctgttcaattgctttcatcctgtagagaagtggctttggtatcttatgaagatttttcttctgttaaattagcaaagggttcctggtggcttatcttgcagaaaaagctggagcagttaatccatctccttcgatccatttttgctatagcttctcaatctatgcagccaaatttcagacaagaatatgtctcttgtgctgtgaagggcttgctaacactagcaacattcccggaacaatgctcgcctctgccagcaaatgcttatgaggatattctgcttatgttcacgtcaataattataaataagtttgaaaatttagatctgtggagattgtcattgaaagcattggctagcattggttcatctattgccaagttccatgcttctgaaagggaagtagtttactacagaacggttgttgacaagattgtttctttggctgaatcttatgatacttcaatgcctctcggtctaagacttgaagcaagttatgaagttggaactgctgggttgaactatatgttaagagttgcgaaatcacttgaagtcgctgttgtcaccaatatttctgaatctgaggctaatggaagaatggaatgtgctgaccatgtggcccatttatttgagtgttactctaaccgggtccttccatggttattagcttctggtggtgtcaatgaacttgcattgagctttgcactgcatctattggatgagactgaggatttgactgtgttagatagaatcagctcacagggcctccttgactcactaatgactgggatgaagcttttagttggagtatgtacagaggagcaacaatcacttattgttcagaaagcacatagcacaatatcttcaatgctctcactcccaatggaattgatgacagaccgtcttttgcctgtagatgagttagttcctttacattctgtttcagaaacagctctcatcagcatgttttcgtcgattataataggccttcggcctcaaacacctgtaccagatatgatggtgatgattaaactctttactgtcttcctactaaatgggaaaatgccagctgcttatgcattagcttctattttcaataaatatctacataatccagagttttctcatgagaatcagatggataaaatacttgatgatattcttgagaggtgtttctcaactgtattagccaacagctgctcaaagacatctcaatcttgtgctggcacttcagatgttaatttctcagatgtttcgtctagaaacaagctttctaagattaatatcttgtctagcttggcttggattggcaaaggattacttatgagaggagacgagaaagtgaaggacatttcaatgtttcttcttaagatcctattctcagatgagattttgtctacagttccatcccaccaggaagaaccttatggcggtgattcatcagatacttctcttgcaatatctgcagctagtgcattccatgtgatgatgagtgattcagaaatgtgtctaaataaaaaatttcatgcaagaataaaaccattatacaagcagcgtttcttctcaataatgatgccgatcttcctctccaaaattaaagaaacaactgtggtcacgacaaaattggcactataccgagcttttgggcatatcatttccaatgctccagtaccagcagttataactgaagcacaccagattttactcgtgatggttgatagcttagctaaattaagtatggatgttggggataaggatctggtgtacagtttgttacttgtcttctctggaatgttgatggatgaaaaaggcaaagagtgcattctggacaacatccaaatcacaatcagcgttcttactgaacttgtttcctatcctcacatgatggttgtgcgggagacagcattacaatgtttagtagccttttcgacgtttcctcactcaaagatttatcctgtgcggcgaaaggttgtgcaggcagcagtcagggctctcgacgataagaaacgggctgttcgtcgagtggctgtccgatgccggcacacatggcagtccttcacttaaggggagtctctttcggtggtgtcaggtagtcgggggaggcaagcacaaaaaactggtcttactgggcgatcctgttgggagtcgatgagtgtacatggatctagagctgtcattgtaaggtgagagatactgggagcggggtctgctgacgagtttatgttcgagacctggtctttggatcagctgctgccaagttccagatgttcgaagttctccgaagagccatggggccatggggaggaatgtccctggaaattggccctcagtctgggatcgcttgggagttgggaatgtaacctaaagtcccagtattcttggcctcccgatgttggagaattcaagcatgctggcatgcgtgcgtttgtgccaacagtttttagtttgctttcatgtttcaaccaggctctgccgctcagaacgtgtcgagtatactttccagttggccagatcgtgtcaggttgtgcagtacgtagaaatttgtcatcccatacagatttgtggccttcctggactgcgcagtactgctacgctggaaaacgctgcgatagccgtgccccgcggaatccacatctctcggtcgattgtgtaatgcgaagtatgcaacagagttaggtggcatttcttcatgacaattattctcgcctcttgtgtcgaagagtgggtttgaaaaagaaaagaatagagatagatggtgtttggtcgcgctgacctcgacaagcccatagcgcgtgagcagggatggaaacg

SEQ ID NO: 2097 - DNA, 4436 bp, Zea Mays
aaaaccgggaaaacacccgtcgcccgcccctcatccctccgtcgccgcgccgccgtcccatcgacgccacctgccgctgccgccgtccagcacacctcctccgcctcacgcgttcctgcagaaagcctctcctagaccacggcccaaggcccttcatatccacgcggcacccgagcagcagaaccctagataaaccctctcgggggctaagcaccggcggcggcgatggtgatggtccctcccggcgagtgggtcccccacgtcgaggcctacgtcgacgtctcccgccccgccgtgcagcattctgctagcgtggatgcacttgctgccctggtgaacaaagacaagttgaccctttttgatttggtgtccaagatggatctttatttgacgacaacagaccacattgtcagatcaagaggaatactgcttcttggggaaacattgtctcgaatttcatttaaatatttagatgttattaccattacaacattgtcagacttctttatatcaagattgtcagattggcaagcaatacgaggagcccttgttggttgcctggctttattgcacaggaaacatggtgttggttgtattgtgattgctgatgtcaaaagactagttgagtctttcttacagaatgttccagtgcagtcacttgcagctgctgaccgcaagctgtgctttgaaattctgagctgcatattggatcggtacccggaagctgtaaaacaaatggatggtgaacagctgtatgggatctgtgaagcaattgatgaagaaaaggatccagagtgcttgatgctttcttttcatgtagtggaagttgtcatgaagctgtttccagatccatctggtttggcagcacagtttgcaggggacgtttttgagattctgagcaagtattttcctgtctacttcacacacggagtgggtaatggtttggacactacacgggaagacctctctagagcattgatgcacgctttttgttcaacccaatattttgagccttttgtcatccctttgcttcttgacaaactttcttcctctcttccattggcaaagattgattccttaaaatatttggacaaatgcattcgcttctatggagctgatagaatggttagacatgcatcagctgtttggtacaagttgaaagaagtgatttttaacctttcttcagatcaattattaatatcagaggctctgaattgtttgaagactgctattatgtatactgattcttctgataaagatcttttcattaatttgatcttgttggatgaggatattgtgaacaagatccactctgtatcaagcgtggaaaagaccatattgagttcattagaggacctggcccaactgcatgcacttggaagtgttatttctatccttgctgaatcgtctacatatttctgtactagagttcttcaagagcactttgcacacttggtagatattgtgggaaccaaagctgactatgaatcctggcagttgaataattgtaatggatcatcttctgctcctgtcaactatggagcactctatttatctgttcaattgctttcatcctgtagagaagtggctttggtatcttatgaagatttttcttctgttaaattagcaaagggttcctggtggcttatcttgcagaaaaagctggagcagttaatccatctccttcgatccatttttgctatagcttctcaatctatgcagccaaatttcagacaagaatatgtctcttgtgctgtgaagggcttgctaacactagcaacattcccggaacaatgctcgcctctgccagcaaatgcttatgaggatattctgcttatgttcacgtcaataattataaataagtttgaaaatttagatctgtggagattgtcattgaaagcattggctagcattggttcatctattgccaagttccatgcttctgaaagggaagtagtttactacagaacggttgttgacaagattgtttctttggctgaatcttatgatacttcaatgcctctcggtctaagacttgaagcaagttatgaagttggaactgctgggttgaactatatgttaagagttgcgaaatcacttgaagtcgctgttgtcaccaatatttctgaatctgaggctaatggaagaatggaatgtgctgaccatgtggcccatttatttgagtgttactctaaccgggtccttccatggttattagcttctggtggtgtcaatgaacttgcattgagctttgcactgcatctattggatgagactgaggatttgactgtgttagatagaatcagctcacagggcctccttgactcactaatgactgggatgaagcttttagttggagtatgtacagaggagcaacaatcacttattgttcagaaagcacatagcacaatatcttcaatgctctcactcccaatggaattgatgacagaccgtcttttgcctgtagatgagttagttcctttacattctgtttcagaaacagctctcatcagcatgttttcgtcgattataataggccttcggcctcaaacacctgtaccagatatgatggtgatgattaaactctttactgtcttcctactaaatgggaaaatgccagctgcttatgcattagcttctattttcaataaatatctacataatccagagttttctcatgagaatcagatggataaaatacttgatgatattcttgagaggtgtttctcaactgtattagccaacagctgctcaaagacatctcaatcttgtgctggcacttcagatgttaatttctcagatgtttcgtctagaaacaagctttctaagattaatatcttgtctagcttggcttggattggcaaaggattacttatgagaggagacgagaaagtgaaggacatttcaatgtttcttcttaagatcctattctcagatgagattttgtctacagttccatcccaccaggaagaaccttatggcggtgattcatcagatacttctcttgcaatatctgcagctagtgcattccatgtgatgatgagtgattcagaaatgtgtctaaataaaaaatttcatgcaagaataaaaccattatacaagcagcgtttcttctcaataatgatgccgatcttcctctccaaaattaaagaaacaactgtggtcacgacaaaattggcactataccgagcttttgggcatatcatttccaatgctccagtaccagcagttataactgaagcacaccagattttactcgtgatggttgatagcttagctaaattaagtatggatgttggggataaggatctggtgtacagtttgttacttgtcttctctggaatgttgatggatgaaaaaggcaaagagtgcattctggacaacatccaaatcacaatcagcgttcttactgaacttgtttcctatcctcacatgatggttgtgcgggagacagcattacaatgtttagtagccttttcgacgtttcctcactcaaagatttatcctgtgcggcgaaaggcagcagtcagggctctcgacgataagaaacgggctgttcgtcgagtggctgtccgatgccggcacacatggcagtccttcacttaaggggagtctctttcggtggtgtcaggtagtcgggggaggcaagcacaaaaaactggtcttactgggcgatcctgttgggagtcgatgagtgtacatggatctagagctgtcattgtaaggtgagagatactgggagcggggtctgctgacgagtttatgttcgagacctggtctttggatcagctgctgccaagttccagatgttcgaagttctccgaagagccatggggccatggggaggaatgtccctggaaattggccctcagtctgggttgccagctcttgtgcccttttcttttccttgatcctggacattgccttgtgtgtctgatacagatcagaaaactgatgcaggatcgcttgggagttgggaatgtaacctaaagtcccagtattcttggcctcccgatgttggagaattcaagcatgctggcatgcgtgcgtttgtgccaacagtttttagtttgctttcatgtttcaaccaggctctgccgctcagaacgtgtcgagtatactttccagttggccagatcgtgtcaggttgtgcagtacgtagaaatttgtcatcccatacagatttgtggccttcctggactgcgcagtactgctacgctggaaaacgctgcgatagccgtgccccgcggaatccacatctctcggtcgattgtgtaatgcgaagtatgcaacagagttaggtggcatttcttcatgacaattattctcgcctcttgtgtcgaagagtgggtttgaaaaagaaaagaatagagatagatggtgtttggtcgcgctgacctcgacaagcccatagcgcgtgagcagggatggaaacg

SEQ ID NO: 2098 - DNA, 1507 bp, Zea Mays
atggacgcgcacgcgatggactgcaccatcgtcggcgcagccgcaccccttgcccctactggtgcagccgcgcgcccagctacgcccttgcccgccaacctctcctcgcccagcgctgccaccgccggcggccttgtcccctccgggcttggcctaccgggctacccggcgtcccttgacgcccttaccggccttctatcactgacccacttccccaggaagcctcctccagggttctccaccacccgtccactcgttgtcgacgccacctggacttccgtggtgccccaatcttatcggacggttggcgcaagcacagcttggctcgattccgttcacaactccatatttctcttgtttagaaacgactccgtcgccatcgtctatcagattggagactctttgatcctgcgtcgccgctcgtgcgattccaattcaagcgactccttcgatcgtcgtcgtcgtggtgccctagtcgtcatggaggttgatttatctctcggtgaggacgctgctccggttgaagatcgtgatgtcgtcggatatgaggatgttgatttcaacacacagtctcgtaccatggaatgtgtagatgcagggattcatgcaactcatgaaggggatcacacagctcaagtggctaataaatttttgcatatttcaatcgctcctaaagttggaatggcttttgaatctggggacaatgcttatgagatgtgtaacaactatgctagcaaaattgggttcagcattagaaagagctcctcaaagctacgaccagatggtactatatatcataaatatatagtttgcagtgccgaaggacatgaaaaaacttagtcatcaaaaggcacgacggacgggatgtggtgcttcgcattcagcttgttgtcaacagagagggaatttagacagtcaataaggttgtacttgagcataatcattatcttgctagtccaaataagaagaaaaatctaagatcccaacgacatgtctcagaagcagatataaagctaataggccagatacaggaagctagaatgaggcctgcccaagtgtatgagttcatgaaagagttctatggaggagccgacaaagtgccatactcaaagatggattgcaataatgagattggtcatgaacgcaagaagtacttagaatccaatgacgcacaaacactatgtaactacttgaagaataagcagcgtgaggatccaacatttttctatgcagttgatatagatcaggaagatggacccgataaaggtcaaatagctaatttcttttgggtagatggccaatctattatggattatgcatgtcttggtgatggtgtgtcattcgacaccacatttcaaactaataagtttgaaatgccttttgctccaatccttggtaccaatcatcacaagcaaaccatactttttggagttgtgttgctatttgatgaaacaattccatcatttgtatggctatttgaaagttttttaacagtaatgtctggtaa

SEQ ID NO: 2099 - DNA, 2879 bp, Zea Mays
caaagccacaaaggcctgttaggctagctgcttgccttggctgacggctcccccacggaccacggttgtttggctgcgcggcgtgtgcccttgcggtcattcgtcgtccagccagccgtccagtggccttgcccggcggccggagcgggcgagcggcggtccggccttctcggctcctcgccgtccggcgtcctccgtcactctcgctcagccgctgtgtccggccagcaggtagcagctgtgtccgtccgagtgtccgacgtcctccggcgctcagccattgtctccggcgctcagccgccttgtccggccagccggccaggccgacagggccagcgccgagcgccgctccagcctccaggctcaactccaagtcagaattgagaaataagatggaaaatgattggttgaatcatagaatggtatgctatatagagcgagatatctttgcaattattcgaagtgatgatattttataccattttcaagaattgaagagtatatgaaaaaacttgccatgcgtatgtttaaattcacgtgctaatgttgatgaagttattagaggcggggaagaaccaaatcttctctaattaggtacttttatatttttttatcaagtttattgtatttttatatgctgaattgagattaatactatcttagtctatgtttgtggtatattttgttttagcggtatatttagccgctcaatatattgggggctgtttaaagtaaacttaaagtattatagagtggcccgggacgttaattttatagagctccgccactgatcacagcagcacaagcaggcgcatcacttcgccttccatgcgtactagacggtgttggtcgcgctcgaggtttacttacggggctccgttagcgtcgagcccccggatgtgcctctccttcgggacctgttcctaatcgagggcaagtgtcctagttctttggaccccggtggctgccacgacacccgacacccgccgcctgctccaccgtcgcggctgctcatgccctcgctgctgacctagcgcatgcaaacctcacatttcgaggcctaaaaccctcagcgtcagtggccggcacgtggcctctctagtgcccatcggtgccatggcagctctcgcgccgtggatcctacggcggcgacccgtccgctctgtcgcttctctggtctccattcgtgattcatggcatcgaaggtgtgggtcctcttcctcatatccttcagcatcgttcaagtgtttgtggggatggtttggaccagaggcacacgggcggaggaggccgtggtttcagcagcccgtgaggtgcgggagcacgacgatcacacttgatacagatggcaagtttgcgaggtttggagtcggcgatatgggtgtcaccaagcagaagtggaggcagcagccgcctccaaagaagaagatgtcgagaaaggccaaggtcaaccagctcaagtggtaccgcctgaaggccaagaagaagatgaagtcacccaaccccgaagttaggatcagatacaagcttgaaaaggctaagaggaaggaggaatggttgattgagaagctgaggaagtatgaggtcccgaggacaccggagccagttcatgaccctgagattcttactgaggaggaaaagttttatctcaagcgaacgggggagaagaagaagaattatgttcctgttgggaggagaggggtatttggtggtgtggttctcaacatgcacctccattggaagaagcatgagaccgtgaaggtggtttgcaagccttgtcggcctggccaagtttacgagtatgctgaggaattgacaaggctcagcaaaggcacagtcattgatattaaacctaataatacgattatgttttatcgcgggaagaactatgtgcaaccaaaggtgatgtcacctcctgaaactctttcgaagcagaaggccttagagaaatatagatatctacaatcccttgagcataccagccagtttattgagaagctggagaaggagcttgaagattacaagaagcatgttgctttattcaagaaccataataagggggttgctattgagaaaatcagcaatgaagataccactgttgatgatcctgcaactacctcagattctaaatgagctaactatttggacatgctggcatgatagatctttcagtcgtcaaatcttgcaagcctacatagctcaatgttcactattcatattaaatatgctggcttcagttgtggtgatatagggagctagcttgaaaactcagattcagatagaagaagtaatagccataggattttaaaggcttgcaagattaaaatcctggttgatggaaagctgtattacttgaaaaatacctcgttcatcaatctatctctataaggaaaggctagtagcatgatactgagtgcagatcagccttttaatatttctgcaatctttcctgtaaacacttttatgataaaataggacattcttttgaattgtggcccccttttatgtaggcttttcacttcttgggccttccttgctacataaaagacaatgaaattgtaattttggagctggaatagttctgcaggaccctctcagaaatgaagacatttactgtgccacacgttcacgtactcagtattcatacaccaatgatggacgtcagaagtgcacaagatttctgtgcgtcatttgggcattggtgcatgaactttgaaacaacttgttggtctacatttgtgtgctttttgcaggtactgggccgttcctgagctgagaagatgggcatgtgcagaagcacaatgatgactttaaggatttggcttgataaaaaggaagcgaaaagacagcttcgtcagagatagagctctagtcctacg

SEQ ID NO: 2100 - DNA, 737 bp, Zea Mays
atggacttagagccaacgttgatttcgggagtcccaacaagttgcacaactgactctgaaaatcaagcatctgtcagctgttctacacaagaaggataaacattctagaaaggggcttcaggagatggtccaaaagagaaagaaatacatgaaatacttgcgaagaaccgactgggactcgtactgttttgttctatcaaagctggggctacgcgatgtgcccgagtacaaagctcctgattacaagagcaaagcaaccactaaggccaaatctaagaagagcaagagcaagaggagaaagatgaaggcataggagcggtgaacaaacacaccctttttggtcttgaattgcatggctaggaaatgattcgagaagatggatccatccaatcttacagttttttttttgactcgaagctgtttgtaataaccatctctttggaggccacggtttttccttgttctgcttggagcggcaaccttcctgtaagttttgtaacaactgatttattatattatttgcttttgagttctcccgctcgatatgccttattatgagggaagggaggaacagatacgacgatatgataccattacgtcatcatcagtttgtagctttgccagttttttttgtttgacgtaattttccagaattcttgtataagaatgcttgaacaatcttgctagctagcctagcgaaacaatcaagtagaaattcttctattttctattaggcc

SEQ ID NO: 2101 - DNA, 790 bp, Zea Mays
ttctgattgtcgaagtcacaaatgacagttgctggtccaataggaacctgaggctgtagcggtcagtgcagatgaggaagcagggaacctaaagttgcacaactgactctgaaaatcaagcatctgtcagctgttctacacaagaaggataaacattctagaaaggggcttcaggagatggtccaaaagagaaagaaatacatgaaatacttgcgaagaaccgactgggactcgtactgttttgttctatcaaagctggggctacgcgatgtgcccgagtacaaagctcctgattacaagagcaaagcaaccactaaggccaaatctaagaagagcaagagcaagaggagaaagatgaaggcataggagcggtgaacaaacacaccctttttggtcttgaattgcatggctaggaaatgattcgagaagatggatccatccaatcttacagttttttttttgactcgaagctgtttgtaataaccatctctttggaggccacggtttttccttgttctgcttggagcggcaaccttcctgtaagttttgtaacaactgatttattatattatttgcttttgagttctcccgctcgatatgccttattatgagggaagggaggaacagatacgacgatatgataccattacgtcatcatcagtttgtagctttgccagttttttttgtttgacgtaattttccagaattcttgtataagaatgcttgaacaatcttgctagctagcctagcgaaacaatcaagtagaaattcttctattttctattaggcc

SEQ ID NO: 2102 - DNA, 853 bp, Zea Mays
agatggtgtgggcccgaagggaggcaggacagagaagtgtctttgtcaatcccttgctctcagaccttgttcactggggaaaaagcttcacctaagcatgaaaagttatctctcttattgatctagacgaggactcatagcagttctgaagtatcaattgcacaactgactctgaaaatcaagcatctgtcagctgttctacacaagaaggataaacattctagaaaggggcttcaggagatggtccaaaagagaaagaaatacatgaaatacttgcgaagaaccgactgggactcgtactgttttgttctatcaaagctggggctacgcgatgtgcccgagtacaaagctcctgattacaagagcaaagcaaccactaaggccaaatctaagaagagcaagagcaagaggagaaagatgaaggcataggagcggtgaacaaacacaccctttttggtcttgaattgcatggctaggaaatgattcgagaagatggatccatccaatcttacagttttttttttgactcgaagctgtttgtaataaccatctctttggaggccacggtttttccttgttctgcttggagcggcaaccttcctgtaagttttgtaacaactgatttattatattatttgcttttgagttctcccgctcgatatgccttattatgagggaagggaggaacagatacgacgatatgataccattacgtcatcatcagtttgtagctttgccagttttttttgtttgacgtaattttccagaattcttgtataagaatgcttgaacaatcttgctagctagcctagcgaaacaatcaagtagaaattcttctattttctattaggcc

SEQ ID NO: 2103 - DNA, 2924 bp, Zea Mays
cgcgcgcatccgcaccacggcgccccatccctcccgtcagcgtcgctgcctgcctgcctgcctgcgtccgctcgcaactgcaacgacagggaggcgcgcggggagggagagggacaaaccgagaaaggcacggcacagctgcctgcctcggccctcggcacgcgctcgcgccctggtgactggtgaacactgaggactggaggcggtgggcgcggcgggtccagccaccgcgcggttcacggcggggcgcggcgcgggcgaatgccggccgtttcaacggcgggcggatcggcctgttcccctggcgctgctggcgccccccctaggcggtgactgcgaggcccgatcctgaggcgggcggcgactccgagagggcggttggctggttttcttgccaagtgccagtcagtctctctcgtctcggcgacgccgcgcgaaggtcggaactcggaatcctcttcccggcgtcgtcatcccacccccgtcggttcccttctaactcctggctcctggggccgccgccgagccgaggagaggcgcacgcgcctcgggaatggagctggcgcctccgctccgcctacgggatccgagcctgggatggcttcctgcaacttgcgcagtgtgatgaactgatggggactcttggactataactggtttcctcttattcttccagccaatcctgacaaatgtggcatctcaagctgatagctttaatttatggctctcttttctttatgcacattccatatgctagaggttctgacctaaacaccgataagcaggcccttcttgcatttgctgcatcactgcctcatggcagaaaggtcaactggacctccacaacccaagtctgcacgtcctgggttggcattacatgcacaccggacatgaagcgtgtgcgtgaagtcaggttacctgcaatagggctctttggtcctatcccatcaggcacacttagcaagctcgatgccttggaggtgttgagccttaggtcaaaccgtcttactattaatctccctcctgatgtaccatctattccctcacttcgctctctttatcttcaacacaataacctgtctggaatcataccaagttcactttcttccagtctaacattcttagacctgtcctataactcgttcaatggagaaataccatcgaaggtgcaagacatcactgaactgacagcattgcttctccagaacaactctctttctggacccatccctgaccttcgcctccccaagttgagacatttggatttgagcaacaataacctgagtggacctataccaccctccctgcagaagttcccagctacttcttttctgggaaatgcctttctgtgtggatttccattggaaccatgtccagggacaccacctgcttctccatcgtcgccatcgtcccaaaatgccaaaagaagcttctggaaaaagctcagccttggtatcataattgcaatagttgctggaggaggggttgtattcatattgatcctgatcctcttggtatgtatcttcaaaagaaagaaaaatgcagagtctggcataggatcatcttcatccaaaggaaaggcaattgcaggtaaaaggggagaaaaatccaagggggaatacagcagcagtggtattcaagaagcagagagaaataaactgtttttctttgagggctcttcatataattttgacttggaggatctgttgagggcttcggctgaagtccttggaaaaggaagttatgggactacgtacaaagctgttctggaggatggaacaacagtggtggtcaagagattgaaggaagtggtggcgggaaagagggaatttgaacagcagatggagctaattggcaaggtttgccatcatcagaacactgccccattgcgtgcttactactactccaaggatgagaagctcttggtgtatgactatgtcccactaggtagcctttgtgctgctttgcatggtaacaaagctgctggaagaaccccattggactgggagaccagggtgaagatagctctgggcactgcacgcggaatggcttatcttcactccgtgggtagcggcgggaagttcattcacgggaacatcaagtcaagcaacatccttctctcacaggaactcggcgcctgcgtcaccgagttcggccttgcccagctcatgtccacgccccacgtccacccgcggctcgtcgggtaccggtcgcccgaggtcctcgagaccaggaaaccgacgcagaaatctgacgtctacagcttcggcgtcctcctcctcgagatgctcacaggcaaagcccctctcaggtcccccgggcgcgacgactccatcgaacacctcccgaggtgggtgcagtccgtggtccgggaggagtggacgtcggaggtcttcgacgtcgacctgctgaggcacccgaacctagaggacgagatggtccagatgctccacgtcgcgatggcatgcgtcgcggtcgtccccgacgagcggcctcggatggaggaggtggtcggcaggatcgaggagatccggagctcctactcggacacgaagacgtccccggaggacaatccgagggagggcgctttctaataaatcaccgagtaccacacgtaccggaacggcagtgacttgccgtctacagaaagtaggtcggttggtttgacagctctgtgtccagtgaagctttgcagtcagtcagttgattattcctgatcattctttggtaaaagttgttttctgttcttggttccatgaggtagccccggaacgctggtggtggtttcgtttcattagcgctgctgattactgtagggtgttgtttgtggatcgtgccgcgactcggtttcgtattcgtttgaggcagcccgactctttcaagtttgatttattgaatgcgcataagtttttgccactttcctg

SEQ ID NO: 2104 - DNA, 849 bp, Zea Mays
cccggactcccagactcctcccaaaaccctcgcatcctctcccacgcatgtcacaatcgccatgaccgacagaaaccccgccgccgcctcaagcaagcgtcactgtgacctctccctcgacgatcccacgccgtcggccaagctccagcggtgctccgagccgtcagaaccaacgccggcggggaaaccgaacggcggcgcggcgacgggagaggagagcgagatgatggccggcgcacggaaccctagggcgcagaggtacctggtcgccgtggagtacattggcacccgcttctccggctcacagaagcagcccaaccagcgcaccgtcactggggtcctcgaggaggcatttcaccgatttattgggcagccagtttcaataatcttttctagccgaacggatgcaggtgttcatgctttatcaaatgtttgtcatgttgatgttgagcggataagtaaaaggaagcctggcgaagttttaacacctcatgagcctggagttgtaaaacgtgctgtgaaccactttctactgaagagtgaaggtgacataatggtgactgatgtctgctgtgttgcaccagattttcatgctagatacaaatctctagagcgcacgtagatatcactatcgcttgcttgctggacctgaatcaacatctgtttttgagaaaaactctgtttggcatatatctgaagatttggatattcagtcaatgaagaaagcatgcagcatacttgttgggcatcatgatttcagttcatttcgagcggctggatgtcagaactgcagattgtgtgtcctggcatccccattagtagtgaataaatcatgcatagtgttggcct

SEQ ID NO: 2105 - DNA, 1915 bp, Zea Mays
cttgttctcaaatcacttcttcccggactcccagactcctcccaaaaccctcgcatcctctcccacgcatgtcacaatcgccatgaccgacagaaaccccgccgccgcctcaagcaagcgtcactgtgacctctccctcgacgatcccacgccgtcggccaagctccagcggtgctccgagccgtcagaaccaacgccggcggggaaaccgaacggcggcgcggcgacgggagaggagagcgagatgatggccggcgcacggaaccctagggcgcagaggtacctggtcgccgtggagtacattggcacccgcttctccggctcacagaagcagcccaaccagcgcaccgtcactggggtcctcgaggaggcatttcaccgatttattgggcagccagtttcaataatcttttctagccgaacggatgcaggtgttcatgctttatcaaatgtttgtcatgttgatgttgagcggataagtaaaaggaagcctggcgaagttttaacacctcatgagcctggagttgtaaaacgtgctgtgaaccactttctactgaagagtgaaggtgacataatggtgactgatgtctgctgtgttgcaccagattttcatgctagatacaaatctctagagcgcacatatcactatcgcttgcttgctggacctgaatcaacatctgtttttgagaaaaactctgtttggcatatatctgaagatttggatattcagtcaatgaagaaagcatgcagcatacttgttgggcatcatgatttcagttcatttcgagcggctggatgtcagcctggtgggacggggcagaatattctgttagtgctgaagcgcgcagggaattaaactccttcattaccttcggcacttggactatctggaagttcaggaatgattgtgtcttcaatgaggttgtccctgatacatgtactgctttgaatctcgcaagggatgaagcccattttttgctgtttggctggagccaaaggattatccctaatcacagcaagaggtgttgtttagagtgcctttggatttaggcaaactctccagtgcgaactctggatgaacttagtgttacagaagtattccctttcatgttttttccttcaagtgtagaaagatcagagttggaattatcaaatgtctctcttgtttattcaaggaaaccagacatggaatcttctgggaaaggatctgatggttcctgtaccagtagtgtgaaatcagattttgagaatggaaaagattttggaaagcggtcaaggcaccgttgctttgttgttactgcaagggcacggtcttttctttaccaccaggtaaggttgatggtcggtcttctaaaatctgttgggactggagatctaacaactgcagatgttgagagaattctggatgcaaagacggttactgctgcacccagtatggcaccttcttgtgattttgtcagctgttggctatcaaaggaattatatgctgccacttgccaaagctttcagttgcctgttttgtccactgaatcttgcatggtgattgaaaacctagaattaagtttatctgtcagcacaagagccggcttcattctcttcttgtacacagagctcttctgcatgttcagaaacaaaataggtagcttcattttagttaagttcaactatccactctttaaatttcagctggatccacccgattttgttgggtgtacgtagatttgacctggtaggggcaaaattttatttcttggttttctcatgactgtacttggttcttgatatataattaattagccaaatgcgttgtgtgcatattgaaaatattcttttctgttccttgataaattacatcgagcaagactgcaagagaactttcttcaagaaaatattcttttctgttccttgataaatt

SEQ ID NO: 2106 - DNA, 1439 bp, Zea Mays
ccaccggcgagtccaccatcccattcccatccacccgctccttccaactcccaggcgttgctggctgctgctaccgaaactgctccgcctcccggccaatgcgcagttgcgctcgcgcagacgcgcacggacagcgccacatcggccttgattagcgaagtgttcccttgccctacctctccctcccctgttccgacgcggcggccggtgagcacctgcccggtcgctagcttctgccatggctcacgaagttggcgacaacggcggcgaactcccgccgcccgcgaagaagaagtcgcccgccgaggaggaggccgagaagaggaggaagaagcttacacctgggagcttgatgaagggcatcatacggtctgggagtggtgatgccacccctgcagagggcgatcaggttatacttcattgcactactcggacgatggatggtattattgtcaattctacaagaagggagcacggaggtaaaggaatcccactcagatttgttttagggaagagcaagatgatcctaggctttgctgaaggcttcccaacaatgctgaagggtgaaattgctatgttgcagctccagatggcttcccgaaagatgatgaacttcaatttgagattgaaatgttggatttctttaaagccaaggttgtggcagaggatttgggggtggtaaagaagatagttgaagaaggcaagggatgggaaacacctagagagccatatgaaataacagcacggataactgtaagaacagcagatggaaaagaaattattccaagtaaagaagaggcatatttctttactattggtaaatctgaggtacctaaagggcttgaaatgggcattggaacaatggctcgcaaggaaaaggcaattgtttttgttagcaatacttatttgacgaagtcctcactaatgccagagcttgaaggccttgaagaagttcatttttacattgaattggttcagtttatccaggtgaatttccaatggactgtcctcttcatgacagcttattaagagtgcattataagggtattctccttgatgaaccaaagtcagtgttttatgatacacgtgccgataatgatggtgaaccgttggaattctgttccggagaaggcttggttccagagggatttgaaatgtgtgttcggctaatgcttcctggtgaaaaatctgttgtcacctgcccaccagattttgcatatgataagttcccaaggccagcaaatgttcctgaaggagctcatgttcagtgggaaattgaactacttgggtttgaaatgcccaaggattggactggcttaactttcgaagaaatcatggatgaggcagacaaaataaagaacacgggtaacagactgtttaaagaaggaaagttcgaacttgcaaaggcgaaatatgataaggtatggcttccactggat

SEQ ID NO: 2107 - DNA, 1793 bp, Zea Mays
cgaaaatgcaaatgtcaacaataatacatttgcagctccagatggcttcccgaaagatgatgaacttcaatttgagattgaaatgttggatttctttaaagccaaggttgtggcagaggatttgggggtggtaaagaagatagttgaagaaggcaagggatgggaaacacctagagagccatatgaaataacagcacggataactgtaagaacagcagatggaaaagaaattattccaagtaaagaagaggcatatttctttactattggtaaatctgaggtacctaaagggcttgaaatgggcattggaacaatggctcgcaaggaaaaggcaattgtttttgttagcaatacttatttgacgaagtcctcactaatgccagagcttgaaggccttgaagaagttcatttttacattgaattggttcagtttatccaggtgagagacatgcttggtgatggtcgtctaataaaacgacgtgtagttgatggaaaaggtgaatttccaatggactgtcctcttcatgacagcttattaagagtgcattataagggtattctccttgatgaaccaaagtcagtgttttatgatacacgtgccgataatgatggtgaaccgttggaattctgttccggagaaggcttggttccagagggatttgaaatgtgtgttcggctaatgcttcctggtgaaaaatctgttgtcacctgcccaccagattttgcatatgataagttcccaaggccagcaaatgttcctgaaggagctcatgttcagtgggaaattgaactacttgggtttgaaatgcccaaggattggactggcttaactttcgaagaaatcatggatgaggcagacaaaataaagaacacgggtaacagactgtttaaagaaggaaagttcgaacttgcaaaggcgaaatatgataaggtgcttagggaatataaccacgtgcatcctcatgatgatgaagagggaaaaatctttgctaattcaagaaattccctacatctaaatgtagctttttgctaccagaagatgggtgaatacagaaaatccattgaaacatgcaataaggtgctggacacaaatcctgtgcatgcgaaagctctttaccgccaaggaatgtcctacatgttactcggggaatttgatgatgcgaggaatgattttgagaagatgattaccgttgacaagtcatcagaaccggacgctacagctgccctccttaaacttaagcagaaggaacaggaagctgaaaagaaggcgaggaagcagttcaaagggctctttgacaagaagccgggagagatatctgaagttggtgtagaatcagagggtggaaaggatgcgggtgatgcaaggggctctggtgaggcaacaagtgctgatagaggtgcaaatacaatggatagtccgaccagagaatcagagtacgcattcgaggaagagaggcctgggcttcttggccgcttgtggccttctgcgaggaggatcttctcgtctgttggcataaacaggtgtacaatactataaggtgtttaattcctactagggtgactttggaaatcatggtggtgaagatgaactgccccgaggtttgtggtgtttattagagtttcctgacgacgaaaaaaatggcgaggaatgtttggatgtatggaaaacgaaccgtgtgcatgataatgtaaaaaatgagaaataaattgcagggaattttattcgtagtttggatggtgcgttttagtgacggtgatgccactgtgcatgcagcgtgccatcatcaagtagc

SEQ ID NO: 2108 - DNA, 1775 bp, Zea Mays
gagcaatgtcatatttcttgattctccggttggcgctggattttcgtattctcacacggaggaaggctacaaatcgagtgataccagagctgtgaaccaaatcctcgtcttcctcaaaaagtggtttgataagtatccacagttcttttcaagtcctctctacatcgccggcgattcctactctggcatgatcgtgccaaccgttacatctgaaattgctagaggtaaagaagaggggagccaaccgaatctaaatctaaagggctacctcgttggtaatccagtcacagatttcaacttcgatggtccgtccagaatcccatttgctcacgggatgggtctcatatcggacgaaatatacgaggcatacgagaagagctgcagtgtgggtgacagtagacgccaaagcattgagtgcataaatagccttggcgccatagacgagtgcatcaaaggcataagcccgaaccacgttctggagcccctgtgcgctttcgcgagtcccaagccgaagctaataagttcaggtgcacgggagatgctccagctcccagtcccagtgcacactgaggaggaggaggaggagcttcgcttgtctgagatctcgctgcagtgcagaacggcaggatacatgatgtccagcatgtgggcgaacgatgcctcggtacgacaggctcttggtatccacaagggaacagttccttcgtggtcaaggtgcaactacgacataccttacacgaacgatattccgagtgcagtgaagtaccatctggatgtgaccaccaaaggctacaggagtctagtttacaacggtgaccatgatatggtcgtgccttttatcggcacgcaagcctggatcaggtctcttaatttctctaccgtggatgagtggaggccatggtttgtggacggccaagttgcagggtgagtccatgttttatttatccatcaattaactaataatcggcctacaaacacagttacattattcagccaggctatttatgcagatttacaaggtcatactcaaacaacctcacctttgcaaccgtcaagggtggtgggcatactgctccggagtacatgccaaggcaatgctttgctatgtttgtgaggtgggtttctggtgaccccctttgatggcgtacatagcagctccaagttccagtgatgcgttacattattacaagcgaaacgtattggttaggggctccggagaaggaaaagcagttgtggaagggcatcctgatatatacatgcaagttattcttaaatcttgtcagtttcaaacaaacgacctataagttggcttttaaaaaagctgtaaaattagcttcaacagaatggcccgctcgatttcctctatggtgactcacctagcaggatgtctgctcgaggttctctatagtgactcgcccagtaagattttattatggtgatgcggaagaatctggatgagtaatacatggatggaaaagagatgggaaattggaggttaatatacgatgtctacatataaaaagagtggtaagtaggggaggggaagacttatatgattcgtgcagaacaatgatcgaaactggtgctttatagaaatagagatttggctagaagttgccgacatgttcgtttggttttaatctatatcaactactgctacttctataatgttttgtctctatagattgtagctgcagcagtttgaataattgcctttaatgcgaagcgaaccatgtaatataagcgtaccggcttctatggatcgcttatctctg

SEQ ID NO: 2109 - DNA, 2030 bp, Zea Mays
atggcaataacaccaaggctcgccgcaatcttcttctccttgctctgctgccgctcagcgtcctccttgcgccctccgaatctcatctccaacagcagcggcggcgtcatcacccatctccctggcttccaggggcccctccccttccacctccaaacagggtacgtggaagtggacgaggacaatggcgtccacctcttctactacttcgtccggtcggagcgggaggacagccccggcgacgaccccgtcgtgctctggctcacgggcggccctggatgctctgtcctcaccggcctcgcctacgagatcggccctctcagtttcgatcttaacggctacgttggtggcttacccaagttggtgtataaacaagattcatggaccaaggtgagcaatgtcatatttcttgattctccggttggcgctggattttcgtattctcacacggaggaaggctacaaatcgagtgataccagagctgtgaaccaaatcctcgtcttcctcaaaaagtggtttgataagtatccacagttcttttcaagtcctctctacatcgccggcgattcctactctggcatgatcgtgccaaccgttacatctgaaattgctagaggtaaagaagaggggagccaaccgaatctaaatctaaagggctacctcgttggtaatccagtcacagatttcaacttcgatggtccgtccagaatcccatttgctcacgggatgggtctcatatcggacgaaatatacgagtgcatcaaaggcataagcccgaaccacgttctggagcccctgtgcgctttcgcgagtcccaagccgaagctaataagttcaggtgcacgggagatgctccagctcccagtcccagtgcacactgaggaggaggaggaggagcttcgcttgtctgagatctcgctgcagtgcagaacggcaggatacatgatgtccagcatgtgggcgaacgatgcctcggtacgacaggctcttggtatccacaagggaacagttccttcgtggtcaaggtgcaactacgacataccttacacgaacgatattccgagtgcagtgaagtaccatctggatgtgaccaccaaaggctacaggagtctagtttacaacggtgaccatgatatggtcgtgccttttatcggcacgcaagcctggatcaggtctcttaatttctctaccgtggatgagtggaggccatggtttgtggacggccaagttgcaggttacattattcagccaggctatttatgcagatttacaaggtcatactcaaacaacctcacctttgcaaccgtcaagggtggtgggcatactgctccggagtacatgccaaggcaatgctttgctatgtttgtgaggtgggtttctggtgaccccctttgatggcgtacatagcagctccaagttccagtgatgcgttacattattacaagcgaaacgtattggttaggggctccggagaaggaaaagcagttgtggaagggcatcctgatatatacatgcaagttattcttaaatcttgtcagtttcaaacaaacgacctataagttggcttttaaaaaagctgtaaaattagcttcaacagaatggcccgctcgatttcctctatggtgactcacctagcaggatgtctgctcgaggttctctatagtgactcgcccagtaagattttattatggtgatgcggaagaatctggatgagtaatacatggatggaaaagagatgggaaattggaggttaatatacgatgtctacatataaaaagagtggtaagtaggggaggggaagacttatatgattcgtgcagaacaatgatcgaaactggtgctttatagaaatagagatttggctagaagttgccgacatgttcgtttggttttaatctatatcaactactgctacttctataatgttttgtctctatagattgtagctgcagcagtttgaataattgcctttaatgcgaagcgaaccatgtaatataagcgtaccggcttctatggatcgcttatctctg

SEQ ID NO: 2110 - DNA, 676 bp, Zea Mays
gccgccgtccctgccctatcctccctcaggccaccgccgctctcccctggtagccgtcgcctctccctgctctgctcctctctctcccaagcggctctccctctctctcctcgcttctctcccctcctcttctccagccgctgctaggcaaccggccgccgagcagcgcagccacgctgttgctctcgccaggacgccaggaaccgctgccatggctgcagcaaatctgagcacagttggcttctttgcagtttgcaggctaaagtgtgttcctacttcctcctgtatacacagtttattcctgcattttttggggtgattaattcctttttcaaggaacatgcgggcgataaattgaagctgtgggtactctgttttctgaaagacaaatgatagctattcaaggagctagaggctgctcaacataaagcatcaacagcaacctctggaacagctgaaaatgctctactggaagctaagtcagtgactgatcttaaatctaaagatttggaggagaagaaaagggagctttgttcactgatacaagaagttggagtgcttttgtgaaggcttttgtgaatcacttgaagcgttagtacttttgtgaatgattttgtaaagtgtttgcaaatatgtgcaaaacataataacatgtgtaggttttgtgaatgatttt

SEQ ID NO: 2111 - DNA, 2908 bp, Zea Mays
atgaagcatgtagtagttgtttcaaaaaggatagtgacaactttgcaggatgttcagttaaattcagtagtcctcgttgttcacaaaactataaagtaccaagctccagtgtatgttgaacaaccaaggcaacagcaggtgccaccaccacagcgccaaccacgcagaccaccagcacaattccagcagctagagtacgaaggtatggcgattcttatgcacggggtcgaggaagagggcgtgggcgtggaaggggctggggtagaggtggctacggtggctatggtggatatggaaacaaccaaggtggctatcatcagggtggtgggtattatgacaatcaaggtggttataatggctatgataatcaaggtggatatagtggctatgataatcaaagtggatatggtggtggatatggctataaacaaggcagatatgggaactatcaaggcaatgacacattttgataagttgatccagaaaatggtggatataaccgagacccaggaagtggtatgcgaggaagatgcaattggggttaccaaggagggcagactcagtgctggatgctccctgggtctggtgaagcgcgaaccccttggtggccgcctccagctgcgcgaatgtgaactctccagggggtccttgaacgatgacgatggtcgtatatggttgccatatgatgttgccaattccattcctgaatgcagtagcattccgaattttccagctctatatggtagtgaaagttgaaaaaactttatcccaagttgattctattctagcaggaggactttctctagctgatgtatctacaaaacaatgtacagtgtatgactgggagtcaccagaattatctagaattttatcaatattttcttcaaaaagatgcaaggaaaaatgtgtatatcttctggaagttcttgatagattctgggatgatcattatagggcaaaatctaggatcttcacagatgctacacattgtggtgaaaacagagcagttgaatcatcatttatgaagtgcattcaaagcttcaaatggatagcatcaagaatggatgaggatcttcattatgcaacagatttattctatgattgtgaaaatgtccgctctctttttggtagtgtggctccatatgttgtatcgcaggtatctagcagttcacttaagaaggccattggattcaaaacagaggtatcttactgtgatgcattgatggtcctgaagtcttggataacgtcaaaggttccctttagagcaagtatgagccagatgtggaaattctataccttattgtctgaaggcgtggcagacgcaaagattgacattaaacgggagttcatgtcgtctccctctatatttacaccactacagcgtcctcgggcaagtgagttcatgtcgtctccctcaatattgccactcaagtttctgtttacaagatcgacagttactcgtcagaatagccagaagtgctagcacttccttttgagtaatgacagtaactccatttatatttggtgaaaatgtttagcgtcacatgatctgtgttcttaggatattgaggtctaaatgactacttcaatctgtaatcagatttaatatgttgctgggttgatgagatgagaaaaaaatgtccactatactgtttagcaatattttcactctttaaatggcatgtaagtctgtgacaaagagctgcatgggaggattaatgtgattttaataatatcctcacccttcaagtgtcctgtgactaatagttgcacattaggattagccagacagtagtatgtgattaatggagacatttgccatgccagtttaattgtgcattactgaatacatgaacacaatagttattattcttgcaacacaatagctagctgttcactgaattgcatcttttgttctatgttgtcttcataggtggaagagactttgttaaaacgaactaaagtgtttctctgctcatattccagtgtttatttataacatgcctttgttttattattttggttttttaaatgtcatgcttatatcctggtttggatatccagtttaaagacatcccatctattggacgctccatcactagctgcaatagacaaaacttagaggcaattacttatctcaatcttacttctacatttatatttccctcttgtgttttaccttttgcttatatcctttgcgtgacataggagccatttccactatttcatctattaaaacaagtaagaaaatagaaaggcttggaagcaatggtgttccacccagaacaagccgactcaaggtatggcatggtcttgtcggcccctgtggcagcacatggccttcattgctagctgcactgatgtgagtagcgactttttgtctactctttgcaaaacagtgaggcaacgagtcaggaagcgcaccatggtcggatgaacgaagaagaaaaatctgttgcatggaatggatgtatgttattagattaaaataacaaaatttatgtatggatagaatcacaaatgaattctgaaacattttctcataacagtataacgcacacatgtacataagttatcgtgttgttatacggttccgttgcaacgtacgggcactcacctagtcatataatagagaataatctccaccttggatttttaacatattttttatgttatttttatattgtcataaaatgcactcataataaaaattccagcatgatgcataatttagtgtcatatatttttattaattgtttttaaaaggtggtgttcacatgtgatgacaaatggatggatacactcatataaatactcatataaataaaggaaaacacttttctgcttttaatatgatctctaacaaattaggtgttccacatactttggtggaaggctctcctttttt

SEQ ID NO: 2112 - DNA, 4222 bp, Zea Mays
atgggttcggtggtgtttgttcttggcgtgcgtgatttgggcgagtccggagctacccgcgagttctgcggacggttgaagaagacgcggtcctgggtggcccacgcgacaatgctgcgcgatgaagagctggcgcggcatggcaatgactggcgtccacacagtagcgggggtgcacggttctgcctgcctcaacgcccgcgctcctcaccaacgccgcaatcatcgcccacgcgcggatcccccacgatcctccccaccaccgccgccacaatcatcgctcacgcgcggatcccccatgatcctccctaccgtcgccgcaatcaacgcccacgcggatcctccccacgatccccaccccgcacacccccacccttccatcgccggccggaatcgatcgatccaaagctccctttagagctcgagctctatccaacccacgaacgggatcccgatgcccatggcggcctcggttcgtctcgccgcaccggctgcctcgcccccgctgacgtggtggaggtgggctcctcttctcgccgcgtcacatccacgggcgaacccgccgcctcccgcaccgcgcctgcgggcgcccgctctcttctccgggcctcccctgttccccgcgattccagcgccggagccatcgtccggaggacaccgtgtgcggcggcggcaataggtggaggtgtggaggcggagtccacggagcgggaggcgcccgatcgggatactctgaagcgggtggcgctgctcgcgcttggctgctgcactgcagccgccgctctcggcgtggcgcgggcagcggcgggggactccatcaaggcgtcaggattcaggctatgggtggcggagtcgctgcggaggctcggatggcccgatgacaccgtcgtgttcgcgctcgcaacgctgccggtgatcgagctgcggggggcgatcccgttgggtattggctgtggggcccatccccactgcccctctgtcgcaaaccccgcgcacgccgcctccactgcacacccccgccttccatcatcgggcctctgccgcaaaccccgcacacgtcgcctccaccgcacacctcgcccttccatcgtcgccaccgcgcactcaccctccacaccatcctcgccccaaatcgctcagcctaagcatagatggaagtccccccgcatccgctcccgcgcatcccgacatcagtggattgcggcagaggcccttcgtgcacgatctgtttccccctccacgcatggcggttccgcctccacctaccgtcgccccatccactcaaggccaattgcatccaaatgtcacgcaggccgcacgtcatcctcatccttgtggcgtcaacaaccatgtgcggcaagcagcggatgcggtagatgattgtttgcgtcccatatagctcaatatatgcctgcccccgatgccatctacatgcctagaggcgacggtcggacgggccaagtaggagccaaaaagaagcaagccccgtcgccgtcatggaaggaggaggccatcccacccacgctgacgaggagccaccaatagcaggtgccaccaccacccaaggagaaagccgcccaaggagacctttcatttcagattggagatgactcggcatgtttccatgatttcaattacactgtcccctagagagctggacaagcacactcctgggtaccaagctccagtgtatgttgaacaaccaaggcaacagcaggtgccaccaccacagcgccaaccacgcagaccaccagcacaattccagcagctagagtacgaaggtatggcgattcttatgcacggggtcgaggaagagggcgtgggcgtggaaggggctggggtagaggtggctacggtggctatggtggatatggaaacaaccaaggtggctatcatcagggtggtgggtattatgacaatcaaggtggttataatggctatgataatcaaggtggatatagtggctatgataatcaaagtggatatggtggtggatatggctataaacaaggcagatatgggaactatcaagaaaatggtggatataaccgagacccaggaagtggtatgcgaggaagatgcaattggggttaccaaggagcgcgaaccccttggtggccgcctccagctgcgcgaatgtgaactctccagggggtccttgaacgatgacggtccgctccgcttccgcgtcatcacacgcgacagctgccaccggaataggatgcgcgcccgcgacccgtacggtttgtgacttcaaaaataacagcaagaagcctcgaagacattcttttggataaagttaggaaagtaccatgcatcccactttcagatggttcatttacctctatttcagatggtcgtatatggttgccatatgatgttgccaattccattcctgaatgcagtagcattccgaattttccagctctatatggtaatcttcgaactgaagtcagaataaatgatctggcagacatgctccaaaggatcggggtgcggaagttgtctgggcatgacattgttaaaaatcacatcatggtgtccttgcgtaacggtttagatgctaatgtggctgatatagtgattagagagtatgtagtgaaagttgaaaaaactttatcccaagttgattctattctagcaggaggactttctctagctgatgtatctacaaaacaatgtacagtgtatgactgggagtcaccagaattatctagaattttatcaatattttcttcaaaaagatgcaaggaaaaatgtgtatatcttctggaagttcttgatagattctgggatgatcattatagggcaaaatctaggatcttcacagatgctacacattgtggtgaaaacagagcagttgaatcatcatttatgaagtgcattcaaagcttcaaatggatagcatcaagaatggatgaggatcttcattatgcaacagatttattctatgattgtgaaaatgtccgctctctttttggtagtgtggctccatatgttgtatcgcaggtatctagcagttcacttaagaaggccattggattcaaaacagaggtatcttactgtgatgcattgatggtcctgaagtcttggataacgtcaaaggttccctttagagcaagtatgagccagatgtggaaattctataccttattgtctgaaggcgtggcagacgcaaagattgacattaaacgggagttcatgtcgtctccctctatatttacaccactacagcgtcctcgggcaagtggaagagactttgttaaaacgaactaaagtgtttctctgctcatattccagtgtttatttataacatgcctttgttttattattttggttttttaaatgtcatgcttatatcctggtttggatatccagtttaaagacatcccatctattggacgctccatcactagctgcaatagacaaaacttagaggcaattacttatctcaatcttacttctacatttatatttccctcttgtgttttaccttttgcttatatcctttgcgtgacataggagccatttccactatttcatctattaaaacaagtaagaaaatagaaaggcttggaagcaatggtgttccacccagaacaagccgactcaaggtatggcatggtcttgtcggcccctgtggcagcacatggccttcattgctagctgcactgatgtgagtagcgactttttgtctactctttgcaaaacagtgaggcaacgagtcaggaagcgcaccatggtcggatgaacgaagaagaaaaatctgttgcatggaatggatgtatgttattagattaaaataacaaaatttatgtatggatagaatcacaaatgaattctgaaacattttctcataacagtataacgcacacatgtacataagttatcgtgttgttatacggttccgttgcaacgtacgggcactcacctagtcatataatagagaataatctccaccttggatttttaacatattttttatgttatttttatattgtcataaaatgcactcataataaaaattccagcatgatgcataatttagtgtcatatatttttattaattgtttttaaaaggtggtgttcacatgtgatgacaaatggatggatacactcatataaatactcatataaataaaggaaaacacttttctgcttttaatatgatctctaacaaattaggtgttccacatactttggtggaaggctctcctttttt

SEQ ID NO: 2113 - DNA, 2559 bp, Zea Mays
cgtccacacggcccaccccacgttactctccccaaatctgatcctcccgcacgaggtctcacctcttccgacgccacgcgagacgcaccacacgcgagcccaagccggaccccgtctagggttagcgatccacggcggcggccatggacgaggtagcgacagcggccctggcggcggcgaggggacggtggacgcagtgggaggaggtggtggtgtccaacgaccgcggcagtcgtcttgtgcactactacctccgcggcaacggcgaagcgaaggagctagctgtggtggggcgggagcggagcccacgtcacatgtcgtacgctgtgcaggggcggttcctccgcgcgctcgcagctgccgcgggagcggtcgccgtcgcgtcgtcgccgtcacggtcgcccctggcggctgctgtggcggacggcggcgctccgaggaggtggcggtccaggcgggaggtcgtggagtggctgtcctccctcgtttccggaatatggagaatacaggtgtgtttcagtggaagcagctgctggcttcctctgggccaattgtgtaactttggcatttgggaatagagataagcgaagcagcagcatgaatgtatgctcaatcaggttatagttatggttcctcaatggctaacaggtgcaatggggattcatatgatgacagtgttattaactgcagtcaagttaccgtttcgaaggatgtttcttctagggaagcttcgaatgacttcacatggttgggagcttcatggaaatgccaacgaagtttgaagcactacaaatctttctgccgtagaggaattactatctcggtgcatagttttgtatacattatgggtgaagagatgaagagacttattgcttatgtggaagatctctatgaggatacaaattcctgcaacatggtcaaggtacaatggtttggcaaagctgatgagtcctgagtgcccagcactacgagaagttcaagagtgatactagatacagcttgtggcaaccttatttttgctatcggcagattgataatggtgaagccaagccttttgatgtcacacagctacaaggctactggagccaggaagtacttaggaccatgttcaatgcaacttcctgtctgaaggttttatggtgagaacatcgaacacttgtgtcctggttgccatgtggaagtactatctcaagacagtggcataaagataaaatcaagggtgcgctacctagaacttcaggatgctgatgagactggaaacttggaggagtgggttttgctaacacgaattgcgaaacctgatcaactgggtgtacgtttccttggaaggccaatggttcgtccacagcatgtggaagaaagcaaggcctcgtgctttgatgttggagccattgttgatgcgtggtggcatggtggctggtgggagggaattgtgttgtgccagggaggcagggggcgcctacaagtttattttccaggagaaaagcgaatcactgaatttggtgaagatgaattgaggtattcccttgagtgggttggtaacaaatggaatcctttgaagggaagaaaagatatcgcacacaagctgacctccactgcagatcgtggaagtgaatatttgattgggaaacaagatcatctgaattttgatgtgcttctaaaaccagaacctcaactagagggacttcaatatgacaaacggggtattgagaaatcttcagtcaccaccatctcacgagatcagaaacgtgtcctggccgacctgactaatgatttgaagttagatagcttgaggtggaggccaagaaagaggagtagaagatctggctcaagaaagcagtcggatacaagcagtggaagcagcagcggggacatggacttgtccagccctggccctagtgggttttgtcaacttaatttagtgcccgacgatgagacatgcaagagcagtggagagcagccttttatgggcgtgcctgtgcaggcccctaaatccgactgcctccctcttcatgcccctaaattccgggcgtacgctatccagccgacggatcagccatccatgcgcggtgaaacctctgcgttctctgttgtccgagcgttagcgactgcgtctctcgtggcggagccctcgagccgccgtgcttcgtcgtcgttggcgaccaagttgggagagaagaggtcgtgggtgggcgggtcaggcggtggcccgcttcgagcacttcgaagcgaggaggagggtcgcgtcaagagggcgaccgaggttgccgcagtcgaggcggttcctcggaggagaatcgccattgcgaaatgcctacgttgtccaccgccgtcgttcaaggttgttggcgacaaaaggaagcggagctcgtcgccaccgtcttcatcatcctcgattcgctcctccgcactagatctgagcagagaaaggtacgatcttcgatttcgtttgcggatctgttcgattcaatttgcactctattttgtgcgctttttctagagaaaggttatgaaagtatacgaccactttatatttctatgcttgttcatttcgagttg

SEQ ID NO: 2114 - DNA, 3185 bp, Zea Mays
aaatttcccaattcccttgccgtcgtccacacggcccaccccacgttactctccccaaatctgatcctcccgcacgaggtctcacctcttccgacgccacgcgagacgcaccacacgcgagcccaagccggaccccgtctagggttagcgatccacggcggcggccatggacgaggtagcgacagcggccctggcggcggcgaggggacggtggacgcagtgggaggaggtggtggtgtccaacgaccgcggcagtcgtcttgtgcactactacctccgcggcaacggcgaagcgaaggagctagctgtggtggggcgggagcggagcccacgtcacatgtcgtacgctgtgcaggggcggttcctccgcgcgctcgcagctgccgcgggagcggtcgccgtcgcgtcgtcgccgtcacggtcgcccctggcggctgctgtggcggacggcggcgctccgaggaggtggcggtccaggcgggaggtcgtggagtggctgtcctccctcgtttccggaatatggagaatacaggtgtgtttcagtggaagcagctgctggcttcctctgggccaattgtgtaactttggcatttgggaatagagataagcgaagcagcagcatgaatgtatgctcaatcaggtgctgttttgatcttcccttgttatggccttccctgatggctctgtggagcagattcacaagtccgtatagtgtgtacttgactgtacactgaatgttcttgcaaaagaaagcctcaatttctttgaaaagtgataaatcctaacgcaaatgaatcaacatattttagtgaaaatgatttgtctggctttgtgctcaaagctttaacacaatgaagtggagatatttggatttgtaaaataagatcaattattacccaaattgtgggaagatattctcaagtaaatgcattttccagttcattagctgttcgcagtgcggcagtggcgattttttaatttttattgtcatcattccttctcttctgttctgttgctttttgttctttgttttgttttgccgtgttccttttgccactgtagaattgtctacttcattccatgctacggtttccattataggttccctttgtgattttcttattgtgaatccttcatttgcaggttatagttatggttcctcaatggctaacaggtgcaatggggattcatatgatgacagtgttattaactgcagtcaagttaccgtttcgaaggatgtttcttctagggaagcttcgaatgacttcacatggttgggagcttcatggaaatgccaacgaagtttgaagcactacaaatctttctgccgtagaggaattactatctcggtgcatagttttgtatacattatgggtgaagagatgaagagacttattgcttatgtggaagatctctatgaggatacaaattcctgcaacatggtcaaggtacaatggtttggcaaagctgatgaggttggtgttctgttgcccatggattttgatgacagggagattttcttttctctgggtcgtcaagatctcaatgtagtatgtattgatggattggctgcagtcctgagtgcccagcactacgagaagttcaagagtgatactagatacagcttgtggcaaccttatttttgctatcggcagattgataatggtgaagccaagccttttgatgtcacacagctacaaggctactggagccaggaagtacttaggaccatgttcaatgcaacttcctgtctgaaggttttatggtgagaacatcgaacacttgtgtcctggttgccatgtggaagtactatctcaagacagtggcataaagataaaatcaagggtgcgctacctagaacttcaggatgctgatgagactggaaacttggaggagtgggttttgctaacacgaattgcgaaacctgatcaactgggtgtacgtttccttggaaggccaatggttcgtccacagcatgtggaagaaagcaaggcctcgtgctttgatgttggagccattgttgatgcgtggtggcatggtggctggtgggagggaattgtgttgtgccagggaggcagggggcgcctacaagtttattttccaggagaaaagcgaatcactgaatttggtgaagatgaattgaggtattcccttgagtgggttggtaacaaatggaatcctttgaagggaagaaaagatatcgcacacaagctgacctccactgcagatcgtggaagtgaatatttgattgggaaacaagatcatctgaattttgatgtgcttctaaaaccagaacctcaactagagggacttcaatatgacaaacggggtattgagaaatcttcagtcaccaccatctcacgagatcagaaacgtgtcctggccgacctgactaatgatttgaagttagatagcttgaggtggaggccaagaaagaggagtagaagatctggctcaagaaagcagtcggatacaagcagtggaagcagcagcggggacatggacttgtccagccctggccctagtgggttttgtcaacttaatttagtgcccgacgatgagacatgcaagagcagtggagagcagccttttatgggcgtgcctgtgcaggcccctaaatccgactgcctccctcttcatgcccctaaattccgggcgtacgctatccagccgacggatcagccatccatgcgcggtgaaacctctgcgttctctgttgtccgagcgttagcgactgcgtctctcgtggcggagccctcgagccgccgtgcttcgtcgtcgttggcgaccaagttgggagagaagaggtcgtgggtgggcgggtcaggcggtggcccgcttcgagcacttcgaagcgaggaggagggtcgcgtcaagagggcgaccgaggttgccgcagtcgaggcggttcctcggaggagaatcgccattgcgaaatgcctacgttgtccaccgccgtcgttcaaggttgttggcgacaaaaggaagcggagctcgtcgccaccgtcttcatcatcctcgattcgctcctccgcactagatctgagcagagaaaggtacgatcttcgatttcgtttgcggatctgttcgattcaatttgcactctattttgtgcgctttttctagagaaaggttatgaaagtatacgaccactttatatttctatgcttgttcatttcgagttg

SEQ ID NO: 2115 - DNA, 724 bp, Zea Mays
ctcgttagcttgcataacaacacgtcacgtctactgctatatatattctgcatttctgcacaagtttaacataatcaggatgaccgtatgtagagctatatcaaatttctggacattagctagagagtttcagtcccagagagcagaatcagcggcctgcagcgtcggggtgacgacatggacacgctgttcggcctggtgcacccagcgctcggcgcgccggagacggcgccggcggccgccgcctccaaccactccggctcgacctcgcggcacagcaccgccgaccagaacccgtccaccgtcggcaacagctcgccggaccaggactggggcctcgacggcgtctgccagtggagcaacgtgtccaggatctgctgatcgcgtgcaagagctgcaggggggggggggggggggggggggtcggcgtagccatgccgaatcatcgattaggacacccatccgacccgatgattctgagaagggccggagacggaatgccgaccttttcttttttttgcttttgaacatttcagcctgtcagatgccaagcatcacggacaaatctgtctgtgttctgttctccgttcctgaccgactagttgccggctcaatctcgaactcagctgcgatcgaatctgcgtcagcgtctctagctagcatgttgttttccagtttcccgttcaattgacatcatcaatcaattgtagaatttaaaggtaga

SEQ ID NO: 2116 - DNA, 1430 bp, Zea Mays
tagcaaattaataatccagcgaacacactatactagtgagcaaataaagccaccgatgtcatcactcctgttgcgagtgctgctcatccagcttgcagcagtggagtgcctctccgccgcgattccaggctgcctaacgcaatgtggaggcgtagagataccctatccattcggcgtcggcaccaactgctcccgcaaagggttccggatcaagtgcatcaacggcagcgcgggcgaggagattccagtgctgctacctactacgcgctaccagaacatccgggtgctgaacctgtccgtgtcgccgttgccggaggctcgagtgcttcttccggtggcatggcagtgcttcaacgccaccgggggcgtcactgggatctactcgggagatgtggacttcaacccagagggcgtataccgcatctccaacacacagaacgagctcttcgtcctcggctgcgacacctatgcgttcaccaaaggcgtgagggtgcacaacgttaacgcacgcttcccttacagatacttcacggggtgtatcaccgtcagtgtagacgacaaggacccgcgcgacggtgcctgcgcgggcctcggctgctgccgcgtcgacatcccgccaggcatcacggacaccagcatgaccttctcgtctacctggacgcgtgccaaccagaccttctgcccctgcgactacgccttcatcgtggagaagggcaactacaccttcaaggcatccgaccttgtgtcgcacacacccgacaaccgtctgcctttggactggtggaccatgccactgcgtctcgactgggccatccgcgacaacaacggcgactccatgacttccatctcctgcgcccaggcacccaacgaacctgactatggctgccgcagcaagcatagcgagtgcactaattcaaccaatggccctggctacttctgcaagtgtgcccatggctacgacggaaacccctatgtccagagtgatggtgaatgcacgaatatcaacgagtgccaagatccaaagtcacataattgttcaagtggcagcaaatgcattgacacagacggaggctattattgtcaatgcaatttcttccgaagagggcagcaatgtgatcccttaattcctatggctgccgttgcactgttaaacggacgacgaattcgagaggctactgcagcctgcaggcggccatcaaaggcagagcccaagaaaacgttcaagggcgacaggaggaaaagaatagattagtgactttttgtgtaatatttgttttaatcgatttagtatatggtatgttcgttttgatattaaatttttttgttatgatgtttttttgtgggaatgatttatttgttatgatataagaacgtcaccccataccaactaataccatcaaacatgaatgtatacatgtggcaactataaa

SEQ ID NO: 2117 - DNA, 2864 bp, Zea Mays
tctatgtctatgtttaatcatggattttgatgtactcacgagtcacatcgcccgtcgatagggccctaagtcgttggagactcgtcaatttatgttctgtgacatcgtacgagcacatacctaataagaaattaaagttacagtgaaaggaccatcttgtccttcaaaccctagctagtttttcctatataaaccctggggggcgtacatatatatcacgcatcaaactagtagcaaattaataatccagcgaacacactatactagtgagcaaataaagccaccgatgtcatcactcctgttgcgagtgctgctcatccagcttgcagcagtggagtgcctctccgccgcgattccaggctgcctaacgcaatgtggaggcgtagagataccctatccattcggcgtcggcaccaactgctcccgcaaagggttccggatcaagtgcatcaacggcagcgcgggcgaggagattccagtgctgctacctactacgcgctaccagaacatccgggtgctgaacctgtccgtgtcgccgttgccggaggctcgagtgcttcttccggtggcatggcagtgcttcaacgccaccgggggcgtcactgggatctactcgggagatgtggacttcaacccagagggcgtataccgcatctccaacacacagaacgagctcttcgtcctcggctgcgacacctatgcgttcaccaaaggcgtgagggtgcacaacgttaacgcacgcttcccttacagatacttcacggggtgtatcaccgtcagtgtagacgacaaggacccgcgcgacggtgcctgcgcgggcctcggctgctgccgcgtcgacatcccgccaggcatcacggacaccagcatgaccttctcgtctacctggacgcgtgccaaccagaccttctgcccctgcgactacgccttcatcgtggagaagggcaactacaccttcaaggcatccgaccttgtgtcgcacacacccgacaaccgtctgcctttggactggtggaccatgccactgcgtctcgactgggccatccgcgacaacaacggcgactccatgacttccatctcctgcgcccaggcacccaacgaacctgactatggctgccgcagcaagcatagcgagtgcactaattcaaccaatggccctggctacttctgcaagtgtgcccatggctacgacggaaacccctatgtccagagtgatggtgaatgcacgaatatcaacgagtgccaagatccaaagtcacataattgttcaagtggcagcaaatgcattgacacagacggaggctattattgtcaatgcaatttcttccgaagagggcagcaatgtgatcccttaattcctatggctgccgttgcactgttaaaaatggaggtaaactactgaatgcccagggcataaccacctacaccaaaagggagctgaagaagataactaatggctacagcaaacgccttggaggagggcactttggcaatgtttacgagggcaccatcgtcgacggcagaaaggtcgccgtcaaatgtcctttgcggacaagggtgtcgtcgcaccgctgccattggaagaatttgattcgacctcgccgtgtaccgctaccgcaacagagggtggaggaagatgggtcgttcatgaacgagatcaggttccagttcgaagtcagtcgtcacaagaacttggtccagctcctgggatgctgcctagagaccgacattccgatcctagtcttcgagtttgtcgccaatggaagcctggaggacatacttcatagtgccaagaaaccatgtaccctctcgctgccggagcggctggacatcgccattggctccgcggaagctatcgcctacatgcactcccttgacaatcaaaagcgtgtccatggagacatcaagccttccaacatcctccttgacgatgacctcaatccaaaagtctctgactttggttcctccaagctcctggcaatccatagctactacgttagggcagtggctgcagatataggctacatggacccattatatatgaagaccgagcacttcacattggagtgcgatgtctacagcttcggcgtggtgcttctggagctcatcacgaggagaagggccagctggtatgaacaagatcaccaagggaacaagatcctccccatcgagttcgtcaagtgcttcaaggaccacggtagcggatgtgcgatgtatgatagcagacttgatttctcagctggcgaggatgctcaatctcgatgcaacaagcgttgcctcgacatgattggcatgttggccgtccgatgcctcaaggaagacaagagggagaggccaaccatggcagaggttgtcgaggagcttaagcgagtgaaggtactactgctgggtacacatatataaaataatggcctgcagcaatcaagcgagttcgaagcacgcagatgaatggaagcgaagcaagcaataagaatggtcggtcagcacatgtgaagcgctgaacatggcggcggtactgatacaagcaataataagggttcctcaactcaaataaatatacatgatttattctcttccaataaaacagcaatgtctatctgtaaacatagtaattcgcatgaattgcttcgctttatacttcttaatttgatgtatgtccatacaaataattgacactatatatcgagcaccaaaagtgacggacactatatatcgagcaccaaaagtgacggacggtccggccttagagcccgaacggtccgcggccccgcgattagatcaactcagttgatcatccttatctcgtgcgtggtgatctatctaatcacgtgtgagttgttagctatcttctaggaacaagtcca

SEQ ID NO: 2118 - DNA, 2013 bp, Zea Mays
atggaagccgacatcgctttcaggtatgagatcccccggaccgcccagttcctccgcgacggcgcctacaccagggtcgcgctccagttccccgacgagatgctgaaggatgctgctgcggtggcgagggcgttgcggcgggagcttgcctccggcggcgccgacagtggggttagggtgttcgtgatggccgacacggcgtacaactcctgctgcgtggacgaggtgggcgcgtcccacatcgatgcgcagtgcgtcgtccactacggccacgcctgcatgagcccaacatcaaatttgccagctttctttgtatttgggaaggcaccgttggatgtccacgcatgtgccggcacattgctggagtgctcaaggaaaagcaataagcgcattctggttttatatggactagagtacgcatatgcattggatgaccttagacagactttcatggagtcatgtaaatcaaattctggcaatcatgaagtccagtatgcagaagttctatgttcagttatgagtccatcatcaagtactacagaagaaaacaaaattcctcagtcgagtggcccctcttgtaatggggatatctccagaaacagcgagtcggcaacattcctgaataatcgtaatggcatggaatgttccagttccacacaaaagtacagccttgctggcatgacatggaatatttcagttgaggagaaaatggaggactatttcatattttggattggacaagatagctcagcatttgccaacatagtgcttaccttcaataaatgtgaaatagatatgatgcaatagaaaatcaactcacagcggacgtctctcatctgatgaaaattcttaggcgaagatattacctcgtggagaaggcgaaggatgcaaatattattggcattttggtgggaactctgggtgtagctggttatcttcatataatcgaacaaatgaaagatctgatcaaggccgctggaaagaaatcctatacattggtcatgggtaggcctaattctgccaagcttgcgaattttccagagtgcgaagtttttatttatgtttcttgtgcccaaactgctctgctggatagcaaggattttttagctccagttattacaccttttgaagctgtactagcttttggcaggggaagagagtggaccggagagtatcttttggatttcaaggatttgatcacttcagagaaacaagaagctgcgagcacaacaggagaagcacgcttttcttttatcaaaggtgtctatgtggaagataattgccctcaagaaaatgaggaacaatcggaaacgtcgctcgctctggctgaggtaactgaaaaggcactgagcatccaaaaccagcacaacgacgctgtcctttaccaaggaagagcaatgtcctcaatcgactacctcaaggcacgttcctaccgtggtctaactggagaatacgaaggcccagttcctgattcagtcttggtaggcagaatgggcagggcagctggttacagtgacgagaaaactgagagcgcacagtgaaggtagcattatgcgagttgatcagttgctacaggctccccttttttggcggtgaaaaaccaggagggtgcacaatgattcaatcatgcagcctggatggtttaccaacctgtgtacttttgtttaggtgggctaacaggtttatagacaattgtcaacatttttttattgttgagaatacctgtttctagtcccagggaacaatactttggatgctgttcaatcaggtggcttttttgctattaggaactactagtgtgtgcctaatcagtttgtatgcaatagtgagagctatctcactgatgtggggaagcctttttttttctttctaacaactgtggcatgtgttcagaagatgagatgtacactattcacaacatgcactgtactcatccattatgtttgtacaagacaccaaatttactctgcacattcttatttattggtaccggtagtagttcccaaagcacaa

SEQ ID NO: 2119 - DNA, 2179 bp, Zea Mays
gaactcctctgatgctacagtaataatagaagaaagatggacctgctcagcatcattctagttatagcatctctgctcccattcgcagcatctgatggtcaaggttattcacatgcctatcatatgtgttttccacttcgttttagttcactttctctaccaatgcgtagttttcaagctctggcaaataacaaagaagtaccttttgtttacttaggtgatgccttgtacgatatgaagctgaaactaaatgctactggcagtcagctttctgactggaaccaaaatcaagtcaacccatgcacctggaattctgttatttgtgacaacaacaaccatgttgtgcaagtaacattggcttctatggggtttactggagttctgtcaccaagaatcggagatctggagtatttaaatgttctgtccttgcctggtaacaacatctctggtggcataccagaagaatttggcaacctctctcgattgacaagcttagatttggaagacaacctgttggttgggccaataccagcttcacttggcaggctttcaaagctccagcttcttttttcaggtaataacttgacatgtggagcaaacttcctccatccatgtgcctcaaatatgtcttaccaaggttcttcccgtggttcgacaataggcattgtgcttgggacagttggaggtcttatggggcttctaatcatatgggctgtattcattatctgcaatggaaggaggaaaagccatctacgtgaaatatttgtggatgtatcaggtgaggatgatcgtagaattgcatttggccagttgaaaagatttgcatggcgagaattgcaacttgcaactgataatttcagtgagaaaaatgttcttggacaagggggttttgggaaagtatataaaggagcacttccagatggcactaagattgctgtaaaacggttaactgattacgaaagtccaggtggagaggctgctttcttgcgtgaggttgagctaattagtgttgcagttcaccggaatcttttaagattgattggtttctgtacaacacaaacagagcgcctacttgtttatcctttcatgcaaaatcttagtgtggcctaccgtctacgagaatttaaacctggggagccaatattagactggtccgcaaggaagcgagtggctataggcacagctcgtggactggagtatttgcacgagcactgcaatcctaagattatacatcgtgacgtcaaggctgccaatgtcttgcttgatgaaggttttgaaccggtggttggggatttcggcctggccaagctggtggacgtgcagaagacgtccgtgactacccaggtccgtggaaccatgggtcacatcgcccccgaatacctgtccactgggaagtcctccgagagaaccgatgtttttggctatggcataatgcttcttgagctagtcactggtcagcgtgccatcgacttttcacgtctggaggaagaagatgacgtgttgttacttgaccatgtcaagaagctgcagagggaagggcatctcgacgccatcgttgaccgcaacttgaacagctgttacaacgggcaggaggtggagatgatgatccagatcgcgctgctctgcacgcaggcgtcgcccgaggaccgcccgtccatgtccgaggtggtccggatgctggagggcgagggcctcgccgagaggtgggaggagtggcagcaggtggaggtgacgaggaggcaggactacgagcggatgcagcagcgcttcgactggggcgaggactccatctacaaccaggacgcgatcgaactgtccgccggcaggtgacgacgtcgggtcgtcacacggagcttgtcgtcgtcgacgtcgcagtgccgacatgtaactgtatatgtaaggcattgttgcgaagcttgttagcaaaatataatctgtgacactcacttagtgttgatacgtgcctgtattttattatttgtgtgtataaggaaggatgatttaaacgggttcaggtgtttaccggttgtccggctcccatcctgtaaagctctatataggggggtggggaccggttgaaaccacatcacatgcaagctgcaagaattggcttgacaaatatttaacgaactctattgtcgacataaaaagtaagtgataaacgaactctattgtggga

SEQ ID NO: 2120 - DNA, 2407 bp, Zea Mays
tcccgttccggaacagcaccaccagcggtcaatttcgacgcctggagtcaaccggccgagtcgtccacctacgccttcacagttcacacgcgcggcggcggcggcggcggtggagcgggtgatgagggaagtggcgtgaaccaccgaatctcgcggtcgcggagcgggcgtcgcgggcgaacgagccccggcaacctttccaaggaactcctctgatgctacagtaataatagaagaaagatggacctgctcagcatcattctagttatagcatctctgctcccattcgcagcatctgatggtcaaggtgatgccttgtacgatatgaagctgaaactaaatgctactggcagtcagctttctgactggaaccaaaatcaagtcaacccatgcacctggaattctgttatttgtgacaacaacaaccatgttgtgcaagtaacattggcttctatggggtttactggagttctgtcaccaagaatcggagatctggagtatttaaatgttctgtccttgcctggtaacaacatctctggtggcataccagaagaatttggcaacctctctcgattgacaagcttagatttggaagacaacctgttggttgggccaataccagcttcacttggcaggctttcaaagctccagcttctgatactaagtcaaaacaatctcaatggctctattcctgatacactagcaagcattttaagcttgacagacattcggctggcttacaataaactcactggtcaaataccttcccagttgtttcaagttgcacgttacaatttttcaggtaataacttgacatgtggagcaaacttcctccatccatgtgcctcaaatatgtcttaccaaggttcttcccgtggttcgacaataggcattgtgcttgggacagttggaggtcttatggggcttctaatcatatgggctgtattcattatctgcaatggaaggaggaaaagccatctacgtgaaatatttgtggatgtatcaggtgaggatgatcgtagaattgcatttggccagttgaaaagatttgcatggcgagaattgcaacttgcaactgataatttcagtgagaaaaatgttcttggacaagggggttttgggaaagtatataaaggagcacttccagatggcactaagattgctgtaaaacggttaactgattacgaaagtccaggtggagaggctgctttcttgcgtgaggttgagctaattagtgttgcagttcaccggaatcttttaagattgattggtttctgtacaacacaaacagagcgcctacttgtttatcctttcatgcaaaatcttagtgtggcctaccgtctacgagaatttaaacctggggagccaatattagactggtccgcaaggaagcgagtggctataggcacagctcgtggactggagtatttgcacgagcactgcaatcctaagattatacatcgtgacgtcaaggctgccaatgtcttgcttgatgaaggttttgaaccggtggttggggatttcggcctggccaagctggtggacgtgcagaagacgtccgtgactacccaggtccgtggaaccatgggtcacatcgcccccgaatacctgtccactgggaagtcctccgagagaaccgatgtttttggctatggcataatgcttcttgagctagtcactggtcagcgtgccatcgacttttcacgtctggaggaagaagatgacgtgttgttacttgaccatgtcaagaagctgcagagggaagggcatctcgacgccatcgttgaccgcaacttgaacagctgttacaacgggcaggaggtggagatgatgatccagatcgcgctgctctgcacgcaggcgtcgcccgaggaccgcccgtccatgtccgaggtggtccggatgctggagggcgagggcctcgccgagaggtgggaggagtggcagcaggtggaggtgacgaggaggcaggactacgagcggatgcagcagcgcttcgactggggcgaggactccatctacaaccaggacgcgatcgaactgtccgccggcaggtgacgacgtcgggtcgtcacacggagcttgtcgtcgtcgacgtcgcagtgccgacatgtaactgtatatgtaaggcattgttgcgaagcttgttagcaaaatataatctgtgacactcacttagtgttgatacgtgcctgtattttattatttgtgtgtataaggaaggatgatttaaacgggttcaggtgtttaccggttgtccggctcccatcctgtaaagctctatataggggggtggggaccggttgaaaccacatcacatgcaagctgcaagaattggcttgacaaatatttaacgaactctattgtcgacataaaaagtaagtgataaacgaactctattgtggga

SEQ ID NO: 2121 - DNA, 1730 bp, Zea Mays
gcgaaggaaaggcaaaggagaaaatttcgtagcaataaataaataaataaaattaataaaagaaaggtggcgtagaggataggaggagaaccaaggttgcgtctcgaaggttcttgcctcgttgggaagggatggcgtcggaggtggaggacgaggcggcgacgccgctgctcgccaacggtgcagccgacgtccgccggaggagggaccaggcgaaggcaattctgtccacgcaggccgtcaggatcgccaccaaggccgagcagcatgagcgcttcatctttaaggtcacacacttgctgggtgttcttggatttgggggattttgctatctcttgggtgccagatgtgccatatgtgtactgcctgttctatgtcatatttgttccgctccgctggatttactaccgctacaagaaatggcattactaccttctggacttctgctactatgccaacacctttctccttgtaatgattctcttctacccagaggatgaaaaactttttatggtttgcttctcgtttgcagagggtccgcttgcttgggcattaattgtgtggcgttgcagcttggttttcagttcatttgacaaacttgttagtgtcctgatacatctcttacctgggattgttctattcactatccggtggtggaatccacaaacatttgctgccatgcacccagaaggaagagatgctagagtcacatggccatatgtggaggacaaatcatatctgtggacatggcttttttttgttccgctagctgcttacaccctgtggcaacttatgtatttcctcatagttaatgtcctgcgtcgacagaggttgttaagggaccctgaagtcatgacatcctacagggagctctcgaagaaagcacagaaagcgaacaacatctggtggaggctgagcggactgctgggtgaccggaaccggcaggtcatgtacatactgctccaggcgctgttcacagtggcaacaatggcactgaccgtacctatattcctgtcctaccggatgcacgtggtgttcctgatactcaaggtgtgcgcgtcgacatggaacggtggcagcttcatcttggaggtgatgcctcggcaagtagtgcagaagcagctgaagaaactggacatgaagcccatggaacaggggagctcgacacaaggtgcgccaggtggtgatggtggcacattgggtaaccaccaccagcacacatccgaggagcatatccaggagtgaggaaattgaagctggatgtaagattagattttgatgttcactgacacaacctttgttgtcatcgagtgcgctttgtgttggagtttttctttagttcttcccagtttgtgagttgtgacatctagtcatctataggtttataggctggacgatatggggtgagagattgtgcgtgcccatcttttgtcgggcttgggcaaagatatgtcgagatgtttactttctctgtagaatttcgtgaagctgttgcattgttcgtttgaagatggcgacgatgttcagatgatgcttcatgttgaaggacatatctttatttgcttcattgtacccagattttatttgcttcatgttgaaggacagactatgatgatgcgtgctgaggtgatttgcttattttatttgctgcgtgcaagaaaaggttcctgggagatgccctgtaaatgcagtgggtgaccacctgtgttgactgggaccaagtcagaagg

SEQ ID NO: 2122 - DNA, 1134 bp, Zea Mays
gaaaatgattgaattgagagcaaattcttccttcataaatgaatttgtaagagttaggcgatggacgccagagattgggtttatgagggtggacctcaccgagtacaaaagaactgcgccctgccaactgcccgaatgatgatgggcgtcagacttcttcgattatgcggcgacttgggccgtcctcgtaagtgtcgaggttggagcttggctggtggtcgacgatggcaacctcgtacgccacgaggctcgactgatgatcatcgtggtggaccacacagatcttggcgctgcgcttgcaaccacttgcacgcccgatgtcgacgagctatcacggatgttgtcggagtggacgaggcggggttcgctggtggccaaaatcacgtggattgggagccgaaggtccctgcgcgcgggggtagaagccaggtggtggcggtggcggttacacgcgccaagacatggctggccgttgcggtttacaaggatccaggaaaagagacgaaaaagaaagacagtgaacagggggatatcaagaaatgcacttcgcctgtaagatgctattttatttgcactaagtctgggtggaggggggatgaggcttatattccaattgacaagtgccgcaaactgttcatgcatatccatactgctcccaccattgcaaattatatgaaaaggtttcatttgatactttccaaaactctaacactggatgttgatttatcgacaattgacgttatactgattgatgatgaaccttgtcgggacgagcatgggaacattgttatgctagatgggaagcgtttgatccatactgatgggactggcttcatatctgaaaatttggctaagaaatgccctagcagaataatcaaaggaaagaagtcaaaagtttatatgcatcaaggtgaaacaacgcctcttctcatgcaggtccgtcttttttataatggatatgctgtaaagggaactctgctagttgacaaaaggatctatctatctatcaacagagatccttacataatagagatcgatctatctgttaacggagatcctagccatataggcatgctatacagggattctaacaccccctcagtttgagcgtcccatgagacggtgagattggta

SEQ ID NO: 2123 - DNA, 2616 bp, Zea Mays
aaatagagcctatcttcctctttgtgagggactgcaaacattcttgtttgtaggcattttttttcatacgaaagcaagatctcgatggttccgatttaaaaaagagaggcattctagtgaagtcgagaaggcgcaataacacgctgctccgtctccatctccatctccaattacctatcctctccgtcgaatcagaaaccctaacctcaccgtaccacggcctacgagccggaatgaccacatcagccgccgacgatggcagctctttggcgcctaccatcaccgagggagaaaccacagccgacgccggtgctggggcaggtgttgagtgcgtcgagggcaaagagatgaaggttggggccgcggctccagttgaggagccggataaggaggcggcgcgggaggaggatcctggtgatgatgatgactatgaggaggaggaggaggaggaggaggaggaggaggaggaggaggaggaggaggaggaggagaaggaagagctggatgaggagcccgaggcatcggaagaggaccccgaggaggtggaagagttgaaggaggagggcgacggtattgcggaggaaggcttggtggatgggtcggaggcgaacgatgataaagatgctgatcaattgagcagtgggagtgatagtggtggaagcagaagtcgtggtatgcagaactctgaacttgctggaggtcttgaaatatttgttgatgacttgcctcaagattgtgtcaaggaagacattgctatggccttttctcaatcaggggaggtcaaatctgttaggataattaaaaattcatcaactggaaagaaccaagacattgcatttgtttgttacacaagtattgaagctgcaaagaaggttcttgctgaatttaaggagggaattgaggtaaaaggaaaaatggtcagggtatctgcttgtcaagataataataccctttacctggggaacatttgcaagggttggaccagagatcaggtgttgaacaccctaaaaagtattggaattcaagagtgtgagataagctttcccagttacaagggaggaagccgagggtttgcttttcttaagttcacctcacattactatgctagagcagcacttcgtcgcttaatgaaatccgatgctatttttggtactgatagaagcgctaaagtatccttttatcgaacccccacaaaatcatccaagagacttatacaggcaaaaatagtatacctggaacatgtccctctttcttgggatgaaaataaagttaaggaatactgtgaagaatatggggagatcctgaaagctgatgttttccagatatcaaagaatatggaaaatgaaacaatttcttttgttgaattctcatccaggaagggtgcgttagcttgtgtgacaggaataaacaaagcaaatattgttgatggaagcttcaagttgtgtgcatatcttgcttggccaaaaagtgcttcaaaggtcaatagtgctgcaccttcaaatgctgccaccgcaaccgagaaggacaaaacccacacagagaagattcttgtagacatcgatttgcaacataaattccagaaaggcgacaagagcaaacttacatctcagacaaaggaggcaattatgaagaagaaaaaatcaagtaaattaccaaatgacaatgatacaaaactaacctcacaaggtgctgccgaagtaccacaaacctccaaatcttctgaaggcaagaggaaagttggaaaaaacaaacatgcctctgtataccaaaaaccattgaagaaagcaataaataatcgtaacgttgatgagagccagctaactcatcggagtgctgcagtactgcaaacgtctaacacttccaaagggaaaaggaaagccagtgagaacagaagtttatatttaaacgaaaaggctctcaagaaagcacgtggcaatagtaatttgggtggaagttcaagatctaaatcatatgcctctgatctggaacctcatgctggattcatttcgcctgcgattcgagataatggcagtgatgcatataatcgacagagaactgcacggtatgatatccatcctatagatgtccatccttatgctagagcgccaccatcagcctactctggttacaaaagccatgctggctatgaggctgcaaatacatatgaatacgcagggaaccgggcgcctacacctccaagtggatcttacatccctcgaagaggacattactaacaaaaaatggagtgctggctctgtgcatccattcgatcgcatggtaacaaggaatcaaggatctccgtatttagatgtttcatacatgttatgtagacgttaaaaagtaacttgtttaaggaaaataagaaccctctgcagctttccctttgactgaagtgcagcccggcacaccggttgcttgttgaagaatgctttttttattattattgtagttaagagtccagacgtcgttattaccacttatcttcgtattggaaaaaaaatgtctttttcttagtccagcaatccactaatagcttctatgtttttttgtgctcagcaatatcttatttgcttttttaagacaaacatgccgtgcgtctcaacaggagaaaaaaat

SEQ ID NO: 2124 - DNA, 1547 bp, Zea Mays
tcgtctgtgggacatacatgccattttttttgtttaaccttttctagctgattagcagccatctgagaacgtgagaagataggtgaaattaatcttggagttctgaatccatcctatcttgtagcttcacatttgcacattgactcctggagtacatgacttttgagctaagtgtttttcgtgagttctcataaatcattgtcctcataacttgtaatgggtggaagccagtatgatgatgactgggtgttgcccagtgccgatatcactcttgttctggttgggaaacttggctatggcaagagtgcaactggaaatagcatccttggacgggaagcatttgtatcagaatattcacatgccagtgttactaatacttgtcagttgggaagcactaccctgaaggacggccgcaccatcaatgttattgatacaccagggttatttgatatgagcattacatcggacgaggctggtaaagagattgttaaatgcatgaacatggctaaagatgggatacatgcagttctgatggttttttctgccacatctcggttttctcgagaggacgcaagtacagttgagaccattaaagtcttctttggtgaaaggattgtcgaccacatgattttagtcttcacttatggagatttagttggtgaatctaagttgaagaaaatgttaaataatgcgccagagtatttgcagaatgttgttgagctatgccaaaacagagtggttgtcttcgataacgtgactgaagaccgaaggctccaagcgcagcaacttgacaaattgctcgatgtagtggattcagtttgtgcaaaaaatggaggaaaaccattttcagatcaaatgttcactagcatcaaggaggtgcatgatagagaaaaagaggtgcatacctcgggatattcagatgagcagatatctgaattgaaaaaggagattcatagaactagggatgaacagcttgcgcacataaccaacatggtcgaggaaaagttaaactgcactgtggagaagttgcaacagcagctcatggaagaacagaacgcaaggctggaagctgagaaggtggcgtacgaagctaggctgaaatcagaagcggagatccagaagctcaaggagagcctcaagaaagctcaaatggaaaatgatgagttccggaggatggcgcagagccagggcagtaaatgtgctatcctataggcattagtacttgctagaaattggtggagctatcgtgctgacgcgtctcttgtacgtagtactttctctgttccaaaaatatatagttcaatacaccttagtagagatgactacgagagtatccaaacaagacctcgtcggacatgttagcctgaagcttgcttatggacatattggatatagtttttggctgtatgcgcacaacattggagttgttccccaccaaatagaagcattagggatcatccgacaaagaaaacgagtatcctctttctcactagaattatcatgacgaacagcaaaaggatgaataacaccgtcttcgtcttcattgc

SEQ ID NO: 2125 - DNA, 1655 bp, Zea Mays
ccgaaaaacaagaaccatcgtacgggtgacgtggccaacacttccgtttttgttccggccaggcggctcgtgtccccgcagtcggcaggagcgcggacgcagatccgacggcctaggggcactccggggaggccacgcaacgcgcgcggcggcaggcaagaactccgaagtcggcacggccgcacggccgctacgatacggcgccctcacaattgggccgttataaaacgtcacaggaggaggagataggcacacggcgtgccgcggtgggcgaccttttttgcaccgggagataaatcgacagcaccctgacctcaagtcctcaacccgcaggccgcagctgctcccgcccgccgcgcaagcggccaagcgccgccggttcttctcgagcaagagtacatgacttttgagctaagtgtttttcgtgagttgggaagcactaccctgaaggacggccgcaccatcaatgttattgatacaccagggttatttgatatgagcattacatcggacgaggctggtaaagagattgttaaatgcatgaacatggctaaagatgggatacatgcagttctgatggttttttctgccacatctcggttttctcgagaggacgcaagtacagttgagaccattaaagtcttctttggtgaaaggattgtcgaccacatgattttagtcttcacttatggagatttagttggtgaatctaagttgaagaaaatgttaaataatgcgccagagtatttgcagaatgttgttgagctatgccaaaacagagtggttgtcttcgataacgtgactgaagaccgaaggctccaagcgcagcaacttgacaaattgctcgatgtagtggattcagtttgtgcaaaaaatggaggaaaaccattttcagatcaaatgttcactagcatcaaggaggtgcatgatagagaaaaagaggtgcatacctcgggatattcagatgagcagatatctgaattgaaaaaggagattcatagaactagggatgaacagcttgcgcacataaccaacatggtcgaggaaaagttaaactgcactgtggagaagttgcaacagcagctcatggaagaacagaacgcaaggctggaagctgagaaggtggcgtacgaagctaggctgaaatcagaagcggagatccagaagctcaaggagagcctcaagaaagctcaaatggaaaatgatgagttccggaggatggcgcagagccagggcagtaaatgtgctatcctataggcattagtacttgctagaaattggtggagctatcgtgctgacgcgtctcttgtacgtagtactttctctgttccaaaaatatatagttcaatacaccttagtagagatgactacgagagtatccaaacaagacctcgtcggacatgttagcctgaagcttgcttatggacatattggatatagtttttgggtgagaacttttgaacaacttccttgtttttttctctcatgttctaatgcatcttttctctagctgtatgcgcacaacattggagttgttccccaccaaatagaagcattagggatcatccgacaaagaaaacgagtatcctctttctcactagaattatcatgacgaacagcaaaaggatgaataacaccgtcttcgtcttcattgc

SEQ ID NO: 2126 - DNA, 1792 bp, Zea Mays
ccgaaaaacaagaaccatcgtacgggtgacgtggccaacacttccgtttttgttccggccaggcggctcgtgtccccgcagtcggcaggagcgcggacgcagatccgacggcctaggggcactccggggaggccacgcaacgcgcgcggcggcaggcaagaactccgaagtcggcacggccgcacggccgctacgatacggcgccctcacaattgggccgttataaaacgtcacaggaggaggagataggcacacggcgtgccgcggtgggcgaccttttttgcaccgggagataaatcgacagcaccctgacctcaagtcctcaacccgcaggccgcagctgctcccgcccgccgcgcaagcggccaagcgccgccggttcttctcgagcaattctcataaatcattgtcctcataacttgtaatgggtggaagccagtatgatgatgactgggtgttgcccagtgccgatatcactcttgttctggttgggaaacttggctatggcaagagtgcaactggaaatagcatccttggacgggaagcatttgtatcagaatattcacatgccagtgttactaatacttgtcagttgggaagcactaccctgaaggacggccgcaccatcaatgttattgatacaccagggttatttgatatgagcattacatcggacgaggctggtaaagagattgttaaatgcatgaacatggctaaagatgggatacatgcagttctgatggttttttctgccacatctcggttttctcgagaggacgcaagtacagttgagaccattaaagtcttctttggtgaaaggattgtcgaccacatgattttagtcttcacttatggagatttagttggtgaatctaagttgaagaaaatgttaaataatgcgccagagtatttgcagagtggttgtcttcgataacgtgactgaagaccgaaggctccaagcgcagcaacttgacaaattgctcgatgtagtggattcagtttgtgcaaaaaatggaggaaaaccattttcagatcaaatgttcactagcatcaaggaggtgcatgatagagaaaaagaggtgcatacctcgggatattcagatgagcagatatctgaattgaaaaaggagattcatagaactagggatgaacagcttgcgcacataaccaacatggtcgaggaaaagttaaactgcactgtggagaagttgcaacagcagctcatggaagaacagaacgcaaggctggaagctgagaaggtggcgtacgaagctaggctgaaatcagaagcggagatccagaagctcaaggagagcctcaagaaagctcaaatggaaaatgatgagttccggaggatggcgcagagccagggcagtaaatgtgctatcctataggcattagtacttgctagaaattggtggagctatcgtgctgacgcgtctcttgtacgtagtactttctctgttccaaaaatatatagttcaatacaccttagtagagatgactacgagagtatccaaacaagacctcgtcggacatgttagcctgaagcttgcttatggacatattggatatagtttttgggtgagaacttttgaacaacttccttgtttttttctctcatgttctaatgcatcttttctctagctgtatgcgcacaacattggagttgttccccaccaaatagaagcattagggatcatccgacaaagaaaacgagtatcctctttctcactagaattatcatgacgaacagcaaaaggatgaataacaccgtcttcgtcttcattgc

SEQ ID NO: 2127 - DNA, 1814 bp, Zea Mays
ccgaaaaacaagaaccatcgtacgggtgacgtggccaacacttccgtttttgttccggccaggcggctcgtgtccccgcagtcggcaggagcgcggacgcagatccgacggcctaggggcactccggggaggccacgcaacgcgcgcggcggcaggcaagaactccgaagtcggcacggccgcacggccgctacgatacggcgccctcacaattgggccgttataaaacgtcacaggaggaggagataggcacacggcgtgccgcggtgggcgaccttttttgcaccgggagataaatcgacagcaccctgacctcaagtcctcaacccgcaggccgcagctgctcccgcccgccgcgcaagcggccaagcgccgccggttcttctcgattctcataaatcattgtcctcataacttgtaatgggtggaagccagtatgatgatgactgggtgttgcccagtgccgatatcactcttgttctggttgggaaacttggctatggcaagagtgcaactggaaatagcatccttggacgggaagcatttgtatcagaatattcacatgccagtgttactaatacttgtcagttgggaagcactaccctgaaggacggccgcaccatcaatgttattgatacaccagggttatttgatatgagcattacatcggacgaggctggtaaagagattgttaaatgcatgaacatggctaaagatgggatacatgcagttctgatggttttttctgccacatctcggttttctcgagaggacgcaagtacagttgagaccattaaagtcttctttggtgaaaggattgtcgaccacatgattttagtcttcacttatggagatttagttggtgaatctaagttgaagaaaatgttaaataatgcgccagagtatttgcagaatgttgttgagctatgccaaaacagagtggttgtcttcgataacgtgactgaagaccgaaggctccaagcgcagcaacttgacaaattgctcgatgtagtggattcagtttgtgcaaaaaatggaggaaaaccattttcagatcaaatgttcactagcatcaaggaggtgcatgatagagaaaaagaggtgcatacctcgggatattcagatgagcagatatctgaattgaaaaaggagattcatagaactagggatgaacagcttgcgcacataaccaacatggtcgaggaaaagttaaactgcactgtggagaagttgcaacagcagctcatggaagaacagaacgcaaggctggaagctgagaaggtggcgtacgaagctaggctgaaatcagaagcggagatccagaagctcaaggagagcctcaagaaagctcaaatggaaaatgatgagttccggaggatggcgcagagccagggcagtaaatgtgctatcctataggcattagtacttgctagaaattggtggagctatcgtgctgacgcgtctcttgtacgtagtactttctctgttccaaaaatatatagttcaatacaccttagtagagatgactacgagagtatccaaacaagacctcgtcggacatgttagcctgaagcttgcttatggacatattggatatagtttttgggtgagaacttttgaacaacttccttgtttttttctctcatgttctaatgcatcttttctctagctgtatgcgcacaacattggagttgttccccaccaaatagaagcattagggatcatccgacaaagaaaacgagtatcctctttctcactagaattatcatgacgaacagcaaaaggatgaataacaccgtcttcgtcttcattgc

SEQ ID NO: 2128 - DNA, 732 bp, Zea Mays
tcttctctgtagcgtgagatgtggaaataaataaagccaccttcccatgaacaacccattggacggatcgagctggtactggcacactcgatccaatattttagctagctagcaagcaaagcaagccttgagcttgagcggcggctagcgcaatgggaggcgtggcgtcggagctggtaggagccagcagggagaggcagagcaggaagaggaagcagttccacacggtggagctcaagatcaggatggactgcgacggctgcgagctcaaggggtggagtcggtggagatcaaccggaagcagcagaaggtgacggtgaaggggttcgtggaggcgcagcgggtgcttaggcgcgcccagtccacggggaagcgcgtcgagctgtggccctacgtgccctacaccaacctctacgtcgcgccgccggtgtacgacaagagggcgccgccgggccacgtccgcagggtcgacgcactcatcgcgcccgccgccggccaggaagagcacctcgccacgctcttcagcgacgataaccccaacgcctgctcccttatgtgatgcctcatgctagctagagccgcctgctccccggccttatgcgatgctagctgcttgcttcatccacgctgtactagcgatgtacatgcattgtttgcatgaaaacgaactgatgctccgtagttacgcagtaatataataatctctatcttttaattaattaaacgacaata

SEQ ID NO: 2129 - DNA, 1646 bp, Zea Mays
ctccaagtcccaatccaccgacgaattccaaaccctgcctaggacctcggcgccactcgccgcacgtcgtccacgtccgcctccaccccaatccgatggggtatgaagagagcaaaaaacatctcctcagtctcagctaccctgagctgcaatgtttgtgcaaaaggtataaccttcctgctaagaagacccactctcagttagcaagttcgctcgcctcgctgcttgaggcatctccatctcctgctcctcctcctgtccaattagcaaatatgaaagaagcatccacatgcaatcatgctaacaacaaaagaggcccatacaatggcagggatgatggtaaaccacttgtgcatgcgaaacatcaaaaaggagatcagacacctgttgatgaaacatctaaaaagcaggggattgacactggtacgagtatacctccagtttctatgaaccatggaagaccagaatatcatggccatctatcttctgacctgagaactgctcataatttacagtcccaatgtgacgtgggaattgcaactaatacaacaaatctagaatttgttggcaaacatgattgttcacctgctaacgtaattgatcaaatctgtccccctattattcaaaaatatccttctaatggtaatggtcaggcttccactaagttcggccgtatgaatgataacacagaaaagggttgtcggctgtctgataagatatcagcaaatgctgctgctgttcaattttctgtaatgtcagatgagggcattgatcttcttgttgatctgaactccagttcagcaacatgggccaagaacttcatggcagaaatgcacattacccctccgtctgaacatgggaatttctctagcttcattagcagtttgtcaactaaggatgatcatagcactgcgtcaccatctggaaatatcattgttgacattcagaacaagggagctgagaacattgttccttccactgattcatcacttgcttcagatgttggtgagagctcccgttcagtgctctatccagttgatacgactactgtgaactcagtgtcatccacgtctacagtggctggtaccccagttgaactttctgggtatcaggagggtgctccagtggtatgttcttcatgtttaacagctgatgttcagaacaatgtgacatctgatatgccaggtgcttcggataacgaggtgcttcctccagaacctgctgatgtctttttgcagtctgaaagaatcactgcaccagctgtatgtggttcagtgcaaccaattggcaataaatgcacaatgagttctggggatgaggttagaagtggctccaatgaagactcctgtccaaaatcttcaggaaaacaaactggagatgaaaccctaatggaaaatgaacctgtgaaggcagtagcagtggaagaaaatataggtcgtgatgacagtttgtccatttcttatcaactagcctgtaagacagtagcagaactgcctgttacagatgcccagtcgcctgctagttcttctggtcattttattgctggaaattttgacaacacacatccaacatcttccgccacttcggtctcatgattctattctagtacatatttcagttcaggttccctgctgtaatgtttgaag

SEQ ID NO: 2130 - DNA, 2433 bp, Zea Mays
cagcaggcagcgcagctaggtggggtggggccgtggggggcagccggtgggaacgcttgccccgaactcccgatacccacacccgtcttgactctggccgtctctattctccaagtcccaatccaccgacgaattccaaaccctgcctaggacctcggcgccactcgccgcacgtcgtccacgtccgcctccaccccaatccgatggggtatgaagagagcaaaaaacatctcctcagtctcagctaccctgagctgcaatgtttgtgcaaaaggtataaccttcctgctaagaagacccactctcagttagcaagttcgctcgcctcgctgcttgaggcatctccatctcctgctcctcctcctgtccaattagcaaatatgaaagaagcatccacatgcaatcatgctaacaacaaaagaggcccatacaatggcagggatgatggtaaaccacttgtgcatgcgaaacatcaaaaaggagatcagacacctgttgatgaaacatctaaaaaggggattgacactggtacgagtatacctccagtttctatgaaccatggaagaccagaatatcatggccatctatcttctgacctgagaactgctcataatttacagtcccaatgtgacgtgggaattgcaactaatacaacaaatctagaatttgttggcaaacatgattgttcacctgctaacgtaattgatcaaatctgtccccctattattcaaaaatatccttctaatggtaatggtcaggcttccactaagttcggccgtatgaatgataacacagaaaagggttgtcggctgtctgataagatatcagcaaatgctgctgctgttcaattttctgtaatgtcagatgagggcattgatcttcttgttgatctgaactccagttcagcaacatgggccaagaacttcatggcagaaatgcacattacccctccgtctgaacatgggaatttctctagcttcattagcagtttgtcaactaaggatgatcatagcactgcgtcaccatctggaaatatcattgttgacattcagaacaagggagctgagaacattgttccttccactgattcatcacttgcttcagatgttggtgcttcggataacgaggtgcttcctccagaacctgctgatgtctttttgcagtctgaaagaatcactgcaccagctgtatgtggttcagtgcaaccaattggcaataaatgcacaatgagttctggggatgaggttagaagtggctccaatgaagactcctgtccaaaatcttcaggaaaacaaactggagatgaaaccctaatggaaaatgaacctgtgaaggcagtagcagtggaagaaaatataggtcgtgatgacagtttgtccatttcttatcaactagcctgtaagacagtagcagaactgcctgttacagatgcccagtcgcctgctagttcttctggtcattttattgctggaaattttgacaacacacatccaacatcttccgccacttcggacaatgctattaattctctgacttcaaagttcggtgcagagctagcacaaagtcatgattctacggacaaaaagggacagaatgatgctgaggaggttgaggagttagagagtatgacaccagcagcctatagtgaacctcccagaaatatacaacttagcttacgaagtgcttccgctaaggtcaagccttctacactaccaagacgatcagcgaggcttcttcctaagtaaccgccgtaaatgatacagatgagatccagtgtgagaatagcctcactaccggcttagtcagattccatgaggatgaagggatagaaaacagttaacaagcttagattctaattttgtatgttcttgttaattcttttttgttccagcaactgagtagaacttggtttctgaagcttaggctgcgtgactttttatctcctcgtgtccatcaacatctgttacagttacagtcgtactgtcgagctttcatacactattgtacaaacgactcctacttttacagcatctgtttcctctggtctgcgacttgttggatgatgtcttctgtgttttatatcaatgcaatataactattggtgcaggagcaatgatatttccgattccacaagttaaccggaaatcttcatgggtgatagctgtgtcagattctttcgcgcatagtgatagctgtgtcagtttacccccattttcttgggcatcacttgtctcaaatgaagttcattggaggttcgcaatttatgttccgtggcatcacaccggcacctacctatttgctggttatctaattttacatacggaggacctggattgccacctgctaattgctatcgcggccttgaccaaaaaggtaagagcatcccttctcaatcagagccgtggaaccatagccaaatttgccaagtgttaa

SEQ ID NO: 2131 - DNA, 2489 bp, Zea Mays
ccggtttggaccatgcaacatccaatccgatggggtatgaagagagcaaaaaacatctcctcagtctcagctaccctgagctgcaatgtttgtgcaaaaggtataaccttcctgctaagaagacccactctcagttagcaagttcgctcgcctcgctgcttgaggcatctccatctcctgctcctcctcctgtccaattagcaaatatgaaagaagcatccacatgcaatcatgctaacaacaaaagaggcccatacaatggcagggatgatggtaaaccacttgtgcatgcgaaacatcaaaaaggagatcagacacctgttgatgaaacatctaaaaaggggattgacactggtacgagtatacctccagtttctatgaaccatggaagaccagaatatcatggccatctatcttctgacctgagaactgctcataatttacagtcccaatgtgacgtgggaattgcaactaatacaacaaatctagaatttgttggcaaacatgattgttcacctgctaacgtaattgatcaaatctgtccccctattattcaaaaatatccttctaatggtaatggtcaggcttccactaagttcggccgtatgaatgataacacagaaaagggttgtcggctgtctgataagatatcagcaaatgctgctgctgttcaattttctgtaatgtcagatgagggcattgatcttcttgttgatctgaactccagttcagcaacatgggccaagaacttcatggcagaaatgcacattacccctccgtctgaacatgggaatttctctagcttcattagcagtttgtcaactaaggatgatcatagcactgcgtcaccatctggaaatatcattgttgacattcagaacaagggagctgagaacattgttccttccactgattcatcacttgcttcagatgttggtgagagctcccgttcagtgctctatccagttgatacgactactgtgaactcagtgtcatccacgtctacagtggctggtaccccagttgaactttctgggtatcaggagggtgctccagtggtatgttcttcatgtttaacagctgatgttcagaacaatgtgacatctgatatgccaggtgcttcggataacgaggtgcttcctccagaacctgctgatgtctttttgcagtctgaaagaatcactgcaccagctgtatgtggttcagtgcaaccaattggcaataaatgcacaatgagttctggggatgaggttagaagtggctccaatgaagactcctgtccaaaatcttcaggaaaacaaactggagatgaaaccctaatggaaaatgaacctgtgaaggcagtagcagtggaagaaaatataggtcgtgatgacagtttgtccatttcttatcaactagcctgtaagacagtagcagaactgcctgttacagatgcccagtcgcctgctagttcttctggtcattttattgctggaaattttgacaacacacatccaacatcttccgccacttcgatcttggtgtacccagagcagttcactaacttacttctatcattctgaaggacaatgctattaattctctgacttcaaagttcggtgcagagctagcacaaagtcatgattctacggacaaaaagggacagaatgatgctgaggaggttgaggagttagagagtatgacaccagcagcctatagtgaacctcccagaaatatacaacttagcttacgaagtgcttccgctaaggtcaagccttctacactaccaagacgatcagcgaggcttcttcctaagtaaccgccgtaaatgatacagatgagatccagtgtgagaatagcctcactaccggcttagtcagattccatgaggatgaagggatagaaaacagttaacaagcttagattctaattttgtatgttcttgttaattcttttttgttccagcaactgagtagaacttggtttctgaagcttaggctgcgtgactttttatctcctcgtgtccatcaacatctgttacagttacagtcgtactgtcgagctttcatacactattgtacaaacgactcctacttttacagcatctgtttcctctggtctgcgacttgttggatgatgtcttctgtgttttatatcaatgcaatataactattggtgcaggagcaatgatatttccgattccacaagttaaccggaaatcttcatgggtgatagctgtgtcagattctttcgcgcatagtgatagctgtgtcagtttacccccattttcttgggcatcacttgtctcaaatgaagttcattggaggttcgcaatttatgttccgtggcatcacaccggcacctacctatttgctggttatctaattttacatacggaggacctggattgccacctgctaattgctatcgcggccttgaccaaaaaggtaagagcatcccttctcaatcagagccgtggaaccatagccaaatttgccaagtgttaa

SEQ ID NO: 2132 - DNA, 2560 bp, Zea Mays
ggagaaggtctagctctttccggtttggaccatgcaacatccaatccgatggggtatgaagagagcaaaaaacatctcctcagtctcagctaccctgagctgcaatgtttgtgcaaaaggtataaccttcctgctaagaagacccactctcagttagcaagttcgctcgcctcgctgcttgaggcatctccatctcctgctcctcctcctgtccaattagcaaatatgaaagaagcatccacatgcaatcatgctaacaacaaaagaggcccatacaatggcagggatgatggtaaaccacttgtgcatgcgaaacatcaaaaaggagatcagacacctgttgatgaaacatctaaaaaggggattgacactggtacgagtatacctccagtttctatgaaccatggaagaccagaatatcatggccatctatcttctgacctgagaactgctcataatttacagtcccaatgtgacgtgggaattgcaactaatacaacaaatctagaatttgttggcaaacatgattgttcacctgctaacgtaattgatcaaatctgtccccctattattcaaaaatatccttctaatggtaatggtcaggcttccactaagttcggccgtatgaatgataacacagaaaagggttgtcggctgtctgataagatatcagcaaatgctgctgctgttcaattttctgtaatgtcagatgagggcattgatcttcttgttgatctgaactccagttcagcaacatgggccaagaacttcatggcagaaatgcacattacccctccgtctgaacatgggaatttctctagcttcattagcagtttgtcaactaaggatgatcatagcactgcgtcaccatctggaaatatcattgttgacattcagaacaagggagctgagaacattgttccttccactgattcatcacttgcttcagatgttggtgagagctcccgttcagtgctctatccagttgatacgactactgtgaactcagtgtcatccacgtctacagtggctggtaccccagttgaactttctgggtatcaggagggtgctccagtggtatgttcttcatgtttaacagctgatgttcagaacaatgtgacatctgatatgccaggtgcttcggataacgaggtgcttcctccagaacctgctgatgtctttttgcagtctgaaagaatcactgcaccagctgtatgtggttcagtgcaaccaattggcaataaatgcacaatgagttctggggatgaggttagaagtggctccaatgaagactcctgtccaaaatcttcaggaaaacaaactggagatgaaaccctaatggaaaatgaacctgtgaaggcagtagcagtggaagaaaatataggtcgtgatgacagtttgtccatttcttatcaactagcctgtaagacagtagcagaactgcctgttacagatgcccagtcgcctgctagttcttctggtcattttattgctggaaattttgacaacacacatccaacatcttccgccacttcgtaaaaggggaagagaatgaaagctgctaaacgtattattttggtcaatggcaaagtctacgtgtctcacttttagctccgcaactgcaaacctgcttatttggacaatgctattaattctctgacttcaaagttcggtgcagagctagcacaaagtcatgattctacggacaaaaagggacagaatgatgctgaggaggttgaggagttagagagtatgacaccagcagcctatagtgaacctcccagaaatatacaacttagcttacgaagtgcttccgctaaggtcaagccttctacactaccaagacgatcagcgaggcttcttcctaagtaaccgccgtaaatgatacagatgagatccagtgtgagaatagcctcactaccggcttagtcagattccatgaggatgaagggatagaaaacagttaacaagcttagattctaattttgtatgttcttgttaattcttttttgttccagcaactgagtagaacttggtttctgaagcttaggctgcgtgactttttatctcctcgtgtccatcaacatctgttacagttacagtcgtactgtcgagctttcatacactattgtacaaacgactcctacttttacagcatctgtttcctctggtctgcgacttgttggatgatgtcttctgtgttttatatcaatgcaatataactattggtgcaggagcaatgatatttccgattccacaagttaaccggaaatcttcatgggtgatagctgtgtcagattctttcgcgcatagtgatagctgtgtcagtttacccccattttcttgggcatcacttgtctcaaatgaagttcattggaggttcgcaatttatgttccgtggcatcacaccggcacctacctatttgctggttatctaattttacatacggaggacctggattgccacctgctaattgctatcgcggccttgaccaaaaaggtaagagcatcccttctcaatcagagccgtggaaccatagccaaatttgccaagtgttaa

SEQ ID NO: 2133 - DNA, 813 bp, Zea Mays
gctgctcatactcttaagaccgatccgacccaaagccaaacccgattgccctcgtagtcgtttgtcatcgcgcgaccgattaccccgccgccgccgcgtcggcagcggcgatggcgtcgtcgttgtcgcgggcgctgctccgccgcgtcgcagaactggctagaggacgcctccgcgccaaccaccgcatgctctcatccgcgtcgtccaccgccgccatcgagagggcttcgcagttgccggcggaggcccaggccgtgcgcatgacggagggttgcgtgcgggtaagatgctgcgcttaagcgttgaagctggtggatgttctgggttccaatattctttcgctcttgatgacaagaaaaatgcagatgacaggttttttgagactgatggtgttagattggtcgtggatgacatctcatataatttcgtaaaaggtgccactgtggattacgaggaggaacttatacgttcaacatttgtggtttcaacaaatcccagtgctgttggaggctgcagttgcaagagttctttcatggtgaaatagcttcaatgttaccttgaagagatcaataaccggagttctgtagcgaaacatacgctttagatctgagtgtacaattggtattttttggtagctcttgagatgtttctttttgagttttattaccttaaagagaacaataaccagaaatatcaatcacaaactgtctggttcaatttgtatctctaacatgtgaaatgatgacaaatttatgtacatgtaatcttatggctattaacatttgactctatgtcgcttttacaacaaca

SEQ ID NO: 2134 - DNA, 5701 bp, Zea Mays
gtgggccggctgatcgtctttcggcctggtgggagcgttcgtttcgttggcccgtgccggcgtgccctccggtcctcttctcgttctcccccgagcggctctcgatctggtttgctccgcgtcgtcgctccctggacgtcgccgccctagtggttcgcttcgccgcttctcgcgctctccggcttctacgctggtggtcggttgttcgagagcggctccggcgggcggcgtagatcggcggtccaggtggtgtattagacatgtctttcaggaagcgccaaccttccagtaacggagcttccattaatttagctcccctgggttttccaagtcaggaacttgagaaggttaatcctgtaaattcagtgatgtcaaccgattttgaatccatggatggtgttgatattgatatgagggaagtttactttctcattatgcattttttatctcatggtccattcaaacggacctttggagaattgtgcaatgaactcctagaacatcaactgctacctagaagataccatgcttggtattcacgtggtggtttccatagtggcgaagaaaatgatgatggcatatcactccctttggattatgtaaagctagctgagaggtacccccacattggtaaagaccacttggtgaagctattaaagcaactgatggctagttcttatcacccacacaacttgattggaagagtttctccaaatgctgctgatgtcccaacacttcttggctccaactccttttcacttcttccatctgacaggcaagataagggaactcccaggctgccaagttatcttcgttggcctcacattcagactgatcaagttcatggtctaagtttgagagagataggtggtttcactaagcattgtcgagctccctctgtacgtgcatcttgctatgccatcgcgaagccatccacccttgttgaaaagatgcaaatcataaagagattgagggggcatcaaaatgctgtgtattgtgctacctttgatcgcacagggcgttatgttattactggttctgatgaccgccttgttaaaatatgggcgatggaaacagcgttctgcctggctagctgccggggccatgaaggtgatattaccgatcttgcagtgagttccaataattctgtggtagcatcttcatctaatgatttcattattagagtgtggcgtatgcctgatggaatgccagtctcagtgctcaaggggcatacaggggcagttactgctattgcatttagtccaaggccaggtgctgctttccagctgttgtcgtcatcagatgatgggacatgcaggatttgggatgccagatactctcaacaacctccaagactgtatacaccaaagcccccagatgttgcccctggtaagagtggtgatgcatcttccagcgccgctcaagttcagccaacaaatcaccagatcttatgttgtgcatttaatgctaatggaaccgtgtttgtcactggcagctcggacacttatgcaagggtctggaatgcttgcaagagttcttctgatgaacatgagcaaccgattcatgagatggatctattatgtgggcatgaaaatgatgtaaactatgtgcagtttagtggatgtgcagttgcatcaagatctttttcatctgattccagtcatacctctaaggaagaaaatagcctgaagttaagaaattcttggttcacgcataatattgttacctgctcccgtgatggcagtgcaattatatgggttccacgatctcggaggtcacatggaaagattggacgttggacgcgtgcttaccatcttaaagttcccccacctccaatggctcctcaaccacctcgaggtggtcctcgtcaaagataccagccaactcctcgtggtgtcaatatgatagtttggagtctggacaaccgctttgtgcttgctgctatcatggattgcagaatttgcgtatggaatgcttctgatgggagcttggtgcattcactgattggccataaggaatcaacgtttgtgctagatgtgcatccgttcaatcctcgtatagcaatgagtgctggatatgatgggaagacgatcatctgggatatatgggaagggaaacctgttcagatctatgaaacaggacaatttaaactagttgatgggaagttctctccggatggtacatcacttattttatcagatgaagttgggcgagtattcattattggaactgggcaaggagagtcccagaaagatgcaaaatatgatcagttcttccttggagactatcggcctctcattcgtgataccaatggaagtgtcattgatcagctgttcccttctgcttcatatatgtaggaaacacagcttgcaccatacaggagaaatatgcaagaccttttgtgcgacgctggtatgataccatatccagagcccttccagagtatgtaccagaaacgccggttgggtacccttggtctcgagtggcggcctccctctgtaaattttgctgttggccccacttacaatgcaacaactggtgaataccaaactatcccaattattgatccggataggtgggaaccgcttccagagataacagatttcattgagcttgaacctgaaaatgaagttatctctgacgatactgattctgagtacaatggcatggatgagtattcaagtgaaggagaacaggatattatgagtggtgattcttcaggtacttcatattcgagtggagaaattgatgcagataaccctgatagtgctcatctccgccgatcaagaagaaagaagaaaaaatctgaggctgatcttgttacttcatctggtcggcgagtcattaggaaaagatttttggatgatcctggtgtagccacagtgtcaaggccacatagaggaaggaaatctaggaatggatgttctagtaaaaagaaaagatcccctaaatccaggggtttgcgacctcggagacgtgctgctgaaaccgcattaattactttcccaaagaaaggagtttcaacagaagaggatgaagatgactccgagagtttctcagatagtgaattgaacacggatagcactgaagctgaacagttagaatggagtggtcagttaagaactagaagagagattaactccccatttgacatcgatgatgttacagatccttctcagtttactgataataaggaaaattctggaactggtaagaaactagttctcagaataccacgacgtgatttaagaactcaatttcctttaggaagcggaaaagcagaatgctccatacaggataaagcagtgaagtctctttctctagctaatcatgaaccagttgagcacgaactgactattgaaccaggacattcccctgcctccaaggctgaattaacaattgatggtgatctgcatgatagttctgctgtttgcagtaataactcaattaggtggggtgaggttaagatgcgatcctcaaagcgttgcaagtacagtgagccagctggaggtttgtggtcctcttcaaataacgttgctttgcaggatatcgagggatcgagcagtcagcagatacctcatgaatatggcgatggcatccagccaagtgttgtgcaaaacgtacaagaagtgcaacatggaacaattctagataacattccggaaaacaacagtactgatgaacacactagagaaaattttggggatttagaaaagatagctaacaatattaatgctcatgcagacggagtgaatgacactgtacaagttcccaatacttctcagcctcaactaaaagttaagtttaagtcaagaggctctgcagatgcagtaggaaatatcatgaactccaagcatgtcaaagattcagtgcagtgtggcgatgattcttccatcaatcaaccaagaaatgctgacttctatattgtgcccaaaagttctcaggaatgcctagataaaagcactagtttgcatgattcaaaaaaaccgtacttggatgcttcaaagaagtacactgcagtgtacaaaaggtcaaagcgaaagaacaagaaaaaaatggattcagatgaatgtccgaacgaggatagcacttctatctccaatgacgatggtggataccaacctgcagaatacagtcctgttgcagctgcaagcagtagattgagaagaagtgctaggaagtcatttgcatacaatatcaatggtacaacacaggatgatatctcggaagtgaaagtttcttacggttcccatgaagcatcaactagtggaagacgagttgtcacagatgtgcgtgaagggatgtggcgacaaaactcaagaagtgttggtttaaggtctgctaggaacaaaagagaaagtaacagcttccttgatacacatccattgggtagaaggcaccaggtttcttttaagtattcatggttaatgttgcttgagcatgaagatagctaccgttatattcctcaactcgatgatgaggttatgtacttggggcagggccatgaggaatatcttaaacaagtgcaatcatctgaattttgcccttggaaccggataaaaggacttaaagctgtagaactttgcaaaatacagggtcttgattatgccacctacagaggatctggtgaaagctgctattttcttgtggagagaacaaggtacgaagctgctatggagcggaactggacccacagagacaagtgcaaagtctggtggagggacgaagaaggacaggtaggaggaacttggtgggagggacgggtgatggcagtaacacctaaatcacctgattttcctgagagtccatgggaaaaatatgtcatacagtataaggaggatggttctgatcacgctcatagcccctgggaacttcatgagacaggcagtttatgggatccatggaaacatccacatatggatctcacggttcgagataaattgttatcagaaatggaaaatttacaggaaatgtcacacagggatcaggatcattatggtgtttttaaactggacaaggttgcagaaaagtcagatttcatcaacaggtttcctgttcaattttctattgaggtgatcaaggcaagattagcgaacaaatattacagaactctgggggctgtcagacatgataccactgtgatgctttcaaatgcagaatcttacttttcaaagagcagtgaaatgaccaaaaagatccgcaagctctctgagttgctcgaccagatcttttcatcactgtagggaacattgcttgatgcctgattgacaatttcccttttcgtttctgcaaaaaaaatttggccttaggcatcgagatgatttttactggtcctactgaggcattagagaattagccaaagtagttctcaggacagaaagggtttccggtgtagctccaaccagttaaactagttgctgatacaaagtgctcgttgctaacacatttgaccgtttgatctgttgtcaagatacaatggttcatcctattggacatgaaatattggggttttgttagagaagatgccaaggtgtaaatctggtggaggaaatgcattaactgataatttcattttgtacagacaccctcagcaataaaaggaaaaaaagaaatgtgcaacgttgtctattacattttggggtgacacatggtaactataatataggaaattagtggcacttttttcagcgtgcccaggcac

SEQ ID NO: 2135 - DNA, 5757 bp, Zea Mays
gtgggccggctgatcgtctttcggcctggtgggagcgttcgtttcgttggcccgtgccggcgtgccctccggtcctcttctcgttctcccccgagcggctctcgatctggtttgctccgcgtcgtcgctccctggacgtcgccgccctagtggttcgcttcgccgcttctcgcgctctccggcttctacgctggtggtcggttgttcgagagcggctccggcgggcggcgtagatcggcggtccaggtggtgtattagacatgtctttcaggaagcgccaaccttccagtaacggagcttccattaatttagctcccctgggttttccaagtcaggaacttgagaaggttaatcctgtaaattcagtgatgtcaaccgattttgaatccatggatggtgttgatattgatatgagggaagtttactttctcattatgcattttttatctcatggtccattcaaacggacctttggagaattgtgcaatgaactcctagaacatcaactgctacctagaagataccatgcttggtattcacgtggtggtttccatagtggcgaagaaaatgatgatggcatatcactccctttggattatgtaaagctagctgagaggtacccccacattggtaaagaccacttggtgaagctattaaagcaactgatggctagttcttatcacccacacaacttgattggaagagtttctccaaatgctgctgatgtcccaacacttcttggctccaactccttttcacttcttccatctgacaggcaagataagggaactcccaggctgccaagttatcttcgttggcctcacattcagactgatcaagttcatggtctaagtttgagagagataggtggtttcactaagcattgtcgagctccctctgtacgtgcatcttgctatgccatcgcgaagccatccacccttgttgaaaagatgcaaatcataaagagattgagggggcatcaaaatgctgtgtattgtgctacctttgatcgcacagggcgttatgttattactggttctgatgaccgccttgttaaaatatgggcgatggaaacagcgttctgcctggctagctgccggggccatgaaggtgatattaccgatcttgcagtgagttccaataattctgtggtagcatcttcatctaatgatttcattattagagtgtggcgtatgcctgatggaatgccagtctcagtgctcaaggggcatacaggggcagttactgctattgcatttagtccaaggccaggtgctgctttccagctgttgtcgtcatcagatgatgggacatgcaggatttgggatgccagatactctcaacaacctccaagactgtatacaccaaagcccccagatgttgcccctggtaagagtggtgatgcatcttccagcgccgctcaagttcagccaacaaatcaccagatcttatgttgtgcatttaatgctaatggaaccgtgtttgtcactggcagctcggacacttatgcaagggtctggaatgcttgcaagagttcttctgatgaacatgagcaaccgattcatgagatggatctattatgtgggcatgaaaatgatgtaaactatgtgcagtttagtggatgtgcagttgcatcaagatctttttcatctgattccagtcatacctctaaggaagaaaatagcctgaagttaagaaattcttggttcacgcataatattgttacctgctcccgtgatggcagtgcaattatatgggttccacgatctcggaggtcacatggaaagattggacgttggacgcgtgcttaccatcttaaagttcccccacctccaatggctcctcaaccacctcgaggtggtcctcgtcaaagataccagccaactcctcgtggtgtcaatatgatagtttggagtctggacaaccgctttgtgcttgctgctatcatggaatttgcgtatggaatgcttctgatgggagcttggtgcattcactgattggccataaggaatcaacgtttgtgctagatgtgcatccgttcaatcctcgtatagcaatgagtgctggatatgatgggaagacgatcatctgggatatatgggaagggaaacctgttcagatctatgaaacaggacaatttaaactagttgatgggaagttctctccggatggtacatcacttattttatcagatgaagttgggcgagtattcattattggaactgggcaaggagagtcccagaaagatgcaaaatatgatcagttcttccttggagactatcggcctctcattcgtgataccaatggaagtgtcattgatcaggaaacacagcttgcaccatacaggagaaatatgcaagaccttttgtgcgacgctggtatgataccatatccagagcccttccagagtatgtaccagaaacgccggttgggtacccttggtctcgagtggcggcctccctctgtaaattttgctgttggccccacttacaatgcaacaactggtgaataccaaactatcccaattattgatccggataggtgggaaccgcttccagagataacagatttcattgagcttgaacctgaaaatgaagttatctctgacgatactgattctgagtacaatggcatggatgagtattcaagtgaaggagaacaggatattatgagtggtgattcttcaggtacttcatattcgagtggagaaattgatgcagataaccctgatagtgctcatctccgccgatcaagaagaaagaagaaaaaatctgaggctgatcttgttacttcatctggtcggcgagtcattaggaaaagatttttggatgatcctggtgtagccacagtgtcaaggccacatagaggaaggaaatctaggaatggatgttctagtaaaaagaaaagatcccctaaatccaggggtttgcgacctcggagacgtgctgctgaaaccgcattaattactttcccaaagaaaggagtttcaacagaagaggatgaagatgactccgagagtttctcagatagtgaattgaacacggatagcactgaagctgaacagttagaatggagtggtcagttaagaactagaagagagattaactccccatttgacatcgatgatgttacagatccttctcagtttactgataataaggaaaattctggaactggtaagaaactagttctcagaataccacgacgtgatttaagaactcaatttcctttaggaagcggaaaagcagaatgctccatacaggataaagcagtgaagtctctttctctagctaatcatgaaccagttgagcacgaactgactattgaaccaggacattcccctgcctccaaggctgaattaacaattgatggtgatctgcatgatagttctgctgtttgcagtaataactcaattaggtggggtgaggttaagatgcgatcctcaaagcgttgcaagtacagtgagccagctggaggtttgtggtcctcttcaaataacgttgctttgcaggatatcgagggatcgagcagtcagcagatacctcatgaatatggcgatggcatccagccaagtgttgtgcaaaacgtacaagaagtgcaacatggaacaattctagataacattccggaaaacaacagtactgatgaacacactagagaaaattttggggatttagaaaagatagctaacaatattaatgctcatgcagacggagtgaatgacactgtacaagttcccaatacttctcagcctcaactaaaagttaagtttaagtcaagaggctctgcagatgcagtaggaaatatcatgaactccaagcatgtcaaagattcagtgcagtgtggcgatgattcttccatcaatcaaccaagaaatgctgacttctatattgtgcccaaaagttctcaggaatgcctagataaaagcactagtttgcatgattcaaaaaaaccgtacttggatgcttcaaagaagtacactgcagtgtacaaaaggtcaaagcgaaagaacaagaaaaaaatggattcagatgaatgtccgaacgaggatagcacttctatctccaatgacgatggtggataccaacctgcagaatacagtcctgttgcagctgcaagcagtagattgagaagaagtgctaggaagtcatttgcatacaatatcaatggtacaacacaggatgatatctcggaagtgaaagtttcttacggttcccatgaagcatcaactagtggaagacgagttgtcacagatgtgcgtgaagggatgtggcgacaaaactcaagaagtgttggtttaaggtctgctaggaacaaaagagaaagtaacagcttccttgatacacatccattgggtagaaggcaccaggtttcttttaagtattcatggttaatgttgcttgagcatgaagatagctaccgttatattcctcaactcgatgatgaggttatgtacttggggcagggccatgaggaatatcttaaacaagtgcaatcatctgaattttgcccttggaaccggataaaaggacttaaagctgtagaactttgcaaaatacagggtcttgattatgccacctacagaggatctggtgaaagctgctgtaaattaaccattgaatttgttgattgcacgtccagtggatttggcaaaacatttatgatcacgttgcgtgagctggtcaactttccagattttcttgtggagagaacaaggtacgaagctgctatggagcggaactggacccacagagacaagtgcaaagtctggtggagggacgaagaaggacaggtaggaggaacttggtgggagggacgggtgatggcagtaacacctaaatcacctgattttcctgagagtccatgggaaaaatatgtcatacagtataaggaggatggttctgatcacgctcatagcccctgggaacttcatgagacaggcagtttatgggatccatggaaacatccacatatggatctcacggttcgagataaattgttatcagaaatggaaaatttacaggaaatgtcacacagggatcaggatcattatggtgtttttaaactggacaaggttgcagaaaagtcagatttcatcaacaggtttcctgttcaattttctattgaggtgatcaaggcaagattagcgaacaaatattacagaactctgggggctgtcagacatgataccactgtgatgctttcaaatgcagaatcttacttttcaaagagcagtgaaatgaccaaaaagatccgcaagctctctgagttgctcgaccagatcttttcatcactgtagggaacattgcttgatgcctgattgacaatttcccttttcgtttctgcaaaaaaaatttggccttaggcatcgagatgatttttactggtcctactgaggcattagagaattagccaaagtagttctcaggacagaaagggtttccggtgtagctccaaccagttaaactagttgctgatacaaagtgctcgttgctaacacatttgaccgtttgatctgttgtcaagatacaatggttcatcctattggacatgaaatattggggttttgttagagaagatgccaaggtgtaaatctggtggaggaaatgcattaactgataatttcattttgtacagacaccctcagcaataaaaggaaaaaaagaaatgtgcaacgttgtctattacattttggggtgacacatggtaactataatataggaaattagtggcacttttttcagcgtgcccaggcac

SEQ ID NO: 2136 - DNA, 3295 bp, Zea Mays
tctccctcgaccgccccggatctatctcgccgcgccggcgcgcagctgagccgccgaagcgaggaggcaatcgaggcggacgaagcgccgcaccaaattcgacgggggatcgagcaccagaggcgtagcgcaaaatgttcaagttcctcaaggaggtggtcgcgggatccggatcgggactcaaggacttcccctacaccatcggcgagccctacgcatcggcttggggctcatggaaacaccaccgcggtacctccaaggatgatgggtcgcctgtgtcaattttttctctgtcagggagcaaccctcaggacagacacatggttgctggtcgcaacggtgttaagagattacgaacagtgcggcatccaaatatcttatcctttttacacagtactgaagcagaagctgcggatggacctgccatgaaatacacaatttatattgtaacagagcctgttatgccactttctgaaaagctcaaggaactgaatcttggtggtacacagagagatgagtactttgcatgggggcttcatcagatatccaaagctgtgagctttctcaataatgactgcaaacttgttcatggtaatgtatgcttggccagtgttgttgttacacaaaccctggattggaagcttcatgcttttgatgttctgtcagaatttgatgctaataatgaagcctctggtagccccatgttgcaatttgaatggttagttggaacacagtacaagccaatggagctgtcaaagtcagattgggcttcaattagaaaatcacccccatgggccattgattcttggggactagggtgtttaatttatgaactattttctggtgcaaagctggctagaacagaggaccttcgaaatactgcttcaatcccaaagattaccagaggctcttgaattccacaccttctcgtagactaaatccttcaaaacttattgacaacagcgagtttttccagaacaagttagtagagaccatccagttcatggaaattcttaatttgaaagacacctttgagaaagacagtttttttcgtaaactccccaatatagctgaacagcttcctcgtgaaatagttctgaaaaagctgctccctgtattggcttcttctcttgaatttggttcagctgccgctccagccttaactgttttgttaaagatgggttcctggcttcctgctgaccaatttaatatcaaggtcttgccaactattgtcaagctttttgcctccaatgaccgagctatccgagcatgtcttttgcatcacataaatcagtttggggaatcaatgtcagctcaaattgttgacgaacaagtttttcctcatgtagccactggcttctctgatactgatggtactattcgtgaactgacattgaagtcgatgctcgtattagcaccaaaagtaagttgcttctatcctcctgttgggtatgggtttatcagtgagatgtattataaactggctagatcttagttatgaaaaaatataacttttttttgtcaatttttctagatttgttattttcttggttgtgatttgtattgcaaagaaacagaacatatatgtattaatttgataaccaatattgtcttgtgttcagtcttattctgtaaatgggttttttctaaggttaatattatgcaagcttagggctgaattcctataaccaatttggttttatgaactcatattcttgcctttagatgcaggagcgtgcacatacgcacaacaatttgccatggcatgctttgatggaatatttctgggattttagatcctcaatccctcatgcactgatttctatttcctgccaaaagctatacttgcagatgactgattgtctggtggacgaagaacctggtatcaggacaaacacaacaattcttcttggcaatattgcaggctacatgaacgatgggacaaggaagagagtactgatcaatgcattcacagttcgtgcattacgtgataccttccctccggccagagcagctggaatcatggcactgagtgtcactagttcatactatgaaatgacagagattgcaactcgcatcctgcctaacattgttgtgctcacatttgacccaaatagtgatgtccgaacgaaggcttttcaggctaccgatcagttcttgcaaatagcaaaacaacaccatgaaaagattcaagggttctggtacttttcatggtttagatcacagcttaatacaggagacaacagtgtggctgaaagtactggtgttaagttaaagcctggaaatgcaggtttacttgggtgggccatgagttctgttacacaaaagggtaaaccttttgaccatgccccaatatctactgcaaatgccaataattctcaagcatcaacaacctcgactgccactccagacactcaggcttccacactagcgtatgcaccatccacatccacctcgcttgatcaagctgcatcagcatcagcaaggtcgtcagtagatgggtggggtgagcttgaggatggtaatatccatgaggagaatagtagcgataaagatggatgggatgatgtagacccatttgaggacaagccatccccatctcttctatccaacatacaggctgctcaaaaacgtccagtggtgcaaccaaagcaaccggttgcaaactcatctaaaccaaacccactgaaagcgccaaagtcagaagacgatcctttgtggggtcctatagctgctgcaccacctaaaagtgcagtaaaatctgcagacatcaagccatcaacatcacataatgatgaggatgacctctggggttcaatagcagcacctccaaaatcatctgggaagcctttgaagccagctgtagcgaatagtgacgacttatggggtgccatcgcagcacctccaccagcaaccaaagccagacccttagcctcgtcaggtaggggccgaggaacaaagccagcgcaaccaaaacttggtgctcaaagaataggaagaacatcttcaactggaatgtgacgtcttatgatatcaagtgttgtacaagaatgcaaagttttcctttttttttcccctgccttgcgttgagtctgtccaggatgacattctttgtaaactagtaaaaagatttatgtatatgagcacagttttgaccaatgtattagtattattttaccattgtgtattaaaatagatccagaagatttttgcacatcacagctgcaatcatcttaagtccatattattaatatattgctatgtcttattttggcgtgataagagcaacttaatg

SEQ ID NO: 2137 - DNA, 2405 bp, Zea Mays
atggtgcccaaaatcacggacttcggtttgtcaagactcttgggtaatggaaaaagccacaccattacacaaacaagaataggaacatggggttacatggcacccgagtacttggatgatggagtgatcacaatgaagacagacatctatagcttgggtgtgataatcagacacatggtgaagggacgtaactcggcagacaccactgatgaagaaccaggtactggcaaactggttgattaggctggaaaaggatccatcacagatgatgaggcagcagacgacccgattattatttgaaacagagtacaaagagcaaataaaagcgtgcatggatatatcatggaggtgcacgctgcgtaaaccaatggacaggccaacgacgcagcacatcctacttacactggaggaaacagaagcaaagatcaaatcggtcgttgggcctactccaccaaatgccgggcagcttcagattgccaaatttgggccgtggggtggagatggagggaagacgcgagacataagaatgacgccttgccatttgcatagcgtaacaattagcagtggaactattatcgattctatcgggttttcattcactgatcactatggtcagcaccacacaacagggccttggggcggtaaggagggtacgaataagattgaactaggcccttcggagtttcttacaggagtatctggaacaagcggcccattcaaaaatctaacaaatgttgtaacgtcacttacgtttgtcaccaatactcgtagttacggaccctttggaaaagggcgaggaacaccgttccacatccaaacgcagaacaacggcaggatcgttggcttctttggccgttctggccagtatctctatgcgattggggtctacacgaaccaagatgctagggtcgcaaggatcgggcgacctttgggtggagatgaaggggttcttcatggcatcacagacctcagtgggcagcagcgcagcagaggtggaggtccatcgggagaatgtggagacagcgacgacgagcccaacggtgatttcgccaaattcggcccgtggggcggcgacggaggacagccgcaggacatcggaacactaccctgccgtctagacaggatcaagatcagcagtgggcttatcatcgactcgatcgagttctcgtacgctggccctgacagccagtaccgcaccgcaggcccttggggtggtcatggaggagacaacagctcttttcagctagctggttcagagttccttacaggtgtgtctgggtcaatcggcacattcaacggccatgcaaacgtcataacgtctctgacgttcgtcaccaacgctcgtagctacgggccgtttggaagagggcgaggcacatccttccacatcccagtgcagggcaatggctgcatcgtcggtttctttgggcgctccggacggtacctcaacgcgatcggtgtctacacggcgccgaaacccgaaccaaaagcagttgggaaacaagatggtggtgatgaggccgtcgtcgccaggattgggccttggggcggggttggaaatgctctccatgacatcgcagagaggccgcatcgcctgcacagagtgacgatcttcagcgggacgatcgtaaactcgctggagtatctgtacagcgatggcgacgggcagcagcacaccaccggtccgtggggcggctgcggaggaactggtcgaaagattcatcttgcccctgaagagttcatagtggaagttactgggacattccatccatgcgcgtgggacagaacaatacccagtgtcgtgtcctctctgacgctcgtgaccagcacgggcaaaacacacgggcctttcggaacgcagctgggagccgcgttccaggttccggtgcagagcgacagcaggatcgttggcttcttcgcccacggagacaattacatcgaagcaattggcgcctacgtgaagaaattgacagaatccagcaaccgttaactcttggaacaacttgcagctgttcacactgtttcttgggccattgctccttaaatttagtccagatggccaaggagcaaccaaacagaaatcgctatggcagggaagatggactaaactggactgtggcacctccagcatagcctgctcttagattagtgaccagacatcatcgagatatttcgatattataataaatgaggaacccatctcagatgtttatgttagctcctcagtttttgcttctgaatgattaatttagatcttccttatttttgcaataaatgaggattcttttctgtctcttctgaatggatacgaatcatgcatcacgtatcagtgcacctattgcagtgaggagatgaggacaaggtgctgacgaacttattgtcctgagctcccacttgagtttctg

SEQ ID NO: 2138 - DNA, 2891 bp, Zea Mays
cagggagtgcttgaagatggctttgttgccgtcaagaagttatactcgtatattgcaattgaagacgaaccatttcatcgtgaggttgattgtctaatgaatattaggcaccacaacatagtcttgtttgttggttactgtgctgaaacacaggaagtggttgtgcgtcaagaagggaaacatatttttgcggaaaaacgagaaagattactttgcttcgagtatttgcataatggaagccttcacaagcatctgacagccgaaccatgtgggcttccatggcacatttgttaccaaataataaaagggatttgcctgggcttgcactacctacatgacaagaacataattcatctagatctgaaaccggacaatatattgcttgatgatgacatggtgcccaaaatcacggacttcggtttgtcaagactcttgggtaatggaaaaagccacaccattacacaaacaagaataggaacatggggttacatggcacccgagtacttggatgatggagtgatcacaatgaagacagacatctatagcttgggtgtgataatcagacacatggtgaagggacgtaactcggcagacaccactgatgaagaagtactggcaaactggttgattaggctggaaaaggatccatcacagatgatgaggcagcagacgacccgattattatttgaaacagagtacaaagagcaaataaaagcgtgcatggatatatcatggaggtgcacgctgcgtaaaccaatggacaggccaacgacgcagcacatcctacttacactggaggaaacagaagcaaagatcaaatcggtcgttgggcctactccaccaaatgccgggcagcttcagattgccaaatttgggccgtggggtggagatggagggaagacgcgagacataagaatgacgccttgccatttgcatagcgtaacaattagcagtggaactattatcgattctatcgggttttcattcactgatcactatggtcagcaccacacaacagggccttggggcggtaaggagggtacgaataagttgaactaggcccttcggagtttcttacaggagtatctggaacaagcggcccattcaaaaatctaacaaatgttgtaacgtcacttacgtttgtcaccaatactcgtagttacggaccctttggaaaagggcgaggaacaccgttccacatccaaacgcagaacaacggcaggatcgttggcttctttggccgttctggccagtatctctatgcgattggggtctacacgaaccaagatgtgctgcaaatctagctagtccatactagttttatcgatcttatttaatatttatgttttcattcaaacatttgcttattagtccggttcacttccaggctagggtcgcaaggatcgggcgacctttgggtggagatgaaggggttcttcatggcatcacagacctcagtgggcagcagcgcagcagaggtggaggtccatcgggagaatgtggagacagcgacgacgagcccaacggtgatttcgccaaattcggcccgtggggcggcgacggaggacagccgcaggacatcggaacactaccctgccgtctagacaggatcaagatcagcagtgggcttatcatcgactcgatcgagttctcgtacgctggccctgacagccagtaccgcaccgcaggcccttggggtggtcatggaggagacaacagctcttttcagctagctggttcagagttccttacaggtgtgtctgggtcaatcggcacattcaacggccatgcaaacgtcataacgtctctgacgttcgtcaccaacgctcgtagctacgggccgtttggaagagggcgaggcacatccttccacatcccagtgcagggcaatggctgcatcgtcggtttctttgggcgctccggacggtacctcaacgcgatcggtgtctacacggcgccgaaacccgaaccaaaagcagttgggaaacaagatggtggtgatgaggccgtcgtcgccaggattgggccttggggcggggttggaaatgctctccatgacatcgcagagaggccgcatcgcctgcacagagtgacgatcttcagcgggacgatcgtaaactcgctggagtatctgtacagcgatggcgacgggcagcagcacaccaccggtccgtggggcggctgcggaggaactggtcgaaagattcatcttgcccctgaagagttcatagtggaagttactgggacattccatccatgcgcgtgggacagaacaatacccagtgtcgtgtcctctctgacgctcgtgaccagcacgggcaaaacacacgggcctttcggaacgcagctgggagccgcgttccaggttccggtgcagagcgacagcaggatcgttggcttcttcgcccacggagacaattacatcgaagcaattggcgcctacgtgaagaaattgacagaatccagcaaccgttaactcttggaacaacttgcagctgttcacactgtttcttgggccattgctccttaaatttagtccagatggccaaggagcaaccaaacagaaatcgctatggcagggaagatggactaaactggactgtggcacctccagcatagcctgctcttagattagtgaccagacatcatcgagatatttcgatattataataaatgaggaacccatctcagatgtttatgttagctcctcagtttttgcttctgaatgattaatttagatcttccttatttttgcaataaatgaggattcttttctgtctcttctgaatggatacgaatcatgcatcacgtatcagtgcacctattgcagtgaggagatgaggacaaggtgctgacgaacttattgtcctgagctcccacttgagtttctg

SEQ ID NO: 2139 - DNA, 2689 bp, Zea Mays
gcggaaggagacttttagggaggaacaggaacagccacgaccacgatgagtccttggcagtgcatgccgtcgactgcaacactactacacgtccatcaggtaacagatgcaacaaggcgtctgccgcccatcaggttcagtcacctaaatgctccaaatccaagaccacgtccaggttgcgccatgggtgccacaaagggtgaaaaactaaaaacactcggtcatgatttacttgttcctgccactcctcaacacaaggataaacaaagtggcatgcccgaaatgattgaggccatccgagtagcccttcgttcaatgggagacggtgagattagcatttcagcatatgacacggcatgggttgcacttgtaaggagtttgaataataatggagatgatggaccagagttcccatcttgcattgattggattgctcaaaaccagcttcccgatggatcatggggtcatgacatcttcttcctagcccaagatcggatcatcaacaccctagcctgcgtcatcgcattgaaatcatggaaaatccacgatgatgcgtgcacaaaaggtctatcattcatcactgaaaatatgtggaggttgaccagggatgatgagaattgggcactatcaggcttcgagattatattccctatgttgctagagaaggccaaacacctaggcatcgacatacctttggatgatcccatgttggaagctatacgagccaaaagagaactcaagttaaacaagatcccaagagaagcacttcatgctgaaccaacaactttccttctaagcatagaagggatgccaggtttggactggaaaaggctacgtaagctccagtgtccagatggctcctacatgtcttcgcctgctcccacagcttatgctctaatgcagactggggatgccaagtgttttgagttccttgataaactgatcgacaagtttaacggaggagtaccttttgtttacccaatggagatgtttgggcgcttatgggctgtggaccggttggagaggctgggcatatcaggttatttcaagagcgaaattgaggactacttagattatgtttacaggcactggagtgaggaagggttggcctatacgaagggctgcctggtgaaggacatcgatgacacggccatgggtttccgcctcctacgactgcacggctacgaccatgtctctccttgtgttttcaagcggttcgagaatggcgacgggcagttcgtgtgctacgcaaggcaatcgagccagtcggtaagcgccatgtacaacctgtaccgagctgctgaccaggcctcgttccccggtgacgacgacgaccatgtcctccggcgcgccaggagctacagccgtgcgttcctccggcagagacgagcctcaggccagcttaacgacaagtggatcatctccgagggcttgcccgacgaggttggctatggtctggatttcccttggggagcaagcctgccacgtattgagacgagaatgtatcttgagcaatacggtggaagtcgtgacgtatggatcggcaaggttctctacagaatgaacatggtgagcaacgacatgtacctcgaggtggcgaaagtcgatttcagcaactttcagagactatgccgactagagtggcacgacctcaaaaggtggtgtgacaagagcgaccttgaaacgtacggcgtggctccgggcggcgcgctgagagcctacttcctggcggcagcctgcatcttcgagccgggccaagcagcagagcgcctggcttgggcacgcgccgcggtgctcgccaaggccatctcgtgctgcttgttgagcaacaacgacacatgcgcttgtaataagacgacggccgaatggctcgtccgggaattcaccaatggtgacaatgttgctggctactactacgactacaacccagcaaggagagacgacgacgagccgaattcaccagcatggggggccagcagcctcgccggtgttcttcgtgagctcgtccacttgcaggcgtccgggaatgctgctgtcgccgaatgtcttcgtggagcttggatggaatggctcatggcatggactgaaaaggagacggaagaagcgtcacacgcaggagatacagcgctgctgctagctcgcacagtcgagatatgctcaggaaggctccgtggtacggaacaggatctcgagctacgtctgccggattactccaagctccagcagctcactagatgcatatgctccagactagccactgaagctcctgctctgatcgaatcaaacgtcctcaaacagaatggagaaaccatggacaaggttgatgccctggacaggatggttggactcgagatgagagaactggctcaatgtgttttccgcagcggcggcagctccgtggacagagagacgaggcagacgtttctccacgtgaccaagagttactactacgttgcactctgctcgccggaaacacttgagcatcacatctccaaagtcttgtttgaggatgtcgtctagcaacgatgtttatattagagctcaaattccagtgtatccttgtgcatgcaccgtgaaggtgtcatatgatgatgttgtgcctagcttttctcttacgatatgtaatcaatttatattgattggtgatgcttcagtaattaatctggggtttgtcagatttacttgtgta

SEQ ID NO: 2140 - DNA, 2353 bp, Zea Mays
tcggctgtagcatgcccactacttggaagcttgctgcctattacatgatggaactaatgatggttgctctatttcaatagttcggactttgcctaataattctgattccagaagactgttttcttggacacaacaatcatctcaagggaatgatcaatcaaccctttcaaagagtgcccaagaatgcaattcaaaatgcagctctccttatggcagtagagcagttactacagtgaatgttccagacacattaactgaagcaaatgttccagacacattcaccgaaggcagtgttccagcaacagaaggtttatggagctctttcaataatattgatgtatcagcaaatatcctgaatgatgtctccatggatatcagtgatttacctgatgatgtttctcgaatgatatcaagcatagaagaaaatggcacacagaatctacacggtccaaaaccttgtgtggtgtcaattgaagatgataatagaacagctcaagatgttcctagtgatgactgcaatgagcctaatgctcgtaaaccgaaatctgggcacaatgtctctaaacaaatatctgcgcacaaaaccaaccaagtccgcaaccagaaagtgggtgaaacgcaatcaagagctcccaagaacattgtgaatcacacagtagggatggttggtgttggatcttctctaatgaactggatgaaaaacactcataataagaaaatcagagcacagaaaaaggacacaggacacaagaatcttgattcttgtgctgtttcaaactctaatccagacacagtcgcttctagtgttggcgatatggggcaggagaagatgctatctactagcaacggcaagcatgggaatgaaaacacacagaataacaacctggagcaaaatatgcagaatgtggatgacctgtgccaaaatgaatcagggaacttgaaacgggggttctcaaatggaaaaaatcaaagattttgctaaagagaaaggtactgtcaactgcgatttcccgtgatgagaacactgagaataataatactataaataaaagtatgctcaggtctcatgatttgcatcaaatggaatctgaaggcacgatgcagagatgtgtggcaaagggttgtacgcagcttggcacacaaattcaagtgtcatacacacaaatagctagtttgggatagcaggtgagcgaaacagcgagtcccaaatgacatacaccttattgagaaactatcgaagagctaacatgcgccggatggaacttggaacgcaagctctcggttcacagcatggtcaatacaatgtttcacccagcacatcacacggaagctacacagacctctgcgccctcactctcgagtaggtgtgctcggttcgttgctgcagcaggacattgcaagctggtctggtctgagaaccgtgggacgcagcacagcctaggcgtgtctagacggacaacaccgcctgctgaatgctgatatggacctgcagttgggttctgctagctcttctgttcccgacccaaagcagcatcgattgccaaggcatggtggtaccaggcaacctcagtggcagctgatttcactgtaattagcgacaagaacaagtatatgagaaggatttgaggtagagaggagtgttgtagttggagaacaggatgaagtggagatggatgggcgggtggtggagcacaaagggaggatgacggcggtggtggtggagatccggaagaagaaatccggcgagctggtggctatcgggaggcagtggatgacggcctccaggcccaaaggcgctgctgctcacagcaagatctgaactgaagcttcttccttccttccttccttgggtttcctttcctacctcgaaaactactgctctcgagtgaattgaactggctgtaattactaattactggggaaaaacacggtttaggttgctgtgatttgttactggcgtcccctttaaatcaatcagcaagatgcaatcgcagcgaagctctgttgtgcgttgctagcctgcctaggatcctcttgctgccgggctatatcgagctcgcgcgctagctcatgcacccgagcaattcgctgacgcccgagacttactttttctagtgctgctatcaaagcctagtcagctggaataactctagcttatgttatacccaaataaggccttgttcggttattcccaatacacatggattggatgggattggaaaaaattcttaagaagtttgacttgtttgggattcaaactcatccaatcccacttaatccacatggattgagagctaaccgaacaagccctaattgagtttgtacaatgtacatgaattgggaaatataaaag

SEQ ID NO: 2141 - DNA, 2055 bp, Zea Mays
ccccacagcagccagccatccatatgtatgtaccattcatcctccactgcatgcatgctacccggcggcggcccaagcttcatcgatcgccgatcatcttctagctagcagctagcttgttattagctcatcggcgatggactacgtggtcgcccggatgcaattgcaacaagcagcagtgccgccgcctgttcactccatcgccgaccaccgtcctccgcctgtgtcgcagaggacgcggggcagcgcgacgatgcaacgacagcggcgtgaggcactcgaacaggaggtggcagagctgaagcagcagctatccaacgagcagacggtgcaccagatcctggagcgcgccctgcagcccagcagctccatggccctcgccaacatccccgccttcatccccaccaaggccaaggagctgctcgcggagctgctgctggtggaggaagagatcgccaggctggaggaccagataaaaaggatgaagaagtccgccgccacgcagcagcagcagcagcagcagacggagcactgcaagtccatgttcttcatcagccaggccatggacggcgaggcgtacctcagcacggtggtgaacaacaagaggcattccctggcgtcgtcgtcagatgggcatgcggtgttggagaagaagatcgcccagcacgagctgcccatcaccaagaagagccccacggtgatagcaaagaggagggcgagagaccagcagcagccgcccaacaagctgtcggagaggatcctcaagtgcctggtgtgcatcttcatgcggctgctccggtcgtcccgggcgtccgagtccgccgcgggcaacctcggcggcttcaggatggacatggggctcgtcaacgtggctgcagctgcggcggccaaggagaaggagaggggccagcaggatcactacggcatcttcggcatccaggactccatggtgagggacatcgggccctacaagaacctcgtcaggttcaccacctcggctggctccggctccggctccggctccggctccctggacctccacctcctcagcagagggttctcggcgtcgcccctggtaagcaaactgagggagatgctggaggcgctgcagcaggtggatgtgcgctccttgaatcaccaccagaggctggcgttctggctcaacatctacaacacatgcatcatgcacggcattctgcagcatggtttgccctcaaactcggacaagttactcgcactcaagaacaaggcaacaatcaacgtgtcagggcaaactttcaatgcgttggtgattgagaattttatcttgaggcagccgtcaagtgtgaaacagcaggagttgtggcaatgcgacgtggatgtggaagaagaacaggcggtgagggaggtttatgggctcaagacttcagaacccaacattctctttgcactctgctgcggcatcagatcatcgccagcaatcgtgttcttgtggatctggacaaggcaaagcttgagtacctgcaggcatcgctggtggtgacatccaccaggaggctcatgatcccaagcctcctccactccaacatgcatgactttgcaaaggacacggagtcgctgcttcgatggatctgcgagcagctgcccacgtcctggtccatcaggaaatccatggtggattgcctcgccgccattaccaacaacaacaacaagctggaggaggtggtcgtggatgtcattcccttggactacgacttccaatacctgctgcccatgtgatcaactcatcatgcatcataaatattattaattgcccattccattaattccatgcatggattattattctgtaagttaactgatacagatggagttattgtgtagtcttgtctatctcattagctactaggatggactccaacaaggaaactattcaaatgttgcttgctggtgatcattatattgtagatttctagtgattacaaagtttcataactcttcaatacctacaactttcatgttggtggttttttttctttcaaggtcattttcaaaattcaaattttaattattttt

SEQ ID NO: 2142 - DNA, 1416 bp, Zea Mays
tcacgctcgtggcccgtcgtgtcagtgtcagggccccacgaggcggcatcgcgtcgcgggccgccaggcgtgaccgaaacaaacgaacccttttgcctcggccgggtgccttgcccggcccatgccgtgcccggttgtgtaaatagaagataggcgacgaacacgaagcaagcaaggcagccgaatcccaactcctgtgtgtgcctgccaacgcctcgtcgcccgccgccgccgctgcttcgcccctctccgccagccgctcccgctcggagcacgccgccgccggcgtgggcgcgcaccgacggccgtcgtgtcgcatggatatggcccccgcggccgtctcctccaacccgcgctcggtcgaggaaatcttcaaagacttctccggccggcgcgcggggctcgtccgcgccctcacctccgatgtggacgatttctgcagcttctgcgacccagataaggagaacttgtgtctctacggccttcccaacggtagctgggaggtctcgccgccggcggacgaggttcctccggagttgcccgagccggcgctcggcatcaactttgcgcgcgatggcatgcagcgccgcgactggctctcactcgtcgcggtccactctgactcgtggctcatctcagtcgccttcttctacggcgcccgcctcaacgccaacgaccgcatttgcggacaggaaacacgtcagggataggtctggcgttgatagcagcggcaagtccaggcactcatcaaagagaggaaacgatggccatgcgaagaactccagggcagcagctcctgctgccaaagagtacgacgacgacgatgacgaggaggacgaggaacacacggaaaccttttgtggaagctgcggcggcctctacaacgcgaacgagttctggatcggctgcgacatctgcgagcggtggttccacgggaagtgcgtgcggatcacccctgccaaagcggaccacataaagcactacaagtgcccggactgcagctcgaagaaaataaggcagtaggtcccagtgtgcaccgccggccatcgctgacctgtctgatcccaaaccatactccattgcttgcctgccttgccccaaggtcgcagctagcagatgcgaattccttcatttgtggggggttgttgtgtgatggatagcctggtaggaagaggcaaaggactgatatataatgactcgtttattgttcatctttttgcctgcttcgtcggtcgtcgcagtcgttgtggctgcatgaactgatgagtggtttgttcgtgctagttgtaggctgtttcactgatttgcgtgcgtatgtggactggtcctgtcaaatttgtaggcctgaaaccgtacttccatttacgtggctacgcgagctgatttgccggtctgcctctcccatctgtatcctgg

SEQ ID NO: 2143 - DNA, 1307 bp, Zea Mays
cctcctccttttcccagttcccaccttgcttcctctcctcgctttgcttcctctctggctctctctcacatgcctgcctactactccctcaagcaagcaagcaagcaagctgcaagaggtcaggaggagccgtgactgtgagtgagcggcgtctggtgtgaactgtgaagtgaggacttgttggaggaggacggagcgcggagggtcatggcatggtgatggacctgctgctccccctcactttgcccctagtgctctaggcagccttagctagcctcgcagtcctgggaggaggagaaggacaaggtctctgatcagctccagcttgtctggtcaaagctgaggagcctgcttgggctgcctgtgagtccaagctcgacaggaccactgccactgtgaagcacagcggcagcggcgacgagacgaggacgcggaagctgccaagcggatagatctacgcaaaatggagaccaaggacgtgtcgccgcttgccgccgccgccgcggcgcccgtgcttgcaccggcctctcagcagcagcagcagcagccgccccagccgcagcagcaccaccaccagccaccgcagccgcagcatcagcaccagcaccagccgccgccgccgccgttcccgcagcaggcggccccggcggcggcctcgtcgcccgccgcgtccatgcccggcggcatgcgcctctcgttcgaccatatgcccgggaaggcgcccggggagcagcaccaccaccaccaccacgcggcgccgcccatgctgtacgcggcgccaccgcagggcgcgggtgcgccggggggcagtgtgctcggcatgggcgaactgatgcgcaagaagcgcgggcggccgcgcaagtacgcgcccgacgggagcatggctctggcgctggcccccatctcttccgcctcggccggcggcggcggcggcgccgcagcccccgggcagcagcagcagcacggcgggttctccatcggtagccccccgtccgaccccagcgccaagcgccgcggccggccccccggctccggcaagaagaagcagttcgaggccctgggttcttggggcatcgctttcacccctcacatcctcgccgtcaaggcaggcgagatctgcgagtccgcgcatctcctctgtgcgcgtgtcatgtgtggcttcttgccagaaggccaagtgaccgctgagcggtgctcctttgtgctctgtcctggcatgccgttgggaagcccggcaggttgtgagctcgcgtggcgtgggtgttcgtcagacagactcccagcacggctgacacatgaccggggcc

SEQ ID NO: 2144 - DNA, 6949 bp, Zea Mays
aggacacactaagacactaagtccatgtagaagtggaagcagtcattaatcgacgaggtagaccaatagaggtcagaggttcggattggtgggtggaggttggacatcagaggctgatggagcagaggttgggggcaacgtatcagtggtggtcatggagtcacagtaagagctgtgaatcggtggagcggaaggggcgggagtggctggatgaggcaggacttgcctctggattacagcttgtattggatatgttggtgactgtgggagaacctgagcttggttcaagccgcggacctgtgtcatggggcgtggcaggtttttgtggagtgactgttgctgagaagagaccaatgatgcaatctcgtgatgttgataaatatttgaacaaagctgacaacattaaccatgtgctcatgaactctggcgacatttctaaaattggtggtcactgcctgcatggtacacatggtttggggactcggctagattctgatgctcagagctcatcccctggagaaaatatgaacaacaaaatcagaaggcccatcgaaatatgtacctttgatgctcaaggtcggtgcaagaaaggaaagagttgcatctctcttcatgaaagggagggatttggttctgcaaagactggtctgctcgcaccagctggttctggaaatcatagaggtatgagcttcctaactagggcaatctgtgagcaacaacttgctataacagagccaacttcttattgctccctgctgtgcataggttctgaaggaggttctcaagtacaacatatatctgacttgaaagtgcatcagttcaaggattcagagggtttgtcaaaagatgaaatgtgtcggaatcttatttatgcatttggcaaagataatcagatgtcggtacatcttgctggtaaacacagctctcccattcctggggtttcacaaaggatgcccgtcagcattggtcattcattggctcagaatccattagttcatgagaagaacaacaaacgtttcatgggacaccatattgatgtggctgctgaaaactatttggatgctggaggtacctatccaagattagatggaggtatttttcagtttgacatagacaaggaaagcagtgttagtgattcccatgtctcaagaacttacctttcagattatccatataaatcatttggcttgtctatttcatctgatcctctccagctcagtgagaagctgtcagcatatggtggagtgacaaatactattcctaacatacatcagaaagaacatcactcatgccatgcttcatacagctcacatagcttaacaggatccagaaatccttgctttgctacctctgaacatactttcggtagcccatctcttctagcaacttctcatctgggaatacagtcccatcatctgttcacatctgatattgagaaggctgatctccatagatgccttgatgttggaaagggctatggtacttctagttctggacccgcattgcttgtgagcagtaaacctgaaccttctatgacgccagttgggccccactctccaattaagaatgaggtctgggaaacatcagtgccttttgtaccttcttttagttttcctgatagcacaacagcttcagaaagtcaatatgatccatttgttgactatgttgaacctcctaaagttgggaatacaaataatctcaagccctccactatatcctgcaacattacaagtcagcatacagatcagtacgcagttactgataaatccttgaattgcaatgacaaattgaccaggaatataactgccaaaggatcaaatgaacctgcttactttattgctcctgatagaggatgcagctctagcctggatgatactatcaaggtgaaagcttgtgacagaaaaaaggatgcagttgattacaatgagaaaacaagggatttccgttttcatttggcagaacatataaaggagttggtcaaaccaatatggaaaaaaggtaatctgagtaaagatgctcataaactggtagtgagaaaatctgtcgagaaggttgtggactccattgagccaaatcaagtaccaactactgaagagttgattacgaagtacatagccacatgtggaccaaagatagaaaaacttgtgaaggcatatgttgataggcacagtacatgtcatccaaccatcaaatacagcagctctgagatgggagcttgagcttaatggtgatgacagcttgaaccttctgtcctaccaatctggttaaccttcatttgtaggcccaacaagttaatattgttcatacaaacatgtatgtccatgacttcttgaggcaagtagtcagcgaagttccagatattggtgcatctgatgttattgctgatgataagcttggcaaaggacgtatatctatcctgtagttgataaggttcttacatgtcaaaataatcttctacgaagtgttaataaatgctgaattgtcatcaggaaagctggagatggaagcgaggaggaattaaagaggacaataaacgcctgatgcagcggtagagcctaccgtctgtaaccggaaggtcccgggttcgagccccagcctctgcatattatgcgggtaacgcttggcgcttaaagatacccttccccagaccccgcacagtgcgggaagcctacgacactgggtacgccctttatctgtcagaacttaatttccctttgttatgtaccttccatatttcactttttatctttttaaccgataaatttgtaggggagacccttatagtggtatatattaaataaaaaggaggaactgcacaataaagaaagtatagaagcaaaagcagacagaaggaaaaaagaaaataaagaagcaattataaagaacaagccataaggaaattgccaagcgaacgtccgagttcattctaagcatctggagcttcaacctgctactgaagcaaaacctttaagacgtaaaggatggaacaaaatctctgaatataacaacattcctctgcttccaaatctcccaggccgtaatagctagaatttccatgaagaactttttcgtgaattgatccctcgctgatatgatcatttcaaagaaattcaaacaatgatccctgtgaataccaacgtgattccagcaggctgtactgaatggacattcaaataaaacatgataggtgcctaggtggtttcctcacaattaatgtcccaaagcacataggttaatcatcatttgtaactttacacctcgttttttgaagaatattttttgagttgattctgtctctataggtcagccaaatggacaccttgatctttttactcactttagacttccagatccacatgaaaggaggtgggcaaatggattggaagtttagtctgtagaccttgcttgaacggaaattgctgtttcctcaagaatagatccatttgtccttgccatgcatgttgttttgaactgaaataattgtctcatagaacttgagatattcttcagtggcttccatagaaagaggtgcatgaaaattttcttggaagtccatgttgcccagaaactgagcaagaaagcagtttttctttttgacaaacgagcatagacatatgaaatccgatttgaaaagagagttattccagacaacatcccatagtaaaaaaaaggtttctcatcacctgccatcagcatagcaatacctctatagtaatctcccagtctaaaaatatctttccactagaacgagtctctttcagaggagcaatgaggaatctgccatgagttatagcgagtattccagatagggaacttctaatcgatcataaaacttatgaagatgtttcattagcaaagcaatattctgtatttttaaggttaataaccccagaccacccttgtccttgggggtggtaaccttatcccaagaaatcattggcttactatttgcattaatatcattctctttccataaacaatctcttctggctctatcaatagagttgatgactaagctggaagcttgattgtgcacatggtgtatgtaggaagcgtagaaaatgtggaatttactatagtcagtctccaagccattgatagccacatgctggtcataattggtcttctttctattttactcaacagaggtaagaaatccttaattctgggcttaataatccccatttgtagactgagatatgtaaagggaatagagccaacttggcaaccaaagactagccaattgagctgttttggtggcttccagattgatgggtaagaggcatgatttgctataattcaccttgagcatggtagtgtttgtgaatgagcgaagaatttctttcagacaaaacatatgctcaataggaagggataaaaccctaagatgggtagccttactaatgatgtattggagaagctcagttgcaatcacaaagagcaagggagataaaggatccccctgcctaacacctcttttgcaaagaattttttttcccagaaacaccatttaaaagaacagtagaggattcagaatttaaggttgaactgacccaacgaatccacctgacgggaaaacccaactgattgagtatagcaataatgacactatgctccactgtattaaaagctttatcaaaatttgagaacaaccacttcctttctagaaagatggcactgatgtaagtattcatagcaccaagcaagacacaatcctgtatggttctgtttttaataaaatcatattgatttttgtgcacaattcgttgaatcacaggcttcagcctattcaccaatagctttgtgattaatttgatggctatactgagaagagagattggcctaaaatcattcaccctaacagggttgttcacctttgggatgagagcgatgaaagaggtgttaattccatccagattaatgttaccatcataaaaatcatgacaaagtttataaaaatcaattttgatgatgtgtctcagaaactttccattaaatccattaaggactggagctttgtcaaaaggcatgttttgaacaattttatcaatctccttatggctatgataatcccgttttctattgagcctaaggtcccttttggtttgaggtcccttttgaacaatgttaagaggcattttggtcttcttataagtcatttaatgcgttttgaatatttttagtccctaaaactaaacagggttgggactaaactttagtccatagactaaaggaaccaaacaggccctatgacttttgagctctttttgctgattaagtttcttgtgtgcagaaagcagaaaaccatacaggcaatgacaggttgtgcgaggggttgtgtacttgtgtgagaggctgccgcggacgtgtggaacttagcgggtgttgtcatagttcataaacaattcgtggagaaccaatctagcaagctagtagcctaaaagtggagatagccgatgaggtcttaagatgcaactgaagcaaaagaggctactacatcaaggagcagttcaaccactcatttgatggcatagtccatttgatgaggtcttagatgcaactgaacccactccaaggggtttgctcaggaacattgacttgaatttagatccaactgatgaagaagatgagattacagtgccaccccaagcccagtcgatccagcgactagttccgttgcagccactgcgggaccatctgttgcactttctgggtgcttgggaactgcctgacatgaacaatatggagatgggccctgtccagtttgctttgtaaaaaaaatacagattggagagaatgggtattatgacaatcaagactagctctgcccttatagctttcagagtggataagtaggatagcaggacagttgtaggttcatcttaactctttagagattctcatgtatcatgtgtatcatagccgccaaagctgcagatgcagcttataatgtgccagaggtttaaggttggctggctagttgactgtaacgttccgaagctagattcgctcaacacgtagtgctttggcatgtagtaccagttgtacttgtacactcctgtctccagttgctctccagtttaatgttaattatatgcttatgcttcattggatagttgaggaagatcttgctggatgcatgtatggcaaataaaaagcaagaaagagtttcagattacttatcacagctcattccatgacaggagtcaatattttcatatatgatagacctgcgaaaagattgcgagccttcagggataacgcgtcatcatactgggagatgatacctttatttcctgaaacatggttatccaagcacaaggaaaaagttccagcagtgattgcgactcgccagctcaaggtgactgcggaatccaagatgggatcgatgcttctacagctgcttgaagttgttccacaccgcccccaccttggccttgcacagcttctttccgctgccggcatccacctcgacagtaaaatgcatggtcctggcatcacgttctgcacatatattatacatgggatgcatcagtggtggctccaacgatatcaactaggtttatgcagagtgacatgtctttcggtcttgctgttgtgctccgtgaccgtgactgaagcacgcgagctcaatggcctcgaggtcgctctcacacccagtgggtgcgttttggacgtcgtccaccatcccacaggccgttctcgtctcggccatggctgctggagcctgtggagagggagaaaagctgtgcagagggagaaagaggaagctgcggcgagacgagacagacgacgacagacactcctgagtcctgcttgtagtagtagagcaccaacaacgggctattgcataccatcaatgggcaggtctcctaatctagaagtgaatttactttctgccaattcttccattatctgctattgcatagctttttcattacttcacttc

SEQ ID NO: 2145 - DNA, 4810 bp, Zea Mays
tctgaaccaatgatttttcagcttgcgtttctcctgctccctatccgacgtagtgaatcccttcccaggcaccactcgccgacggaacgcctcccttcctaggcaccactcgccggagcgcatcccttcccagccactgatggccctgacccgccagcgcgcttccctccccaccgttgacggccccgacccgccggtggactgcgctcctcatcgaccagcgtggccatattttgcatttgttcctgtttcagcttgtgagcaactgatactactgtcccggcccatcgttactggaccaagaactttgagatgtgaatcaatcatttttggctctttcatgcaccacatatttcagcagcacagaaagtttatgggtgaaaatggtcatttggggaactctatttacaggaggctggaaactagtctgtacaagaacgaagcagttaatctattcttctctgataccagcgcttggggtacgagcaaggaagggacttcaagaaatacgggtgggatggaagttgccttggtatcaactgtattgaaggttttggggacgaagttagctcctcttgcactcaaagagttgagctctaaagcaggtgtggccaaagatcttcaggaactccaggacctagttgaggagatcaacaattggttgcaaacagttggtgataaagaccgatcatctaaatggctcaaaaaattgaaagaagttgcttatgatgctgaagatttagtccatgagttccacatcgaggctgaaaaacaagacagagaaattactggtggcaagaataccttggtcaaatacttcatcacaaaacctaaagcaactgtgactgaatttaagatagctcacaagatcaagaaaataaaaaacagatttgatgcaattgtgaaaggaaggagtgactatagcacaatagcaaatagcatgccagtggattatcctgttgagcatacaagaaagacaattggagaggtgccattgtatactattgtggatgagacatcaatatttggcagggatcaagcaaagaatcagataatatctaagctgatagagactgatagccaacaaagaataaagatagtttcagtaattgggctaggtggctctggtaaaactactctcgcgaaacaagtatttaatgatggtaacattataaagcattttgaagttatattgtgggttcatgtgtcaagagaatttgctgttgaaaagcttgtggcgaagttgtttgaagccattgctggtgacatgtctgaccacctcctattgcagcatgtgagcagaactatctcagacaagttagttggaaagaggttcctagctgtcttggatgacgtttggacagaggatcgtgttgagtgggagcgattcatggtacatttaaagtgcggtgcacctggaagtagtattttactcactactcgtagtagaaaagttgcagaagcagtggattctagttatgcatacgacctaccactcttgtctatggaagatagctggaaagtgttccaacaatgttttggaattgccatgaaagctctagaccctgaattcctacagtccgggatagagattgtggagaaatgcggaggtgtgccccttgcaattaaagttattgcaggcatcctccatggaatgaaaggaattgaagaatggcagtccatatgcaatagtaatttattagatgtccaggatgacgaacatagagtatttgcatgcttgtggttgagttttgttcatttaccggaccatctaaagccttgttttctacactgctctatatttccaagaggctatgtaatcaacaggtgtcatttgatttctcaatggatagctcatggcttcgtcccgacaaaccaagctcgacaagcagaagatgttggaattggctactttgattcccttcttaaagtggggttccttcaagaccatgatcgagaccaaatttggtccacaaggggtgaagtaacatgcaaaatgcatgacctggttcatgatctcgctagacaaattctacgggatgaatttgagtctgagatagaaacaaacaagcaaataaagagatgcagatacctatctttgacttcatgcactgggaagcttgataacaaattatgtggcaaggtccgtgcactctatgtttgtggccgtgcactcgaatttgacaagacaatgagcaagcagtgttgtgtccgtaccattatattgaagtatataactgctgactcattgcctctgtttgtgtcaaaatttgaatacctggggtatcttgaaatatccgatgttaactgtgaagcactaccagaagctctctcgcgttgttggaacttgcaggcccttcatatattaaattgctcaagacttgcagttgtacctgaaagtatcggcaagcttaagaagcttagaactctggaactgaatggtgtttctagtatcaagagtttaccacagtctattggcgattgtgataatcttcgaagattatacctagaaggttgtcatagattcgaagatataccaaattccttgggaaaattggaaaatttaaggatacttagtattgttcattgctttagttttgaaaaactttcgccatcagcatcatttgggaagcttttgaacttacaaactatcacctttaactgttgcttcaatctccgaaacctacctcagtgcatgacttctttgagtcatctagagatggtggatcttggatattgttacgagcttgttgaattgcctgaaggcatagggaatttaagaaaccttaaagttttgaatctgaagcaatgcacacaattgcgtggactaccagctggttgtgggcagctaactcgtttacaacagttgagcttgtttgttattggagacagtgccaaacacgcaaggatctctgagcttggtaatcttgataagttggatggtgagctgcagattaaaaacattagatatgtgaaagatccaagtgacacagacaaagttcgtttgaagaaaaagattggcatccggaaattgtcgttggattggtattcaagattggaggttcagcctgatgatgtggaagaagagttatcattaaatatggagaaggaattgcatttgctcgacagtcttgaaccaccatcaaaaattgagaagctgagaattcgtggctaccggggttcacaattgccacgttggatggcaaagcaaagtgactcttgtggtccagcggatgatacacacatagtaatgcaaagaaatccatctgaattctcccatctgactgaattagtactggacaacttaccaaacttggagcaccttggggaacttgtggaactgccactggtaaagatccttaagctcaaaagactgccaaagttggtagagctgcttacgaccacaacgggggaggaaggagtggaagtgctatgtcgtttccatcacgtttccactctagtaataattgattgccggaaacttgttgtgaagccgtactttcctccgtccttgcagagattgacactagaaggaaacaatatgcagttggtttcttcaggatgcttcttccatccacgtcatcatcatgcatctcatgctcatggtgacgagtcttcatcttcctcctattttgcggatgagacgggtactcacctcgagagacttgaacttcgtcggttgacaggatcatcatctggttgggaggtgctgcagcatctcactgggcttcataccctagaaatatacatgtgcacagaccttacacatttacctgagagcatccactgccccaccactctctgtagactgatgataagaagttgtgataatcttcgtgtgctgcctgactggcttgtggaactgaaatctctacagagtctggacatagactcatgtgatgctctccagcagcttcctgaacaaataggagaactctgctcactccagcacctccaaataatttctatgcctttcctgacttgccttcccgagagcatgcagcacctcacctcgcttcgaattctcaacttgtgtgaatgtaacgcgctgacccatcttccggagtggctaggcgaactctctgcgcttaaaaaactcttgatccagagctgccgtggccttacatctttgccccgctccatacaatgccttactgctctcgaggaattatatataagcggcaaccccaaactgcttcagatcagtgcatcatattctaaggaagacaaggatggccagctgcaaccgttccgatgttgcaggcctgacgaccagcattgcagtgaggcccaagagttcgatctggtccggaacatgctcatcgtcgcagtagaagaacgctacaaggatgctgctcaatacagaggccaacattccatgttgcggtcaaagaaaaagaacgcgatatagcaggcccaggccgttattatgtacatccacatgtgtgccaagttcaacttgttaggtaaacgtctaagaaaacaccatgtaaatatggaggccttttttttgctgaagcgcatgaagcttcggcaaacatctaaagaacaccatgcaaatggctgtggtgtcctgcgattggtctacgcgatgtacatgtgcgcaagctgctttgaagagaatttaaccaccttgaattttaggtacccatacagttcgctcatgtattgatctggcgcaagcttcgatgaacattttttggtttcatgtggttgatatgttgcttgagccttgtcagcttgacgattttttggtttaatgtggttgatatactgctagctacatcaccgctgtttgtcttcaaatcgg

SEQ ID NO: 2146 - DNA, 4903 bp, Zea Mays
ataaacaaaatcaacctccatgattaaacaaaagttcaacgagtaattaaataagcgcccgctgggtcgttcgttgccagatcatgtttttcaggtctgtctacctccatgattattaaattttttttcgagcgatcccgattccaacaggggacacgagaacggctttcgaggctaggcatgtggtttggaggaataatctcacgtggtaccacgctttggaggggcacacgagatgcggtcgtgcgtgcagatgggtttcacatggcagcggtttcctggtctgggccagctcgatcaccgagttaagaagctgactgaagccacaagccactgaggcaccaaagaatacgcaaagctctctgcagacctgcagtctgagctacactcattcaaagtttcggctaacaaaaacatttggaggttgcacagaacaacacatcatttggtcagatcccaaggggaactctatttacaggaggctggaaactagtctgtacaagaacgaagcagttaatctattcttctctgataccagcgcttggaaacaagaataacataaagggtgttgtcccagggtacgagcaaggaagggacttcaagaaatacgggtgggatggaagttgccttggtatcaactgtattgaaggttttggggacgaagttagctcctcttgcactcaaagagttgagctctaaagcaggtgtggccaaagatcttcaggaactccaggacctagttgaggagatcaacaattggttgcaaacagttggtgataaagaccgatcatctaaatggctcaaaaaattgaaagaagttgcttatgatgctgaagatttagtccatgagttccacatcgaggctgaaaaacaagacagagaaattactggtggcaagaataccttggtcaaatacttcatcacaaaacctaaagcaactgtgactgaatttaagatagctcacaagatcaagaaaataaaaaacagatttgatgcaattgtgaaaggaaggagtgactatagcacaatagcaaatagcatgccagtggattatcctgttgagcatacaagaaagacaattggagaggtgccattgtatactattgtggatgagacatcaatatttggcagggatcaagcaaagaatcagataatatctaagctgatagagactgatagccaacaaagaataaagatagtttcagtaattgggctaggtggctctggtaaaactactctcgcgaaacaagtatttaatgatggtaacattataaagcattttgaagttatattgtgggttcatgtgtcaagagaatttgctgttgaaaagcttgtggcgaagttgtttgaagccattgctggtgacatgtctgaccacctcctattgcagcatgtgagcagaactatctcagacaagttagttggaaagaggttcctagctgtcttggatgacgtttggacagaggatcgtgttgagtgggagcgattcatggtacatttaaagtgcggtgcacctggaagtagtattttactcactactcgtagtagaaaagttgcagaagcagtggattctagttatgcatacgacctaccactcttgtctatggaagatagctggaaagtgttccaacaatgttttggaattgccatgaaagctctagaccctgaattcctacagtccgggatagagattgtggagaaatgcggaggtgtgccccttgcaattaaagttattgcaggcatcctccatggaatgaaaggaattgaagaatggcagtccatatgcaatagtaatttattagatgtccaggatgacgaacatagagtatttgcatgcttgtggttgagttttgttcatttaccggaccatctaaagccttgttttctacactgctctatatttccaagaggctatgtaatcaacaggtgtcatttgatttctcaatggatagctcatggcttcgtcccgacaaaccaagctcgacaagcagaagatgttggaattggctactttgattcccttcttaaagtggggttccttcaagaccatgatcgagaccaaatttggtccacaaggggtgaagtaacatgcaaaatgcatgacctggttcatgatctcgctagacaaattctacgggatgaatttgagtctgagatagaaacaaacaagcaaataaagagatgcagatacctatctttgacttcatgcactgggaagcttgataacaaattatgtggcaaggtccgtgcactctatgtttgtggccgtgcactcgaatttgacaagacaatgagcaagcagtgttgtgtccgtaccattatattgaagtatataactgctgactcattgcctctgtttgtgtcaaaatttgaatacctggggtatcttgaaatatccgatgttaactgtgaagcactaccagaagctctctcgcgttgttggaacttgcaggcccttcatatattaaattgctcaagacttgcagttgtacctgaaagtatcggcaagcttaagaagcttagaactctggaactgaatggtgtttctagtatcaagagtttaccacagtctattggcgattgtgataatcttcgaagattatacctagaaggttgtcatagattcgaagatataccaaattccttgggaaaattggaaaatttaaggatacttagtattgttcattgctttagttttgaaaaactttcgccatcagcatcatttgggaagcttttgaacttacaaactatcacctttaactgttgcttcaatctccgaaacctacctcagtgcatgacttctttgagtcatctagagatggtggatcttggatattgttacgagcttgttgaattgcctgaaggcatagggaatttaagaaaccttaaagttttgaatctgaagcaatgcacacaattgcgtggactaccagctggttgtgggcagctaactcgtttacaacagttgagcttgtttgttattggagacagtgccaaacacgcaaggatctctgagcttggtaatcttgataagttggatggtgagctgcagattaaaaacattagatatgtgaaagatccaagtgacacagacaaagttcgtttgaagaaaaagattggcatccggaaattgtcgttggattggtattcaagattggaggttcagcctgatgatgtggaagaagagttatcattaaatatggagaaggaattgcatttgctcgacagtcttgaaccaccatcaaaaattgagaagctgagaattcgtggctaccggggttcacaattgccacgttggatggcaaagcaaagtgactcttgtggtccagcggatgatacacacatagtaatgcaaagaaatccatctgaattctcccatctgactgaattagtactggacaacttaccaaacttggagcaccttggggaacttgtggaactgccactggtaaagatccttaagctcaaaagactgccaaagttggtagagctgcttacgaccacaacgggggaggaaggagtggaagtgctatgtcgtttccatcacgtttccactctagtaataattgattgccggaaacttgttgtgaagccgtactttcctccgtccttgcagagattgacactagaaggaaacaatatgcagttggtttcttcaggatgcttcttccatccacgtcatcatcatgcatctcatgctcatggtgacgagtcttcatcttcctcctattttgcggatgagacgggtactcacctcgagagacttgaacttcgtcggttgacaggatcatcatctggttgggaggtgctgcagcatctcactgggcttcataccctagaaatatacatgtgcacagaccttacacatttacctgagagcatccactgccccaccactctctgtagactgatgataagaagttgtgataatcttcgtgtgctgcctgactggcttgtggaactgaaatctctacagagtctggacatagactcatgtgatgctctccagcagcttcctgaacaaataggagaactctgctcactccagcacctccaaataatttctatgcctttcctgacttgccttcccgagagcatgcagcacctcacctcgcttcgaattctcaacttgtgtgaatgtaacgcgctgacccatcttccggagtggctaggcgaactctctgcgcttaaaaaactcttgatccagagctgccgtggccttacatctttgccccgctccatacaatgccttactgctctcgaggaattatatataagcggcaaccccaaactgcttcagatcagtgcatcatattctaaggaagacaaggatggccaggctccgacgacattcagatcacatggcttgacaggtcgacatacaaatccccgttccatgtagtatttctgcagggacaagagtcttctctcttgaactctacagctgcaaccgttccgatgttgcaggcctgacgaccagcattgcagtgaggcccaagagttcgatctggtccggaacatgctcatcgtcgcagtagaagaacgctacaaggatgctggtaaacgtctaagaaaacaccatgtaaatatggaggccttttttttgctgaagcgcatgaagcttcggcaaacatctaaagaacaccatgcaaatggctgtggtgtcctgcgattggtctacgcgatgtacatgtgcgcaagctgctttgaagagaatttaaccaccttgaattttaggtacccatacagttcgctcatgtattgatctggcgcaagcttcgatgaacattttttggtttcatgtggttgatatgttgcttgagccttgtcagcttgacgattttttggtttaatgtggttgatatactgctagctacatcaccgctgtttgtcttcaaatcgg

SEQ ID NO: 2147 - DNA, 5057 bp, Zea Mays
ggacctattcctctgaaccaatgatttttcagcttgcgtttctcctgctccctatccgacgtagtgaatcccttcccaggcaccactcgccgacggaacgcctcccttcctaggcaccactcgccggagcgcatcccttcccagccactgatggccctgacccgccagcgcgcttccctccccaccgttgacggccccgacccgccggtggactgcgctcctcatcgaccagcgtggccatattttgcatttgttcctgtttcagcttgtgagcaactgatactactgtcccggcccatcgttactggaccaagaactttgagatgtggggaactctatttacaggaggctggaaactagtctgtacaagaacgaagcagttaatctattcttctctgataccagcgcttgggtatattaacataatcctatcttatatagctcactttcatgtatgtgcagtataataccctgtgtttcctctcactcatgctaatttcctggtgatgttagaaacaagaataacataaagggtgttgtcccagggtacgagcaaggaagggacttcaagaaatacgggtgggatggaagttgccttggtatcaactgtattgaaggttttggggacgaagttagctcctcttgcactcaaagagttgagctctaaagcaggtgtggccaaagatcttcaggaactccaggacctagttgaggagatcaacaattggttgcaaacagttggtgataaagaccgatcatctaaatggctcaaaaaattgaaagaagttgcttatgatgctgaagatttagtccatgagttccacatcgaggctgaaaaacaagacagagaaattactggtggcaagaataccttggtcaaatacttcatcacaaaacctaaagcaactgtgactgaatttaagatagctcacaagatcaagaaaataaaaaacagatttgatgcaattgtgaaaggaaggagtgactatagcacaatagcaaatagcatgccagtggattatcctgttgagcatacaagaaagacaattggagaggtgccattgtatactattgtggatgagacatcaatatttggcagggatcaagcaaagaatcagataatatctaagctgatagagactgatagccaacaaagaataaagatagtttcagtaattgggctaggtggctctggtaaaactactctcgcgaaacaagtatttaatgatggtaacattataaagcattttgaagttatattgtgggttcatgtgtcaagagaatttgctgttgaaaagcttgtggcgaagttgtttgaagccattgctggtgacatgtctgaccacctcctattgcagcatgtgagcagaactatctcagacaagttagttggaaagaggttcctagctgtcttggatgacgtttggacagaggatcgtgttgagtgggagcgattcatggtacatttaaagtgcggtgcacctggaagtagtattttactcactactcgtagtagaaaagttgcagaagcagtggattctagttatgcatacgacctaccactcttgtctatggaagatagctggaaagtgttccaacaatgttttggaattgccatgaaagctctagaccctgaattcctacagtccgggatagagattgtggagaaatgcggaggtgtgccccttgcaattaaagttattgcaggcatcctccatggaatgaaaggaattgaagaatggcagtccatatgcaatagtaatttattagatgtccaggatgacgaacatagagtatttgcatgcttgtggttgagttttgttcatttaccggaccatctaaagccttgttttctacactgctctatatttccaagaggctatgtaatcaacaggtgtcatttgatttctcaatggatagctcatggcttcgtcccgacaaaccaagctcgacaagcagaagatgttggaattggctactttgattcccttcttaaagtggggttccttcaagaccatgatcgagaccaaatttggtccacaaggggtgaagtaacatgcaaaatgcatgacctggttcatgatctcgctagacaaattctacgggatgaatttgagtctgagatagaaacaaacaagcaaataaagagatgcagatacctatctttgacttcatgcactgggaagcttgataacaaattatgtggcaaggtccgtgcactctatgtttgtggccgtgcactcgaatttgacaagacaatgagcaagcagtgttgtgtccgtaccattatattgaagtatataactgctgactcattgcctctgtttgtgtcaaaatttgaatacctggggtatcttgaaatatccgatgttaactgtgaagcactaccagaagctctctcgcgttgttggaacttgcaggcccttcatatattaaattgctcaagacttgcagttgtacctgaaagtatcggcaagcttaagaagcttagaactctggaactgaatggtgtttctagtatcaagagtttaccacagtctattggcgattgtgataatcttcgaagattatacctagaaggttgtcatagattcgaagatataccaaattccttgggaaaattggaaaatttaaggatacttagtattgttcattgctttagttttgaaaaactttcgccatcagcatcatttgggaagcttttgaacttacaaactatcacctttaactgttgcttcaatctccgaaacctacctcagtgcatgacttctttgagtcatctagagatggtggatcttggatattgttacgagcttgttgaattgcctgaaggcatagggaatttaagaaaccttaaagttttgaatctgaagcaatgcacacaattgcgtggactaccagctggttgtgggcagctaactcgtttacaacagttgagcttgtttgttattggagacagtgccaaacacgcaaggatctctgagcttggtaatcttgataagttggatggtgagctgcagattaaaaacattagatatgtgaaagatccaagtgacacagacaaagttcgtttgaagaaaaagattggcatccggaaattgtcgttggattggtattcaagattggaggttcagcctgatgatgtggaagaagagttatcattaaatatggagaaggaattgcatttgctcgacagtcttgaaccaccatcaaaaattgagaagctgagaattcgtggctaccggggttcacaattgccacgttggatggcaaagcaaagtgactcttgtggtccagcggatgatacacacatagtaatgcaaagaaatccatctgaattctcccatctgactgaattagtactggacaacttaccaaacttggagcaccttggggaacttgtggaactgccactggtaaagatccttaagctcaaaagactgccaaagttggtagagctgcttacgaccacaacgggggaggaaggagtggaagtgctatgtcgtttccatcacgtttccactctagtaataattgattgccggaaacttgttgtgaagccgtactttcctccgtccttgcagagattgacactagaaggaaacaatatgcagttggtttcttcaggatgcttcttccatccacgtcatcatcatgcatctcatgctcatggtgacgagtcttcatcttcctcctattttgcggatgagacgggtactcacctcgagagacttgaacttcgtcggttgacaggatcatcatctggttgggaggtgctgcagcatctcactgggcttcataccctagaaatatacatgtgcacagaccttacacatttacctgagagcatccactgccccaccactctctgtagactgatgataagaagttgtgataatcttcgtgtgctgcctgactggcttgtggaactgaaatctctacagagtctggacatagactcatgtgatgctctccagcagcttcctgaacaaataggagaactctgctcactccagcacctccaaataatttctatgcctttcctgacttgccttcccgagagcatgcagcacctcacctcgcttcgaattctcaacttgtgtgaatgtaacgcgctgacccatcttccggagtggctaggcgaactctctgcgcttaaaaaactcttgatccagagctgccgtggccttacatctttgccccgctccatacaatgccttactgctctcgaggaattatatataagcggcaaccccaaactgcttcagatcagtgcatcatattctaaggaagacaaggatggccaggtgagacatttctgtttctctctggcatgtgcgcacacattcgtttctgaatgaacccacatttattttctgaacaatggattatatataatgtatgcggacgtattgtataagctgttctattgttcataattggatacggtacttgttccaatttggtgctttacatgtatgtgtatcatgtaggctccgacgacattcagatcacatggcttgacaggtcgacatacaaatccccgttccatgtagtatttctgcagggacaagagtcttctctcttgaactctacagctgcaaccgttccgatgttgcaggcctgacgaccagcattgcagtgaggcccaagagttcgatctggtccggaacatgctcatcgtcgcagtagaagaacgctacaaggatgctggtaaacgtctaagaaaacaccatgtaaatatggaggccttttttttgctgaagcgcatgaagcttcggcaaacatctaaagaacaccatgcaaatggctgtggtgtcctgcgattggtctacgcgatgtacatgtgcgcaagctgctttgaagagaatttaaccaccttgaattttaggtacccatacagttcgctcatgtattgatctggcgcaagcttcgatgaacattttttggtttcatgtggttgatatgttgcttgagccttgtcagcttgacgattttttggtttaatgtggttgatatactgctagctacatcaccgctgtttgtcttcaaatcgg

SEQ ID NO: 2148 - DNA, 2138 bp, Zea Mays
gtgacgactgtgcctctgaatggatcctatcctacacaagtcatgggggccgccgccagctcacacacactgccgacgctgccgtgccactgccatcctcgagcacaagggaccgaccagacccgatccacagctcatcacacacacacacagtggcgagctcgtcaattgcaggcaagacagcaagcgcatttacacagcacgctgaaagccgggacgcagagcagcttttgcgccttgtcccctcctgctcgtcgcttccctcactctcacagccacgccacgccacgagagaagaatgccgccgacgctgggcctgctcctcgcggcggcggcggcggtcctgctgctgctgctgccgccgccaccatcggcgggggcgcaggagacgtgctggtcggggccggcgccgcggcgcggggcgtggatgtccgtggccagcttcggggcgcgcggggacgggcagacgctcaacacgggcgcgttcgcgcgcgccgtggcgcgcatcgcgcgtcgccggggcgcgcggggcggcacgctgctgtacgtgccgcccggggtgtggctcacgggccccttcaacctcacctcccacatgacgctcttcctcgcccgcggcgccatcgtccgcgccacccagccatgccttgctaccatcgaactaataagtgagcaggacacgtcgagctggccgctcatcgacccgctgccgtcgtacgggagagggcgcgagctgcctggcgggagatacatgagcttgatccacggccacggtctgcaggacgtcttcatcacaggtgagaacggcaccatcgacggccaaggcggcgtgtggtgggacatgtggaagaagcgcacgctgcccttcacgaggccgcacctgctggagctcatgtactccaccgacgtcgtcgtctccaacctcgtcttccaggactcgccgttctggaacatccacccggtttactgcagcaacgtagtgatagcaaacctgactgtgttggcgccgcacgactcccccaacaccgacgggatcgatctaggtaagattcaagcagcaacgtgtgcgtcgaggactgctacatctccgccggcgacgacctgatctccatcaagagcgggtgggacgagtacggcgtggccttcggccgcccaagctccggcatcacggtccggaggataaccgggtcgggcccgttcgccggcttcgcggtcgggagcgagacctcgggcggcgtggaggacgtcgtggccgagcacctgagcttctccggcgtgggcgtcggggttcacgtgaagacaaactcgggcaggggcggcttcatccggaacgtcaccgtctcccaggtgaccctggacggcgcccgctacggcctgaggatcgccggcgacgttgggggccaccccggcgcgtcctacaacgcgagcctgctccccgtcatcgacggcgtggcggtcaggaacgtctggggccggaacgtccggcaggccgggctcatacggggcatcagggactcggtcttcagtaacatttgcctctccaacgtgaagctctatggcattggcagcgactccatcgggccgtggagatgccgagccgtcagtggcagcgcactcgacgtgcaaccgtcgccatgtgcggagctggctagtacgtccgggacaggtttctgtacctgaatcagtttttccgcctcctatagcagcaataaagacgtcagcatttctccattttgttcatcacctacagggccctttgtttctttggcaaactcttctgcgattcagctgtcactgttgaattctgctgttggcagaggataatctatttttaccagcagccattgcaagagaattatttttacgtccgtgaaatggtgagaccgatcagcattgcacatcctggtgttggtgtaaccagatcccccactgccgtgtgggcgcgggacactgccggccccacacgcagtgaccggcactcacgggtaccatggacttgtttggaagcaaagagaataaaaaagatgagttgtatagtgtttaatgttccagaagaagagaaagagaagcttcttgtaacacccaaagtcttattttggaagactagtaaaattctcccaatatttttaagttaaaat

SEQ ID NO: 2149 - DNA, 1513 bp, Zea Mays
agaagagagaagagggcgggcatcggccagtgggggctctgaggccgagggaggcgaggaaagcggcgggtgccgggccgcccgcgccggtgccgagccgcccgcgccggtgccgaggccctcaccagtcaccaccccctcccctcttccgtctgtcccccgcttgccgccaccgccgctgcccgctcgcgatccttcccctttttaacgctcccgcggccccgcgtcgtgctcccttttgtcgccgctgccttcgtgcccgtactcgcgggttctcctcgctcctcaatctccgcgcctgggcgcggcgttcgccgccggatctgggcgcgggacggtgccccggacggtcgatggcgcgggcggcgctccggttgggcgaccgcgcgctcgcgctcctcgtcctcgtgtcagtggctctgcttccacttgtcagttccgacgatggacacaaacactgcgagggtgttgtcaggggctgggcggattcctccacggggcgcgtgaaggacggggacaaactgagcctcaaggatttgctcttcttcctccacattcctaggactggaggccgcacctactttcactgcttcctaaaaaagctgtatacaaatgcgcaggaatgcccgcgttcttatgacaaactacggttcgacccaagagagatgccaggggtatcgacaaagttcatagtagtaagaaggttaatgcatatgatgtggaggatatggttatgccgttacatcagtacatcaatgatccagttgcccatgagatcattcataatggggctacctttcagattactgggttaacgaacaattcatactttgatggagcacatgaggttcgacattgtgccagaaagcatccagatcttggtcgtattgtgcttgaagttgctaaggctggaccagatgctgtatgtaggacttacagaggatcatgaagagtcagcgaggttgtttgctcatatggtaggagcacaggtgcttttacaatctgggacattgagtttggatctcaaggaagatctgcacagtgagactgactcacacccatccatggtggagcccggggatgaagaagcaagcgaacatctgaataacacacatggttggcaaaataatgaagccctgaactctaccagcgacgaacaaggaaaaggaaatatgactgtgggtaaactgatggaagcttatgaaacttgcatcgctaaactgcggaagtcccaatctagccgtcgtaaaatatcactaaagaaagtggaggaagcaaacttctcaaaagaggcacggaagctggtccccgaggcaattttgaaacaaattatctcgctgaacagccttgacatggaactttatgaccatgctaagaaaatctttacccaggaacatctgatgctgaaagctcagcaatccatggcggggcagcacagacagttggcggaacaagaggatcccagtgatgtccagagcgcgtcccatggctaaccatactaactgttgaagta

SEQ ID NO: 2150 - DNA, 1774 bp, Zea Mays
tgaacagccgcgcgtgcaagcgaataaacaacgccgcgacgagaagagagaagagggcgggcatcggccagtgggggctctgaggccgagggaggcgaggaaagcggcgggtgccgggccgcccgcgccggtgccgagccgcccgcgccggtgccgaggccctcaccagtcaccaccccctcccctcttccgtctgtcccccgcttgccgccaccgccgctgcccgctcgcgatccttcccctttttaacgctcccgcggccccgcgtcgtgctcccttttgtcgccgctgccttcgtgcccgtactcgcgggttctcctcgctcctcaatctccgcgcctgggcgcggcgttcgccgccggatctgggcgcgggacggtgccccggacggtcgatggcgcgggcggcgctccggttgggcgaccgcgcgctcgcgctcctcgtcctcgtgtcagtggctctgcttccacttgtcagttccgacgatggacacaaacactgcgagggtgttgtcaggggctgggcggattcctccacggggcgcgtgaaggacggggacaaactgagcctcaaggatttgctcttcttcctccacattcctaggactggaggccgcacctactttcactgcttcctaaaaaagctgtatacaaatgcgcaggaatgcccgcgttcttatgacaaactacggttcgacccaagccatcctgattgcaagctggttgttagtcatgatgactatagcttaacttccaagctgccaagggagagaacatctgttgtaacaatactaaggaacccagttgaccgtgtatttagcacatatgagttttcagttgaagttgcagctagattccttgttcacccaaacttaacttctgcaaagttaatgactacccgtgtgttaaaaaagtctcgtgctgtcagtactttggacatctggccttggaagtacttggttccttggatgagagaagatctgttttccaggagagatgccaggggtatcgacaaagttcatagtagtaagaaggttaatgcatatgatgtggaggatatggttatgccgttacatcagtacatcaatgatccagttgcccatgagatcattcataatggggctacctttcagattactgggttaacgaacaattcatactttgatggagcacatgaggttcgacattgtgccagaaagcatccagatcttggtcgtattgtgcttgaagttgctaaggctggaccagatgctgtatgtaggacttacagaggatcatgaagagtcagcgaggttgtttgctcatatggtaggagcacaggtgcttttacaatctgggacattgagtttggatctcaaggaagatctgcacagtgagactgactcacacccatccatggtggagcccggggatgaagaagcaagcgaacatctgatgactgtgggtaaactgatggaagcttatgaaacttgcatcgctaaactgcggaagtcccaatctagccgtcgtaaaatatcactaaagaaagtggaggaagcaaacttctcaaaagaggcacggaagctggtccccgaggcaattttgaaacaaattatctcgctgaacagccttgacatggaactttatgaccatgctaagaaaatctttacccaggaacatctgatgctgaaagctcagcaatccatggcggggcagcacagacagttggcggaacaagaggatcccagtgatgtccagagcgcgtcccatggctaaccatactaactgttgaagta

SEQ ID NO: 2151 - DNA, 1774 bp, Zea Mays
agaagagagaagagggcgggcatcggccagtgggggctctgaggccgagggaggcgaggaaagcggcgggtgccgggccgcccgcgccggtgccgagccgcccgcgccggtgccgaggccctcaccagtcaccaccccctcccctcttccgtctgtcccccgcttgccgccaccgccgctgcccgctcgcgatccttcccctttttaacgctcccgcggccccgcgtcgtgctcccttttgtcgccgctgccttcgtgcccgtactcgcgggttctcctcgctcctcaatctccgcgcctgggcgcggcgttcgccgccggatctgggcgcgggacggtgccccggacggtcgatggcgcgggcggcgctccggttgggcgaccgcgcgctcgcgctcctcgtcctcgtgtcagtggctctgcttccacttgtcagttccgacgatggacacaaacactgcgagggtgttgtcaggggctgggcggattcctccacggggcgcgtgaaggacggggacaaactgagcctcaaggatttgctcttcttcctccacattcctaggactggaggccgcacctactttcactgcttcctaaaaaagctgtatacaaatgcgcaggaatgcccgcgttcttatgacaaactacggttcgacccaagccatcctgattgcaagctggttgttagtcatgatgactatagcttaacttccaagctgccaagggagagaacatctgttgtaacaatactaaggaacccagttgaccgtgtatttagcacatatgagttttcagttgaagttgcagctagattccttgttcacccaaacttaacttctgcaaagttaatgactacccgtgtgttaaaaaagtctcgtgctgtcagtactttggacatctggccttggaagtacttggttccttggatgagagaagatctgttttccaggagagatgccaggggtatcgacaaagttcatagtagtaagaaggttaatgcatatgatgtggaggatatggttatgccgttacatcagtacatcaatgatccagttgcccatgagatcattcataatggggctacctttcagattactgggttaacgaacaattcatactttgatggagcacatgagatgctgtatgtaggacttacagaggatcatgaagagtcagcgaggttgtttgctcatatggtaggagcacaggtgcttttacaatctgggacattgagtttggatctcaaggaagatctgcacagtgagactgactcacacccatccatggtggagcccggggatgaagaagcaagcgaacatctgaataacacacatggttggcaaaataatgaagccctgaactctaccagcgacgaacaaggaaaaggaaatatgactgtgggtaaactgatggaagcttatgaaacttgcatcgctaaactgcggaagtcccaatctagccgtcgtaaaatatcactaaagaaagtggaggaagcaaacttctcaaaagaggcacggaagctggtccccgaggcaattttgaaacaaattatctcgctgaacagccttgacatggaactttatgaccatgctaagaaaatctttacccaggaacatctgatgctgaaagctcagcaatccatggcggggcagcacagacagttggcggaacaagagggaggaggaaggaaacacgataggatatgagacgaaccgttctcgtactgcggtggaactgtggaaatgaagaactgtactcattgccagtagcaagc

SEQ ID NO: 2152 - DNA, 1802 bp, Zea Mays
agaagagagaagagggcgggcatcggccagtgggggctctgaggccgagggaggcgaggaaagcggcgggtgccgggccgcccgcgccggtgccgagccgcccgcgccggtgccgaggccctcaccagtcaccaccccctcccctcttccgtctgtcccccgcttgccgccaccgccgctgcccgctcgcgatccttcccctttttaacgctcccgcggccccgcgtcgtgctcccttttgtcgccgctgccttcgtgcccgtactcgcgggttctcctcgctcctcaatctccgcgcctgggcgcggcgttcgccgccggatctgggcgcgggacggtgccccggacggtcgatggcgcgggcggcgctccggttgggcgaccgcgcgctcgcgctcctcgtcctcgtgtcagtggctctgcttccacttgtcagttccgacgatggacacaaacactgcgagggtgttgtcaggggctgggcggattcctccacggggcgcgtgaaggacggggacaaactgagcctcaaggatttgctcttcttcctccacattcctaggactggaggccgcacctactttcactgcttcctaaaaaagctgtatacaaatgcgcaggaatgcccgcgttcttatgacaaactacggttcgacccaagccatcctgattgcaagctggttgttagtcatgatgactatagcttaacttccaagctgccaagggagagaacatctgttgtaacaatactaaggaacccagttgaccgtgtatttagcacatatgagttttcagttgaagttgcagctagattccttgttcacccaaacttaacttctgcaaagttaatgactacccgtgtgttaaaaaagtctcgtgctgtcagtactttggacatctggccttggaagtacttggttccttggatgagagaagatctgttttccaggagagatgccaggggtatcgacaaagttcatagtagtaagaaggttaatgcatatgatgtggaggatatggttatgccgttacatcagtacatcaatgatccagttgcccatgagatcattcataatggggctacctttcagattactgggttaacgaacaattcatactttgatggagcacatgaggttcgacattgtgccagaaagcatccagatcttggtcgtattgtgcttgaagttgctaaggctggaccagatgctgtatgtaggacttacagaggatcatgaagagtcagcgaggttgtttgctcatatggtaggagcacaggtgcttttacaatctgggacattgagtttggatctcaaggaagatctgcacagtgagactgactcacacccatccatggtggagcccggggatgaagaagcaagcgaacatctgaataacacacatggttggcaaaataatgaagccctgaactctaccagcgacgaacaaggaaaaggaaatatgactgtgggtaaactgatggaagcttatgaaacttgcatcgctaaactgcggaagtcccaatctagccgtcgtaaaatatcactaaagaaagtggaggaagcaaacttctcaaaagaggcacggaagctggtccccgaggcaattttgaaacaaattatctcgctgaacagccttgacatggaactttatgaccatgctaagaaaatctttacccaggaacatctgatgctgaaagctcagcaatccatggcggggcagcacagacagttggcggaacaagaggatcccagtgatgtccagagcgcgtcccatggctaaccatactaactgttgaagta

SEQ ID NO: 2153 - DNA, 2833 bp, Zea Mays
gtcgccgagcccgatcgagttcccgtctaagccgcacgccgttccggccccgatccgccgcatcacgtcggcccgacatgtaccagtggcgcaagttcgagttctttgaggagaagtctgccggccgcggcggcggcgggggttcagccgccgccgtgccggccgagatcgcgggccgagtcacctgctgctcgggcggccggggccgcgtcgcggtggggtgcgacgacggcaccgtgggccttctcgaccgcgggttccgcctctcctatggcttccaggcctacgcctcctcggtcctcttcctccagcagctcaagcaaagaaatgttcttgtcacggttggagacgatgaccagtcatcttctcaggcatcagcaatctgtctaaaggtttttgacctcgataaagtacaagaagaaggatcaagcacaacaactcctttctgtgttcaaattttgcggatcttcactgatcaatttcctcaagcaaagattacatcatttatggttctagaagaagcaccacccatactgatgattgccattggactggacaatggtttcatttattgcatcaaagcttgcatattcaaccaccaaggaggcaaacacttgatcagattggttgtcagacgaatgctgtagcaatgagtgaccgtatggacttaattattggtagacctgaagctgtatatttctacgaagttgatggtagaggcccttgctgggcatttgatggtgagaaaaagtttgtaggttggtttcgaggctatttactctgcattattgaagatcagagaacacataaaagcacacttaatgtttatgatcttaagaatcggttgattgcacatagcatgcctgtgggggatgtttcacacttagtatgtgagtggggttatattattctcataatgtcagacaaaaagattctgtgcattggagagaaagacatggaaagtaagcttgatatgttgttcaagaaaaatctttatacagttgcaatcaatcttgtacaaagtcagcaggctgatcctgcttccactgctgaggtgctgcggaagtatggtgaccatctgtatggaaaacaggaatatgatgaggctatgtcccagtatatccacactattggtcatcttgaaccatcgtatgttatacagaagttccttgatgcaaagcgcatctacaacttgacaaattatttagagaagttacatgatcgagggttagcatctaaagaccacaccacccttctgttgaactgctataccaaattgaaagatgtggagaaacttaaccattttatcaaggatgaagatggggttggtgagatcaagtttgatgtggaaactgccataagagtatgccgagcagctggatatcatgaacatgctatgtttgtggcaaaaaaggctgggaggcatgagttgtacttgaagattttacttgaggatcttggtagatatgacgaggcactgcaatatatatctggcctcgaggcaaaccaggcaggtcttactgtaaaagaatatgggaaaattcttgtggaacataggcctgctgaaacagttgaaatactgttaaggctctgtacagatgttggagatcctacgtcgagaagaggttcaaacagtatgcacttgcttatgataccatccccaatggactttgtgaatatatttgtgcacagcccgcaatatctgatgggatttctggaaaattatatcaaaacagtaacggactcacctgcgcaaacagaaattcataacacccttctggagctctatatttcaaatgatttgagcttcccgtctatctctcaagaaaatgaatatgagaatcactatatcaaagaaataaaaggtaaagaaactgctaatgtctataggtcaggaataaaggaaaaaactggtcttggaaaagaagatcctaaagtagcaaagaatattgttgataggagaaggaaagggcttgcgttactcaaatctgcttggacatctgagatggaagatcctttgtatgatgttgatcttgctctcattctttgtaacactaatgcattcaaagatggtttgctatttctatatgagaaactaaaactttacaaagaggttattagttgttacaagcaagcacatgatcatcaaggtttaattgcatgttgcaagaagttgggggactcatctcaaggaggggatccttctctctggggggatctattgaagtattttggggatcttggggaagattgctctaaagaagttaaagaggtcttgacctacattgagaaagaggatgttgtacctcccatcgttgtgctacagacactatcaaaaaacccatgcttgacactctcagtcgtcaaagattacattgctcgcaagcttgaacaagaatcaaagctaattgaagatgatagaaaatccattgataagtatcaggcagagacagagttgatgaaaagggaaatacaagatctcaagacgaacgcgaaggttttccaactgagcaagtgtagcgcgtgcactttcacccttgatctacctgctgtccatttcctgtgcatgcactcgttccaccttcgctgccttggtgacaacgaaaaagaatgcccagaatgcgcgcctgaatacagatccgtcatggaggcaaagcagaagctagagcaaaacgccagggaccatgatctctttttcaggcagttgaggggttccaaggacggcttctctgtcattgcagactattttagcaagggcatattttggaaactttggtctcagccaaagtttttctctgcaaagagagcgccagctgggtcccgctctggctga

SEQ ID NO: 2154 - DNA, 2731 bp, Zea Mays
gcgtattctgtagtacgtatgaaaggtaaaggcggcgtagcgctagtcgtatcttatctctgcagaatgttcgtagcagtacccactgaaagatgatagttgcatcgtggatctagatgtagctagtatcctacagtagccctgtacacacgtaaagcattgtctggggagtatttcttacggtcttacgttgaagtgtccctgtgtgttttcatctgcgtcgttactatctactactaagctagcaatggcaactcaacacacggtgttactacttgtgagctgctagcaatggcaactcaacatggtgttcaactggtcgctgctacgaccatcatgaggcttcattaaccatcgccgaaaaatccatccacctctctgaacatccatacgcagcttccagagatcaccacaagcattcatctgttcactgaacacctgctttcatttcatccctaccctgaacgacgatccatccatttctttttcggtctcagggtagtggagtagccattaaccgttggcgaccttaaagtttacagtacagctagcgctgtgttggcgcccagttttgtcttgctcatcaactgcagacggtcccgcggctcgatacccagttttgtcttgctcatcgacagcagacggtcctgtggctcgatacccgacccgatgttatttatatggactaaatattttatccattagttttttattaggtaaaaatattcacctaagggatataaaacgtttcgccctcattcatacatgttattgtgcttcggccatccatatattttgactattttactgacttttttgtgataatgtcatagaaggtttaatgactattttgatgaccacacaatggaacatgcaatgtgttatgtggtactatcctagtgttgctactttatctaattatccatggtgttgttggatagatgattgaatgacgttcgaaattttgtaatagtatttagattgatatcattgacgtttgtataatgtattattttgatagatgtttaatatttgtaggtacgagtaatctatacatacccacatgagtatatgagtatagatataggggtaaatctatacccggtttattcgcgatggaattattattattttttgtcgtggacgtaggtataagaccattcctggagcgatcctaatgctctggactctggtgacatgttctgtttacgcgggaataccttgctcggtgtgcggacaactctcaatcattgatcactttgtcttttggtgcaaattgcagacttcgtagctttctttatccgtatggagaacgaaactgctgtacagtataccatcgtgtggtccaaggtttgacaggtctcacagtattttcctgtctctaagcgctgatggacgtacggtacggattcatcgtcgacagggaacattggtccccggcgtgctgtgtattaactataacaagcatatatatgtgtgtgcgccacagtacattaaatattctgacaataattatgttgctgtttcttcagtgaggagcatcttagtatacgaccactggatcatgtgcccacctacctaggaccatctattcttctccccattggagaaaaaaaactgaattccatttacttgcggagttcgacgccgacaagcgcagctgcagaaagcgtctggacggccataatcgccgccgcaggaagccacagccagacaccatggcttctgctagctctatcacaagccagcaaggcacacgattctcaccatttgcgcctccaagactggaggcgagctggccgggggtgatgaaaaccgaggagagtccatatcgcatcactcaccaaatccatctgggctccagcagcagcagcaggcagcagcatttcgtgggagccgccacgtctgcctacgccaaagaaggcccgcgcttccctttcctgcaggagggcgagataagcttcgccaccggcgtggtgttggagccgccggcggcggctccagcgtgccagccgctcctcaagtcgggagcaccaccacccgagagcagcagcgccggcggcgggaagatgttctccgatcaggggctgactcgcgtgctcgactcggactgtgctctctctcttctgtcagcgccggccaactactccggcatcgacgtcagcaggatggtccgcccgactgaacacgtccccatggcccagcagctcgtggtctcgggcctgcagttcggcagcgcgtcgtggttcccgcgcccccaggcttccacgggcggctccttcgtctcatcctgccccgccgtgcaggtggagggcgagcagcagctgaacgccgtgctgggccccaacgacagcgaggtgagcatgaactacggcgggatgttccacgtcggcggcggcagcggcggcggcgagggctcctcggacggcggcacctcgtcgtcgatgcccttctcgtggcagtagtcgtcgtcacttgtcagcagccgctgcgttctctcatctttcgcgcttcagacgatctggtagggagatactggctttagtgatcactgatcagcattgatccccccccccccccccccactttttgtcgaatcggctctgctagccagcattattgtggacattttttgaatcgtctctagaatagtcgccgatgcgtgccttagcagcgcacagacattgttagtttggtcgcaacgatcaatggcatgtttgctcactttaca

SEQ ID NO: 2155 - DNA, 3929 bp, Zea Mays
gcctgctgctgccttgctatctatctatacaccgcccgcaccttccattcctcctcctccgaagcagcaggcagcagctgcatcgcacctcacacctctcgtgtccatcgatccagccgcccgccgcagctgcagctctcactgttgctgtgccacctcctcgtcgcctgtagtgtcgacagaaaaacgcccgctgaatgagagggaaggaacggaagctgcagcgggcgcgcgagtgcaaggactaggactagcggttgcaacgtcggcgcgcgcgcgcgtgcggcgtacgtcgggcatggattgggatctcaaggcggtgggcgcgtgggacctcgcggagctggagcaggaccacgcggccgccacggcagcagcggggccgtccgagggccacgccaccgatactgccgcggcgggcacgggcacggggacggggacggagagccgcccgcccggagcaggggcacccgccgagtgctctgtggacttgaagctgggcgggatgggcgagtgcgagctcggcgcgggcgcggcgacggcctgcagggagagggaggccgcggcgggggcgacgaagcggccgcgccccgccgggcagcagcagcagcagtgcccgtcgtgcgcggtggatgggtgcagagcggacctgagcaagtgccgcgactaccaccggcggcacaaggtgtgcgaggcgcactccaagacccccgtcgtcgtcgtggccggccgcgagatgcgcttctgccagcagtgcagcagcgctgttacgcttttccgttccctgcggtcgctgctcctgcagtccccacacagcaaactgctcagcagcgtttccttcactcttctctctgacgccctgatgcgaattaaacatctgctgccattgccaaagtctgggctctggagacggggcggatccacggacacgtgagctcctgcccttgcttttccgcgagcggattctttctttcacggccttcggcgacgggatgtcccccggcccctactctgccagtgccattttttcttcctcggcgtcggcgctgattgcttcccggccacagctcgccaccgccgccacggtttggcgtgccgcgttgagcgagacaggggtgtactccccagctttggctaccacatctgctaaagcagctgtctgtctgtactacctgcgtactgtgtgcgtattctgtagtacgtatgaaaggtaaaggcggcgtagcgctagtcgtatcttatctctgcagaatgttcgtagcagtacccactgaaagatgatagttgcatcgtggatctagatgtagctagtatcctacagtagccctgtacacacgtaaagcattgtctggggagtatttcttacggtcttacgttgaagtgtccctgtgtgttttcatctgcgtcgttactatctactactaagctagcaatggcaactcaacacacggtgttactacttgtgagctgctagcaatggcaactcaacatggtgttcaactggtcgctgctacgaccatcatgaggcttcattaaccatcgccgaaaaatccatccacctctctgaacatccatacgcagcttccagagatcaccacaagcattcatctgttcactgaacacctgctttcatttcatccctaccctgaacgacgatccatccatttctttttcggtctcagggtagtggagtagccattaaccgttggcgaccttaaagtttacagtacagctagcgctgtgttggcgcccagttttgtcttgctcatcaactgcagacggtcccgcggctcgatacccagttttgtcttgctcatcgacagcagacggtcctgtggctcgatacccgacccgatgttatttatatggactaaatattttatccattagttttttattaggtaaaaatattcacctaagggatataaaacgtttcgccctcattcatacatgttattgtgcttcggccatccatatattttgactattttactgacttttttgtgataatgtcatagaaggtttaatgactattttgatgaccacacaatggaacatgcaatgtgttatgtggtactatcctagtgttgctactttatctaattatccatggtgttgttggatagatgattgaatgacgttcgaaattttgtaatagtatttagattgatatcattgacgtttgtataatgtattattttgatagatgtttaatatttgtaggtacgagtaatctatacatacccacatgagtatatgagtatagatataggggtaaatctatacccggtttattcgcgatggaattattattattttttgtcgtggacgtaggtataagacagccggtgggtattgattgctatgtactcccgccgctctgtcgtggacgtaggtataagaccattcctggagcgatcctaatgctctggactctggtgacatgttctgtttacgcgggaataccttgctcggtgtgcggacaactctcaatcattgatcactttgtcttttggtgcaaattgcagacttcgtagctttctttatccgtatggagaacgaaactgctgtacagtataccatcgtgtggtccaagaattatccaaattcaaagaatcctgtggccataattcattggttcatggccatatgactgtgagagtggcacactacacctactgccaccaaatgtgcaaaacactgctaagaaataataaccatgggcttgttcatttcgatgggtttaaatccataccaagtcaaaatcttttaaatttttcaatcccatcgaatacacgtgaggtaggaagtcctataagattccatttacttgcggagttcgacgccgacaagcgcagctgcagaaagcgtctggacggccataatcgccgccgcaggaagccacagccagacaccatggcttctgctagctctatcacaagccagcaaggcacacgattctcaccatttgcgcctccaagactggaggcgagctggccgggggtgatgaaaaccgaggagagtccatatcgcatcactcaccaaatccatctgggctccagcagcagcagcaggcagcagcatttcgtgggagccgccacgtctgcctacgccaaagaaggcccgcgcttccctttcctgcaggagggcgagataagcttcgccaccggcgtggtgttggagccgccggcggcggctccagcgtgccagccgctcctcaagtcgggagcaccaccacccgagagcagcagcgccggcggcgggaagatgttctccgatcaggggctgactcgcgtgctcgactcggactgtgctctctctcttctgtcagcgccggccaactactccggcatcgacgtcagcaggatggtccgcccgactgaacacgtccccatggcccagcagctcgtggtctcgggcctgcagttcggcagcgcgtcgtggttcccgcgcccccaggcttccacgggcggctccttcgtctcatcctgccccgccgtgcaggtggagggcgagcagcagctgaacgccgtgctgggccccaacgacagcgaggtgagcatgaactacggcgggatgttccacgtcggcggcggcagcggcggcggcgagggctcctcggacggcggcacctcgtcgtcgatgcccttctcgtggcagtagtcgtcgtcacttgtcagcagccgctgcgttctctcatctttcgcgcttcagacgatctggtagggagatactggctttagtgatcactgatcagcattgatccccccccccccccccccactttttgtcgaatcggctctgctagccagcattattgtggacattttttgaatcgtctctagaatagtcgccgatgcgtgccttagcagcgcacagacattgttagtttggtcgcaacgatcaatggcatgtttgctcactttaca

SEQ ID NO: 2156 - DNA, 2051 bp, Zea Mays
tcgttttctgcttctttctctctcccttcctcctctattctgttcccccctttccacctccctccctcctcgctaaccccacccaccggccaccgcccgcctccagcctcgccggtcctcgccgcccaccccgccggaaccctagctccggagagtgccccggcctccccagccgccgattggttccgggggcccggcgcccctccgcacgatcgcgcgagatccggggtcgccgccggccggggagcagaagccatatgtcgggggtcggcagcggcaggccgccggccgcccagaagatcctgcagtcgctgcgaccgccgctgtccttcgccacgccgtcgcggtcgcccttcgccgcgcccgacgactaccaccgctttccgacaccggctgcggccacggcacccgccgccacctcaggcggcgtcggtgcgggggctcctcctcgtgatactatcgaggaggggctgttcatacggactccgctgaaaaggaaagctacatctgaagaaaatgatgctgctgctgagccaagcgattgtatcattaccagtccaatgcccacttcggtctctggtaaaactgttaaagcttctaaggcaaaagctaagaacagtaaaactgggcctcagacacctacatcaaatgttggttcaccactcaatccaccaactcctgttggcacgtgccgctatgacagttcactaggacttctgacaaaaaagttcattaacttgctcaagcaagcgccagatggcattctagatttgaacaatgctgcagaaacactagaggttcaaaagcgacgcatatatgacattactaatgtccttgaaggcattggactaatagagaagacacttaagaatagaatccgttggaagcagaagttgaaaatcttagtctgcaggagcaagcactagatgagcgtataagtgacatgcgtgaaaaactaagggggttaactgaagatgaaaataataaaaggtggctctatgtgactgaagacgacatcaagggattacccagctttcagtcaatttgatgagaaatttgaggaactgggtggtgttgcgacacccgtcaagcattccagtgtgcccagacatcaacccgcggaagatttcaatacttatgctggacaaagtagcacaccaatggacgtggcacatgatgtacagcatggccagaagattccccaggatcctagtgctttgcatgactttggagggatgacaaggattagtccttccgacgtccatacggattctgattactggctcctaacagagggggatgttagcatgactgatatgtggaaaacaggacaagaagtgcagtgggaccagatggatttcctgtcagaagatgttgtcacccctcgagcccataatcagcagccggtcacagttgacgggccacatatggaggttccaagcatggacccataagacattaatggctcaacaaaactgacatctggagcggtgagttctcgtgtgacagcaaatgtttattgcaacagaagggccagacggtttcatgagcgtatgtcatctggagtgtagtcagggcagagcagtccacaacttcagattggtgcacgcccggcacctctgttgtgaagactgacgagctcaactgactaagttaacagtctactgcctgattagtaagcgcagcactttagcttagcagacactgaagcgccagtttcttcgtgactggtgctgtgcacttgctctcatattcaccaccgctccattcgcttaccaagctaacattatcataccagatcagtggacctccactgaaaaatgctgcaaaatgtataaaacatcaggacaaaacagtgcacagtgcaaggggtgttggcgttacaggatgagctatcgattgaaggcaggaaattctttgtacaattgtttgatgccccaaaacagaacaaagcagagctgttcgcttgtaaacaaatgtttctatgcatgtatttaagaggagactccatttttttacatcaatttgatccatacagtcaaacgtataca

SEQ ID NO: 2157 - DNA, 2373 bp, Zea Mays
ctcgttttctgcttctttctctctcccttcctcctctattctgttcccccctttccacctccctccctcctcgctaaccccacccaccggccaccgcccgcctccagcctcgccggtcctcgccgcccaccccgccggaaccctagctccggagagtgccccggcctccccagccgccgattggttccgggggcccggcgcccctccgcacgatcgcgcgagatccggggtcgccgccggccggggagcagaagccatatgtcgggggtcggcagcggcaggccgccggccgcccagaagatcctgcagtcgctgcgaccgccgctgtccttcgccacgccgtcgcggtcgcccttcgccgcgcccgacgactaccaccgctttccgacaccggctgcggccacggcacccgccgccacctcaggcggcgtcggtgcgggggctcctcctcgtgatactatcgaggaggggctgttcatacggactccgctgaaaaggaaagctacatctgaagaaaatgatgctgctgctgagccaagcgattgtatcattaccagtccaatgcccacttcggtctctggtaaaactgttaaagcttctaaggcaaaagctaagaacagtaaaactgggcctcagacacctacatcaaatgttggttcaccactcaatccaccaactcctgttggcacgtgccgctatgacagttcactaggacttctgacaaaaaagttcattaacttgctcaagcaagcgccagatggcattctagatttgaacaatgctgcagaaacactagaggttcaaaagcgacgcatatatgacattactaatgtccttgaaggcattggactaatagagaagacacttaagaatagaatccgttggaagtaccttttgtgatttttttcatattgaaattgacataccagtcctaagtgcaagacttcttttttcccctgagaggtatgataataactagacctaagctcagttttgtgtaacacgttgcaggcagaagttgaaaatcttagtctgcaggagcaagcactagatgagcgtataagtgacatgcgtgaaaaactaagggggttaactgaagatgaaaataataaaaggtggctctatgtgactgaagacgacatcaagggattacccagctttcagaatgaaacactaattgctattaaagcacctcatggtactacacttgaagtacctgatccagatgaggcgggtgattatctccaaaggagatatagaattgtattaagaagtacgatgggaccaatagatgtttacttagttagtcaatttgatgagaaatttgaggaactgggtggtgttgcgacacccgtcaagcattccagtgtgcccagacatcaacccgcggaagatttcaatacttatgctggacaaagtagcacaccaatggacgtggcacatgatgtacagcatggccagaagattccccaggatcctagtgctttgcatgactttggagggatgacaaggattagtccttccgacgtccatacggattctgattactggctcctaacagagggggatgttagcatgactgatatgtggaaaacaggacgtatccttgatgatcatgcattaagatgcttgaatttcttaacatggaaaatagaagaagtgcagtgggaccagatggatttcctgtcagaagatgttgtcacccctcgagcccataatcagcagccggtcacagttgacgggccacatatggaggttccaagcatggacccataagacattaatggctcaacaaaactgacatctggagcggtgagttctcgtgtgacagcaaatgtttattgcaacagaagggccagacggtttcatgagcgtatgtcatctggagtgtagtcagggcagagcagtccacaacttcagattggtgcacgcccggcacctctgttgtgaagactgacgagctcaactgactaagttaacagtctactgcctgattagtaagcgcagcactttagcttagcagacactgaagcgccagtttcttcgtgactggtgctgtgcacttgctctcatattcaccaccgctccattcgcttaccaagctaacattatcataccagatcagtggacctccactgaaaaatgctgcaaaatgtataaaacatcaggacaaaacagtgcacagtgcaaggggtgttggcgttacaggatgagctatcgattgaaggcaggaaattctttgtacaattgtttgatgccccaaaacagaacaaagcagagctgttcgcttgtaaacaaatgtttctatgcatgtatttaagaggagactccatttttttacatcaatttgatccatacagtcaaacgtataca

SEQ ID NO: 2158 - DNA, 1421 bp, Zea Mays
gcttcctttttcccaattcccaccacgtgagccgaagctgcacagcacaaccaagagccaacagagcaacgcccaggcacacacgacgcggaccaggcaaccagctgccgagggaggaaccctagcggaacactgtgcaggtgacggcggcgcgctaccggtgacggcggcgcgctaccggtgacgggggatacggtggcatcgtccccctcggcccctcttccatccccggcgcggcggcgccagcagccggcctgcagatcagctcaacaaagataaccttgcgcatcctcctaagaagatcaagactacccagccaggttctacagaccctcaaaaccttaatcgttagatcatcgccgttctcatgaagaattctgagtgcaatacagtcatcaggtgctgcagctgaccctgatgctggagtaggactaggagacatcttgaagcctgatctggtcttgccattaattgaggacttgcccattgaacaattggcatcacatcttccggagggtggctcatggagtcctggtgatatcgttgagcttctccaaagtcctcctttgcgccaacaattagatgcattcacccacgttctgcggactgggcagatagatcttgctcaatttggagttgaccctgacaaatataagttcacggtggtgtcgttcctggaggcattggaagactcggttggaagaggtgcttctgaagctggagacaaggatgcagaggtcgagcgaggcagtggaaatgatgccatggacgagagttgatatccgtgtactaggtgtctgaattcatacgtgacaagtcttgtgttgttgttttgggtagaacgctagctcatagtattttgggcttctggcacacagaaagcaagtttctggacaagttttggacattattgctgctgtgagatgtagtgctaggcaacagatggtctggttggtggatcatggattccatggcattgagaagcttgcaaggctagattgattgtgttctgcgggggtaaatcttgcgtggcgttttgaacgtggattggtaaacagaatagcatcttttgaacgtcggttgttccatgtccacagctgatggtggtggcctcgaatgtcgtactgtacgtccatgtcgatgattccgtcgcaggagcctactactactatatccctgttctatgtaagatatgtgtactccagtacaaacagtatatggacagctcaggatttttttatattgttctacacatacatctttagatgatttttatggatatgatgagtcaaatcttgaggttagaacattatcgaattcataacttacctccaatgacgattgtatggcccctagaatccatttatctcattgagattattgaaatctttactgctttaaaacactagttttatgtgtca

SEQ ID NO: 2159 - DNA, 1088 bp, Zea Mays
agccaaggcaactgaatcatattgacaccgttaatgaagctgtggttagtggatggctctttttccgttatttggtcattggagcttatgttggtcttgctactatagcgggttttgtttggtggttcgtttattctgataatggccctaaattaccatattctgaattggtcaactttgattcatgttctacaaggcagacttcatattcttgcagtatatttgaggatcgtcatccatcaactgtttcaatgactgtgcttgttgtcgttgagatgtttaatgccttgaataacctaagtgaaaaccaatctctgcttgtcattcatccatggagtaacctgtggcttgttgggtctattattctgaccatgcttcttcatgtagcagtcctgtacattgaaccactatcagcccttttctctgtctctccattgtcgtgggttgagtggaaaattgttctttatctatccttccctgtaattttgattgatgaggttttgaaattcttctcaaggagaagcccacgaggtcgaagattccctttaaggttgtggagacgtgagatacttccaaaagagtcgagagacaattgattttaggcttcagcatatcagatgcatacaatgcaaagcgaaaagcttgtcttctgttagtattgagcctaattttggcaaatgttcatggatgaagatgacattgtacaaatctttatgtggctgatatctagggccgagcatcttcgagaatagagttcgcgactacacaattcattggggggggggggggggggggttctcagaatgctagttttgctcagaaaacatagagaagcttcgaaagccttctcactagttatagacggtgctacacttgtatcagaatgtcagatgcttacaaaaggatgagttcatgcaacacccctttctcccaaccaatgaaatcactgtacgcatcaggttctgtcaaattttcagggtgacagacgccgttctggtatttctgccattttatacatcgcaaaagttttgcaccttgatattgttggaaacaatggcatgttcggctgaaatttacaaccactgccg

SEQ ID NO: 2160 - DNA, 2531 bp, Zea Mays
atggtcctttcaacaagttgtgatagcaggaatctgcatacttgtttgggttgtaaatatcggacatttccgagatccttctcatggtggctttgttaggggtgccatccactattttaaggtggctgttgctcttgccgttgcggctattccagaaggtctcccagctgtggtaacaacgtgcttagctcttggtaccaagagaatggctcgcttgaacgccattgtcaggtcacttccctctgtcgagacattaggatgcacaacagtcatttgcagtgacaaaactggtacccttacaacaaacatgatgtctgtgtcaaaggtgtgtgttgtgcggtctgtgcaccagagaccaatgactgatgagtactccattagtgggacaacatttgctcctgatggttttatttatgatgctgatgggttgcagttagagtttccccctcaatcaccatgtctcctccatcttgctatgtgttcagctctttgcaacgagtccactctacaatacaatcctgataaaaaatcttatgaaaaaattggagagtccactgaagttgctctgcgtgtgctggtggagaaggttggtcttcctggttttgactcaatgccttcatccctcaacatgctaactaagcacgagcgtgcatcatactgcaaccattattgggaaaaccagtttagaaagatatctgttttagagttctcccgagaccgcaaaatgatgagtgtcctctgcagtagaaaacaccaagaaattatgttttcaaaaggtgcccctgaaagtataatggccagatgcacacatatattgtgcaatgacgatggttcttcagtaccattgactatggacattcgtaacgagttggaagctagatttcaaagttttgcagggaaagacacgctaaggtgcttagcattagcattaaaacggatgccagctggtcaacaaagtatttgttatggtgatgaggccaacctcacatttataggattgagtggaaccttcccataagaagatgcttgttgaagccttgcaagcacataatgaagtggttgctatgactggagatggtgtcaatgatgcacctgctctaaagaaagcggatataggaatagcaatgggatcaggaactgcagttgctaagagtgcttcagacatggttttggcggatgacaactttgccacgattgttgcagctgttgcggagggaagggccatatataataacaccaagcagtttatccgatacatgatctcatcaaatattggggaggtggtttgtatttttgtggcggcagtgcttgggatgcctgacacacttatacctgtccagctactctgggtgaaccttgttactgatggattacctgcaactgcaattggtttcaataagcctgatggcaacatcatgtcagtcaagcctcgaaaggttaatgaagctgtggttagtggatggctctttttccgttatttggtcattggagcttatgttggtcttgctactatagcgggttttgtttggtggttcgtttattctgataatggccctaaattaccatattctgaattgtgtgtatttactggaactattgttccatggcctgctgtcaactttgattcatgttctacaaggcagacttcatattcttgcagtatatttgaggatcgtcatccatcaactgtttcaatgactgtgcttgttgtcgttgagatgtttaatgccttgaataacctaagtgaaaaccaatctctgcttgtcattcatccatggagtaacctgtggcttgttgggtctattattctgaccatgcttcttcatgtagcagtcctgtacattgaaccactatcagcccttttctctgtctctccattgtcgtgggttgagtggaaaattgttctttatctatccttccctgtaattttgattgatgaggttttgaaattcttctcaaggagaagcccacgaggtcgaagattccctttaaggttgtggagacgtgagatacttccaaaagagtcgagagacaattgattttaggcttcagcatatcagatgcatacaatgcaaagcgaaaagcttgtcttctgttagtattgagcctaattttggcaaatgttcatggatgaagatgacattgtacaaatctttatgtggctgatatctagggccgagcatcttcgagaatagagttcgcgactacacaattcattggggggggggggggggggggttctcagaatgctagttttgctcagaaaacatagagaagcttcgaaagccttctcactagttatagacggtgctacacttgtatcagaatgtcagatgcttacaaaaggatgagttcatgcaacacccctttctcccaaccaatgaaatcactgtacgcatcaggttctgtcaaattttcagggtgacagacgccgttctggtatttctgccattttatacatcgcaaaagttttgcaccttgatattgttggaaacaatggcatgttcggctgaaatttacaaccactgccg

SEQ ID NO: 2161 - DNA, 2701 bp, Zea Mays
ctttcaacaagttgtgatagcaggaatctgcatacttgtttgggttgtaaatatcggacatttccgagatccttctcatggtggctttgttaggggtgccatccactattttaaggtggctgttgctcttgccgttgcggctattccagaaggtctcccagctgtggtaacaacgtgcttagctcttggtaccaagagaatggctcgcttgaacgccattgtcaggtcacttccctctgtcgagacattaggatgcacaacagtcatttgcagtgacaaaactggtacccttacaacaaacatgatgtctgtgtcaaaggtgtgtgttgtgcggtctgtgcaccagagaccaatgactgatgagtactccattagtgggacaacatttgctcctgatggttttatttatgatgctgatgggttgcagttagagtttccccctcaatcaccatgtctcctccatcttgctatgtgttcagctctttgcaacgagtccactctacaatacaatcctgataaaaaatcttatgaaaaaattggagagtccactgaagttgctctgcgtgtgctggtggagaaggttggtcttcctggttttgactcaatgccttcatccctcaacatgctaactaagcacgagcgtgcatcatactgcaaccattattgggaaaaccagtttagaaagatatctgttttagagttctcccgagaccgcaaaatgatgagtgtcctctgcagtagaaaacaccaagaaattatgttttcaaaaggtgcccctgaaagtataatggccagatgcacacatatattgtgcaatgacgatggttcttcagtaccattgactatggacattcgtaacgagttggaagctagatttcaaagttttgcagggaaagacacgctaaggtgcttagcattagcattaaaacggatgccagctggtcaacaaagtatttgttatggtgatgaggccaacctcacatttataggattggttgggatgcttgatccaccaagagaagaagtttgggatgctatccactcttgtatgtctgcagggatccgtgttatagttgttacgggggataacaaggttggtgaagtcttggcttaacttttgagtacttttgctactgcatcagaatttgaaggattgcctcctttggaaaggacaaacgcattacaaaggatggttctgttttcaagagtggaaccttcccataagaagatgcttgttgaagccttgcaagcacataatgaagtggttgctatgactggagatggtgtcaatgatgcacctgctctaaagaaagcggatataggaatagcaatgggatcaggaactgcagttgctaagagtgcttcagacatggttttggcggatgacaactttgccacgattgttgcagctgttgcggagggaagggccatatataataacaccaagcagtttatccgatacatgatctcatcaaatattggggaggtggtttgtatttttgtggcggcagtgcttgggatgcctgacacacttatacctgtccagctactctgggtgaaccttgttactgatggattacctgcaactgcaattggtttcaataagcctgatggcaacatcatgtcagtcaagcctcgaaaggttaatgaagctgtggttagtggatggctctttttccgttatttggtcattggagcttatgttggtcttgctactatagcgggttttgtttggtggttcgtttattctgataatggccctaaattaccatattctgaattggtcaactttgattcatgttctacaaggcagacttcatattcttgcagtatatttgaggatcgtcatccatcaactgtttcaatgactgtgcttgttgtcgttgagatgtttaatgccttgaataacctaagtgaaaaccaatctctgcttgtcattcatccatggagtaacctgtggcttgttgggtctattattctgaccatgcttcttcatgtagcagtcctgtacattgaaccactatcagcccttttctctgtctctccattgtcgtgggttgagtggaaaattgttctttatctatccttccctgtaattttgattgatgaggttttgaaattcttctcaaggagaagcccacgaggtcgaagattccctttaaggttgtggagacgtgagatacttccaaaagagtcgagagacaattgattttaggcttcagcatatcagatgcatacaatgcaaagcgaaaagcttgtcttctgttagtattgagcctaattttggcaaatgttcatggatgaagatgacattgtacaaatctttatgtggctgatatctagggccgagcatcttcgagaatagagttcgcgactacacaattcattggggggggggggggggggggttctcagaatgctagttttgctcagaaaacatagagaagcttcgaaagccttctcactagttatagacggtgctacacttgtatcagaatgtcagatgcttacaaaaggatgagttcatgcaacacccctttctcccaaccaatgaaatcactgtacgcatcaggttctgtcaaattttcagggtgacagacgccgttctggtatttctgccattttatacatcgcaaaagttttgcaccttgatattgttggaaacaatggcatgttcggctgaaatttacaaccactgccg

SEQ ID NO: 2162 - DNA, 3167 bp, Zea Mays
gttgcttttctatacttccagcaacagaacttgtcccaggagatatagttgaagtaggagttggttgcaaagttccggctgacatgagaatggttgaaatgttaagccaccaattgcgtgttgatcaagcaattcttacaggagaaagctgttcagtggcaaaagaggttgaatcaactccagcaatgaatgctgtctaccaggacaaaacaaacattcttttttcgggcactgttgttgtagctggtagagcaagagcaatcgttattgggattggttctaatactgcaatgggaagtatacgtgatgctatgctaagaacagaggatcctcacccctcgatttatatggtgattattctgctcacagttaaaaatctcacaatattacaggaagcaacgccgttgaagaaaaagcttgacgagtttggtacttttttggcaaaggtgatagcaggaatctgcatacttgtttgggttgtaaatatcggacatttccgagatccttctcatggtggctttgttaggggtgccatccactattttaaggtggctgttgctcttgccgttgcggctattccagaaggtctcccagctgtggtaacaacgtgcttagctcttggtaccaagagaatggctcgcttgaacgccattgtcaggtcacttccctctgtcgagacattaggatgcacaacagtcatttgcagtgacaaaactggtacccttacaacaaacatgatgtctgtgtcaaaggtgtgtgttgtgcggtctgtgcaccagagaccaatgactgatgagtactccattagtgggacaacatttgctcctgatggttttatttatgatgctgatgggttgcagttagagtttccccctcaatcaccatgtctcctccatcttgctatgtgttcagctctttgcaacgagtccactctacaatacaatcctgataaaaaatcttatgaaaaaattggagagtccactgaagttgctctgcgtgtgctggtggagaaggttggtcttcctggttttgactcaatgccttcatccctcaacatgctaactaagcacgagcgtgcatcatactgcaaccattattgggaaaaccagtttagaaagatatctgttttagagttctcccgagaccgcaaaatgatgagtgtcctctgcagtagaaaacaccaagaaattatgttttcaaaaggtgcccctgaaagtataatggccagatgcacacatatattgtgcaatgacgatggttcttcagtaccattgactatggacattcgtaacgagttggaagctagatttcaaagttttgcagggaaagacacgctaaggtgcttagcattagcattaaaacggatgccagctggtcaacaaagtatttgttatggtgatgaggccaacctcacatttataggattggttgggatgcttgatccaccaagagaagaagtttgggatgctatccactcttgtatgtctgcagggatccgtgttatagttgttacgggggataacaagtctacagcagaatcgctgtgtcggcaaattggtgcttttgagcacttgaatgacttttcagggtattcctatacagcatcagaatttgaaggattgcctcctttggaaaggacaaacgcattacaaaggatggttctgttttcaagagtggaaccttcccataagaagatgcttgttgaagccttgcaagcacataatgaagtggttgctatgactggagatggtgtcaatgatgcacctgctctaaagaaagcggatataggaatagcaatgggatcaggaactgcagttgctaagagtgcttcagacatggttttggcggatgacaactttgccacgattgttgcagctgttgcggagggaagggccatatataataacaccaagcagtttatccgatacatgatctcatcaaatattggggaggtggtttgtatttttgtggcggcagtgcttgggatgcctgacacacttatacctgtccagctactctgggtgaaccttgttactgatggattacctgcaactgcaattggtttcaataagcctgatggcaacatcatgtcagtcaagcctcgaaaggttaatgaagctgtggttagtggatggctctttttccgttatttggtcattggagcttatgttggtcttgctactatagcgggttttgtttggtggttcgtttattctgataatggccctaaattaccatattctgaattggtcaactttgattcatgttctacaaggcagacttcatattcttgcagtatatttgaggatcgtcatccatcaactgtttcaatgactgtgcttgttgtcgttgagatgtttaatgccttgaataacctaagtgaaaaccaatctctgcttgtcattcatccatggagtaacctgtggcttgttgggtctattattctgaccatgcttcttcatgtagcagtcctgtacattgaaccactatcagcccttttctctgtctctccattgtcgtgggttgagtggaaaattgttctttatctatccttccctgtaattttgattgatgaggttttgaaattcttctcaaggagaagcccacgaggtcgaagattccctttaaggttgtggagacgtgagatacttccaaaagagtcgagagacaattgattttaggcttcagcatatcagatgcatacaatgcaaagcgaaaagcttgtcttctgttagtattgagcctaattttggcaaatgttcatggatgaagatgacattgtacaaatctttatgtggctgatatctagggccgagcatcttcgagaatagagttcgcgactacacaattcattggggggggggggggggggggttctcagaatgctagttttgctcagaaaacatagagaagcttcgaaagccttctcactagttatagacggtgctacacttgtatcagaatgtcagatgcttacaaaaggatgagttcatgcaacacccctttctcccaaccaatgaaatcactgtacgcatcaggttctgtcaaattttcagggtgacagacgccgttctggtatttctgccattttatacatcgcaaaagttttgcaccttgatattgttggaaacaatggcatgttcggctgaaatttacaaccactgccg

SEQ ID NO: 2163 - DNA, 943 bp, Zea Mays
cgccagctcgcgcgccccgtcgctgccaccctgcgtgccccgcagccgccaccccgcgcctccacctcgccgtcgtgccccgcctccttggtcgccgccaccggacgtcgcctccagcgcctctctggctccgtgcccagccccgcgcgcctccctgacacagcatcgcctccaagcgcagccactcctaggcccacgcccctgcccccgactctgcaccccctgcctcggcaccgctccagcagcctccccttccatgtgccccacccgcccgcatgcatcgacgcccgcacgacaaccttgcccccgtgcccacaatctcaaccatccgcgcgagaacaatcgattacgcgcctccaatctcctccattcgggcggacgcaatctcctccatcctcacttcccgcagtcgttcccgtgctcgccccgctgtcgcccgccgcaccccaccacaagcaggaagcaaccaacacttctcactccacgtttcactttcactgttaaatagtactgtatggcagcaaccctatgtcccacaagaaaactaagctgttgtatggcaacaatattgcaagaaagctcaaacatgacacagttacaatcactaaccccatggctaatacaggtgttccacaacttgttaagcccacaacttcagcacaggcaaattcattgggcactggtcacacttcgtgaaaaacgatatagcctctgctgctctgcatacatagatgggataaagatggctggcagaatggtttgtgaagaattttatggctacgtgacaccaccaagtgatcttgtaacttgtatacaaccatcaatttggtctagacggacggacaccgatatagaaggtgctctcaaagacattgaaggacctctcagaggtattgaggaaactctgatcgctactgaaggagatctcatggccattgaatga

SEQ ID NO: 2164 - DNA, 1689 bp, Zea Mays
catcgccgccgggccggtcgcggtcggatccccccgctccgcctcctctccttcgattcgttgcttcccgcttcaaatccaagccaccaccctttccttcccatggcttccgacgccccggcggagcaaccggcgacgcagcagaagcccaccagggtctcgctgtcctatgaggagatctccaagctcttctccctccccatcgctgaggcggcctccatcctcggagtctgcaccagtgtcttgaagaggatctgccgcacccacgggattgttaggtggccatatcgtaagcttgtttctgggaaagctggggatgacacaaaaggtcctgatagcgacaaagccaacgaactccttgaggtcatcaagcacttcccaaggagcggcaaagtctcaacagggcaattctaaggcaggacagttttcagtttcgccaccaacaggtaaacataacgcatcactaagtttgacccatagccaagccaaggccatcccttgctatatggatgatttcaagtacggattcccgtcatctggcttgtcttgtgaaactatgaaatggtggggcacaagcagcgacacagactatgtgcctaccaaagatggaagccatgaaccccatgaatcaacaacacatgagccatcaaagggcatgactgatgatgacgagttggactggggagcagatgaagcggaagctgaagctgatggcactgttacggcagaggcatcggcacagctgtgctcgctgagaaggaaagcagtagatgacgggcgcaaactattgaatggtcacaaccgcaggggccaagaattctctaggctgaacaaaaggcagaagacagcgctagcccaggtatttggggcttcactgccagaatgttgtattactcgtgtctagtgagtgaagaacaactgtagctgtgttttccctccttctccagaccctcatgtaatctgacccgttattagcgagaagtgtgaaatcttctcactgaattgaagaatggcaggagcttgttttgtcttccttatcaacaagttgttgctgccgcttttgtctacgtattttctctcatctcccatgtgtgtacgaggagagcaccttatgttatatctgtgaatgcaggtatatatgtacataacagctgtgtttcttctttgttttcgataacattgcattttgttctttgatttcaagtcaaaactgttaaacacttgcacaaaaaactagcaaagatgtcctcaaaaggaatggatctagaagataggcatatcaatccattgtgtttggttgatggaggatataacattctacacacatccaagtgagtgttgctgcccataatttatctctttctgtatttttccatatgaagacccatggatgcaaatctgaaagaaatagcgttctttcttctgataacatgccccttgtcgtcaactgtaggttgcagaatgcttatgcttctaaaagttattgtagtttccaattccatgtgttttaggcatctgggtgacaattatacatgtatgtttatattttatttcactgtatctttttttatattttgtagttgtggctaattctgcatttatctcatcattgtatcgatacagaaggttgtgcataagaatcaccgattcgatatgatcatatgaaagttgaatgcatgtaggtctcag

SEQ ID NO: 2165 - DNA, 5108 bp, Zea Mays
atggctgggggagcgagacacggtagcgaggacgatgccgagacgacgacgacgaacgagggacgccgcagcagcgaccacgcagccggggccacgaccaactattcggagcacaagcagctggtgccgttccttgacatgctcaagtatgccgaccgcacggacgccgcgcttatggcggtcggcacggtggccgcggtggccaacggcatgacggagccgctcatgaccgtcgtcttcgcggccgtcatcgagtgcttcggcgccggagacgacgccaccatcctccaccgggtcagcaaggttatcatgtactacatctacctgggaattggaactgcagtttcttcctttctccgtgtcatgctggacggtggctggagaaaggcagtcaacacggttgcggtcattataccttgaagctgtgctgaggcaagacattgcattctttgacgtggagatgacaactgcagaagcagcctcaagaatgtctgcggacactgtactcatccaagacgccctcggtgagaaggtagggaagtacatacagcttttgacaaccttcgtcggtggctttatcatcggattcattagaggctggatgctggcccttgttatgctcgcgtgcatacctccaagcattttatcctttgcaacagtctcccggttgcgagctcaaatatctcgaaagaggcaagaatcatatgaagatgcagggaatattgtcgagcaaaccattggagcaataagaacagttgtatctttcaatggagagaagaaagcaattgcaatgtacaacaatcacataaaaaaggcatacaaggctacaatcatggaagggatcatcactggtcttggagtaggctccatattttttgttgtcttcagcagttactctctagctttctggtatggtgccaagttaatcatcagcaaaggatatactggagggcaggtcatcaatatcgtatttgcaatcttagttggctcaatggctataggtactgcatcaccatctatttctgcaattgcagaagggcagtctgcagcacaaagattgtttgagattatcaacagaaaaccaaatattgacattaacgacacttccggaatagtattagaagatatcgagggagatgttgagctcaaggatgtgttctttaggtaccctgcaaggcctgagcagttgatacttgatggcctgtgcctgcaagtacctagtggtactacaatggctatagttggggagagcggaagtggtaaatccacagtgattagtatggtggagagattttatgacccacaggctggtgaagtgttggtagatggagtcaacatcaaaagtctgcaactccaatggttaagaggaaagataagtcttgtcagccaagaaccattgctttttatgacctccatcaaggataacataacctatggtaaagcggatgctacaattgaagagatcaagagagcagctgagcttgcaaatgcagcaaccttcattgaaaagctgcctgacgcatatgagacaacggtaggtcagcatggttctcagctttctggggggcaaaagcaaaggattgccatcgcaagagcaatcctcaaaaatcccaaaattcttcttttggacgaagccacaagtgctttagatgtagagtctgaaagggtagttcaagaagcactaaataggataatggtagggagaactacactcattgttgctcaccgcttgagcaccatcaggagcgcagactgcatagcagtagttcatcaagggaaagtagttgaacgaggtgtccatgacaagctaattaaggaccctgatggagcttattctcagcttattaggttacaacaggcacatgctacagaaaggcatgaggttccagatactgacgtgtcaggttcaatctataaaagtagaagtttacctttggaacaatcaacaggcagagattctcccaggaacaaaggacatcattccttcacaaaaaccactgggctgtctaaagaattgaacaggcaagattttacagacagacaggaagaccaggaacatggtaatagcaaggctcctaagaaagcaccaattggacgactattcaaacttaataagccagaagcaccagttctcctattagctgctatagttgcctttgtgcatggtcttctgttcccctcgttcagtataatgatgtctggtggtataagaactttctactatccaccacaccaacttcgaaaagattctcggttttgggcactgacgtgccttctgtttgcagtcattgccctgatttcaatccaactggaatactttctgtttggggttgctggtgggaaacttatacaacgtgtccgctctttgtctttccagagcatagtacatcaagaagttgcttggtttgatgagccttcaaattctagtggggcccttggcgcgagactctatattgatgctttgaacatccgacgccttgtcggagataacttggccatactagtgcagtgtatagtaacaatagcggctggtttttccatagcatttgcttctgactggaaactcacgctgatcgtcatatgtgtgattcccgtaatgggctcacaaaattatattcaagtgaaattcttgaaagggttcagtgaagatgctaaggtgatgtatgaagatgcaagtcaagtcgtaaccgaggcaattggtagtattcaaacagtagcatctttctgtgcagagaagagggtaattacatcatacatccaaaaatgccaagcttcaatgaaacatggcattagaagtggaatggttggaggccttggtttcagtttatcaaacttaattatgtatctcacatatgctctttgtttctatgttggtgcactgttcgtacacgaaggaaaaacaacttttaaagacgtttttagggtctattttgctctgattttcacagcttttggagtttcccaaacaagtgcaacggcaacagattcaacaaaagcccaggaatccacaatttcaatactaactattatagacaggagatctaaaatcaactcgactagtgatgaaggcgtgattatagaaaaagttgatggcaacatagatttcaggcatgtaagcttcaaatacccatcccgcccagacgtccaagtgctcagcaactttactttggccattccagcaagaaagactgttgcacttgttggagagagtggtagtggtaagtcaacaataatttctttgctcgagagattctacgatccagattctggtacaatctcactggatggaacagaacttaaaaaactaaagctgagttggttaagagaccaaacgggcttagtgagccaagaacctgtacttttcaacaacacaattcgcacaaacatagcatatggaaaacaaggagaagtaagagaggatgagatcgttgctgcggccaaggcagcaaatgctcatgagttcatatctagcttgcctcagggatatagcactattgtcggcgagaggggaacacagctctctggaggacaaaaacaacgggttgctattgcaagggccatcttgaaggacccaaaaatacttctactcgacgaggcaacaagtgctctggatgctgaaggagagcacattgttcaagatgcactggaccaagtgatggttagcaggaccaccattgttgtggcgcaccgactgtccacaattaaaggggcagatatgatcgtagtcatgaaagatggtgaagttgctgagaaggggaagcatgaataccttgtgggaaagggtggagtttatgcatcgctggtagaactacactccaagtcagcataaggatatatgggaacttcgatggattatttggtattacaaggagagcatttgcagtaggagcaaatagcgagagggtaagacttgtgcggttgactgaggcggctgagaatcttaagaagcgagctgcaaccagtgtccgaatgggcaaagagagcgaggctgtggatttacttgtgcagaagaagaaattgaccaaagccctagagaacattaaagagcgcattgaggtgcttgacatgctttcggcaaagattagtgaggtaatttcgatgaagcaaaacatgttaattgagtatgccttgcgtccagagacatctaatggtgaagactctgatgacaagataagggttttctccagtacagtcaatgttggaaccaatggagctgggagtagcgattcacacccaaaatcagttgaaaaggaatcttttgagttgagaaatgaggcacatgcaattgcaagcatggctgacgacgctgagcaaagtgcacttcagatatgaaatcattggaatatgaaattgaacagttcatcaattcccaatcagttgaagaggtgggcagtgagaagcagagaagtgacaagtggcaaaggttatctgacatacagatgcttataaaggaaactagagaaaagattgcgaggattttgggtatgatagtagaagagactgaatctgggacttaagatgatagcaaactacaaaacagtgaattagtgtcatccatccaccatctttttcgtgggtaggtacccaagttgacaatggcttaccagtagttggatcttgcaagttggtcccagtgccatattccgcaggactactccgcctaacaactagagggaatgcgggtacaggtcgcacttactgaaagcttctgaagccgaaaaatcttgaccggatgagcttggttgccgaccatatccaggtcatccctctgcgtgcatttgcatagagaaggctgcaggcctgcagcctagatatttcacgagcacttcataattttcaatgccatccaatgcttcaagctttctgacatgagtgtgcagatgatgaaaaactccaagatgggtctctgtacctactatacaacaagaagaatccatgtactaaatgagaatgcgagattgttaatttgttattatatgctccttgataatttttttctggttctattttgtttcctgaaccttgcataccgcatgtattatgttactagaaatagaacgtctatcagcacagcagacagcagctccctttcactggatttgatgtcg

SEQ ID NO: 2166 - DNA, 5437 bp, Zea Mays
atggctgggggagcgagacacggtagcgaggacgatgccgagacgacgacgacgaacgagggacgccgcagcagcgaccacgcagccggggccacgaccaactattcggagcacaagcagctggtgccgttccttgacatgctcaagtatgccgaccgcacggacgccgcgcttatggcggtcggcacggtggccgcggtggccaacggcatgacggagccgctcatgaccgtcgtcttcgcggccgtcatcgagtgcttcggcgccggagacgacgccaccatcctccaccgggtcagcaaggtgaaggcttgcgggcactcgcgcttgaagaactccgaaacttggagcctttgtatatacaatccagacatgctaataattcttccggtgaagttatcatgtactacatctacctgggaattggaactgcagtttcttcctttctccgtgtcatgctggacggtggctggagaaaggcagtcaacacggttgcggtcattataccttgaagctgtgctgaggcaagacattgcattctttgacgtggagatgacaactgcagaagcagcctcaagaatgtctgcggacactgtactcatccaagacgccctcggtgagaaggtagggaagtacatacagcttttgacaaccttcgtcggtggctttatcatcggattcattagaggctggatgctggcccttgttatgctcgcgtgcatacctccaagcattttatcctttgcaacagtctcccggttgcgagctcaaatatctcgaaagaggcaagaatcatatgaagatgcagggaatattgtcgagcaaaccattggagcaataagaacagttgtatctttcaatggagagaagaaagcaattgcaatgtacaacaatcacataaaaaaggcatacaaggctacaatcatggaagggatcatcactggtcttggagtaggctccatattttttgttgtcttcagcagttactctctagctttctggtatggtgccaagttaatcatcagcaaaggatatactggagggcaggtcatcaatatcgtatttgcaatcttagttggctcaatgtgagttttgtaactgtgaactacatatgaaataaatggtagtagaaaagtactcttagactctttgattgaaactgaatcggtattcgataatttttttctcgaacacgcaggagagctgcataaaattatattaagagaggaaaggtccaaaatggaccgaaatacaattattcgataaaaattaacctaaccatttttagattttgacattaaggtttgattatttgggaacagggctataggtactgcatcaccatctatttctgcaattgcagaagggcagtctgcagcacaaagattgtttgagattatcaacagaaaaccaaatattgacattaacgacacttccggaatagtattagaagatatcgagggagatgttgagctcaaggatgtgttctttaggtaccctgcaaggcctgagcagttgatacttgatggcctgtgcctgcaagtacctagtggtactacaatggctatagttggggagagcggaagtggtaaatccacagtgattagtatggtggagagattttatgacccacaggctggtgaagtgttggtagatggagtcaacatcaaaagtctgcaactccaatggttaagaggaaagataagtcttgtcagccaagaaccattgctttttatgacctccatcaaggataacataacctatggtaaagcggatgctacaattgaagagatcaagagagcagctgagcttgcaaatgcagcaaccttcattgaaaagctgcctgacgcatatgagacaacggtaggtcagcatggttctcagctttctggggggcaaaagcaaaggattgccatcgcaagagcaatcctcaaaaatcccaaaattcttcttttggacgaagccacaagtgctttagatgtagagtctgaaagggtagttcaagaagcactaaataggataatggtagggagaactacactcattgttgctcaccgcttgagcaccatcaggagcgcagactgcatagcagtagttcatcaagggaaagtagttgaacgaggtgtccatgacaagctaattaaggaccctgatggagcttattctcagcttattaggttacaacaggcacatgctacagaaaggcatgaggttccagatactgacgtgtcaggttcaatctataaaagtagaagtttacctttggaacaatcaacaggcagagattctcccaggaacaaaggacatcattccttcacaaaaaccactgggctgtctaaagaattgaacaggcaagattttacagacagacaggaagaccaggaacatggtaatagcaaggctcctaagaaagcaccaattggacgactattcaaacttaataagccagaagcaccagttctcctattagctgctatagttgcctttgtgcatggtcttctgttcccctcgttcagtataatgatgtctggtggtataagaactttctactatccaccacaccaacttcgaaaagattctcggttttgggcactgacgtgccttctgtttgcagtcattgccctgatttcaatccaactggaatactttctgtttggggttgctggtgggaaacttatacaacgtgtccgctctttgtctttccagagcatagtacatcaagaagttgcttggtttgatgagccttcaaattctagtggggcccttggcgcgagactctatattgatgctttgaacatccgacgccttgtcggagataacttggccatactagtgcagtgtatagtaacaatagcggctggtttttccatagcatttgcttctgactggaaactcacgctgatcgtcatatgtgtgattcccgtaatgggctcacaaaattatattcaagtgaaattcttgaaagggttcagtgaagatgctaaggtgatgtatgaagatgcaagtcaagtcgtaaccgaggcaattggtagtattcaaacagtagcatctttctgtgcagagaagagggtaattacatcatacatccaaaaatgccaagcttcaatgaaacatggcattagaagtggaatggttggaggccttggtttcagtttatcaaacttaattatgtatctcacatatgctctttgtttctatgttggtgcactgttcgtacacgaaggaaaaacaacttttaaagacgtttttagggtctattttgctctgattttcacagcttttggagtttcccaaacaagtgcaacggcaacagattcaacaaaagcccaggaatccacaatttcaatactaactattatagacaggagatctaaaatcaactcgactagtgatgaaggcgtgattatagaaaaagttgatggcaacatagatttcaggcatgtaagcttcaaatacccatcccgcccagacgtccaagtgctcagcaactttactttggccattccagcaagaaagactgttgcacttgttggagagagtggtagtggtaagtcaacaataatttctttgctcgagagattctacgatccagattctggtacaatctcactggatggaacagaacttaaaaaactaaagctgagttggttaagagaccaaacgggcttagtgagccaagaacctgtacttttcaacaacacaattcgcacaaacatagcatatggaaaacaaggagaagtaagagaggatgagatcgttgctgcggccaaggcagcaaatgctcatgagttcatatctagcttgcctcagggatatagcactattgtcggcgagaggggaacacagctctctggaggacaaaaacaacgggttgctattgcaagggccatcttgaaggacccaaaaatacttctactcgacgaggcaacaagtgctctggatgctgaaggagagcacattgttcaagatgcactggaccaagtgatggttagcaggaccaccattgttgtggcgcaccgactgtccacaattaaaggggcagatatgatcgtagtcatgaaagatggtgaagttgctgagaaggggaagcatgaataccttgtgggaaagggtggagtttatgcatcgctggtagaactacactccaagtcagcataaggatatatgggaacttcgatggattatttggtattacaaggagagcatttgcagtaggagcaaatagcgagagggtaagacttgtgcggttgactgaggcggctgagaatcttaagaagcgagctgcaaccagtgtccgaatgggcaaagagagcgaggctgtggatttacttgtgcagaagaagaaattgaccaaagccctagagaacattaaagagcgcattgaggtgcttgacatgctttcggcaaagattagtgaggtaatttcgatgaagcaaaacatgttaattgagtatgccttgcgtccagagacatctaatggtgaagactctgatgacaagataagggttttctccagtacagtcaatgttggaaccaatggagctgggagtagcgattcacacccaaaatcagttgaaaaggaatcttttgagttgagaaatgaggcacatgcaattgcaagcatggctgacgacgctgagcaaagtgcacttcagatatgaaatcattggaatatgaaattgaacagttcatcaattcccaatcagttgaagaggtgggcagtgagaagcagagaagtgacaagtggcaaaggttatctgacatacagatgcttataaaggaaactagagaaaagattgcgaggattttgggtatgatagtagaagagactgaatctgggacttaagatgatagcaaactacaaaacagtgaattagtgtcatccatccaccatctttttcgtgggtaggtacccaagttgacaatggcttaccagtagttggatcttgcaagttggtcccagtgccatattccgcaggactactccgcctaacaactagagggaatgcgggtacaggtcgcacttactgaaagcttctgaagccgaaaaatcttgaccggatgagcttggttgccgaccatatccaggtcatccctctgcgtgcatttgcatagagaaggctgcaggcctgcagcctagatatttcacgagcacttcataattttcaatgccatccaatgcttcaagctttctgacatgagtgtgcagatgatgaaaaactccaagatgggtctctgtacctactatacaacaagaagaatccatgtactaaatgagaatgcgagattgttaatttgttattatatgctccttgataatttttttctggttctattttgtttcctgaaccttgcataccgcatgtattatgttactagaaatagaacgtctatcagcacagcagacagcagctccctttcactggatttgatgtcg

SEQ ID NO: 2167 - DNA, 920 bp, Zea Mays
agattttttgggacagaggaataggagttgaagaaatcaaactttacggtgctgaagaagataatgaaatgattgcagattctacagaaagtaactttgaagatcttgaaaacgtgattgcaaatatatttccgaagaggggaaaatgtcatttactgtcagcagctagatacgaaaggggggaaaagtctatttactgcttatcctgtttaatttctcttattgagcagtcacgataccttcgattccgtgactgtcctgtggaatggggatggtgcagggatctgcaatcctttatttttatatttagaagccataatagttcttgagcgtcctgaatatggttatgcaacatacttctttgaggtggtccaatcaaggccaatagaatggcagatccgtaggctggttgttgcaatgaagcttagtggctgtggaaggacagctcttattgaaaacaggccgttactggttggtacagatttaacagaaggcgaggcacatgttttggaaggatatggctggctaagaaacactgggcttggcacaatggtcaactaccgtgatcgtgtggtccatgacaggtggactgagaaatctgtttctgattggaggtcgaagatagggaaacttctaatggttggttatgctgagggccaatcaatcacaactcttggcccgaagaaaatactggacatgctggaagctactggggatgctgaatttgaagtgaagttggaggatccttattgagagatccgacgtgtataggtacaatatgtacgtgtagttctgaatgcgtccagataaacttagggtaggagctctctgatgaaataacgtggcacttgtattctaaattctaaatcacaaattcgttcgtgattattttaatttcacggaagttagcattatctcca

SEQ ID NO: 2168 - DNA, 2441 bp, Zea Mays
caggccccagcccgcgtccatccaccgcccgtgggaaggcagagcagtgagcgtcgcaggcatcggctccagctccggctccgcccgccgccgcaccggcccaccctcctcccccgatccgatcgccgatcaccggccctcgcttagcctcgccacgcctcgcgacaatatttggaacccctgttaccgatcgcctcatgccgtaccactgaacgatcccaccccaacaccgtacccccgccgcctcctccgccgtgcccacagtcgcctccgcctttcgcctgctaccccgtagaggctctatatcccgatcggactagggtgcggacgatggctagcaacgccgaccagcatgctgccgttgtctcggctgccccgtccgatagcccggttggggcgaagaaggctggggcggcggccgccgtctggaaactccccgcggccgcggcggttcccgtcgcggaggtggttgaaaaccccatcatggacgcacactcctggccggcgctgcccgggctgtcgtctccgccgccgccgccgccgccgcatgcggggccaacagccaaagcgtcaccgaaggccgcttctccagctcccactggggcggcgacgtcgcccgtctctttgggcaatcctggcgcgccggatgctagccatggtaacgatgctcgggtgcgcaatcctgtggcccggcgtgccctggtgatgcctgcggcggatgggctggagaagagtgcccctgcaccggaaccgtcccctgtttatgtgcctaatgcccggagcaatggtgcagatcctcatcagaatggacgtcctggctcgcatcaccatggccgaggtggtggctatggtgggggaaacaggaggggtaatggtggaggtggggggcgtcgcgggagtgagcaccacggtggttttgatgggcaacggcgcggaggtggccgcagagatggccatggaccggttcatcagctgcgtggccatcagccaacatacattaaggctcctgttgtagcaggagcacctccaccgcctccaccatttgttagccccgctactcctcagacaccaccttatggaccacctatgggcttccatgacatgtcagcgcatgtttactatttcccggcacccacctcggaaggcattcaaggcctgccttttgtgcctcttccagcaagcccccaagctgttctaattgacccttctcgaaagaaccttctggagcagatagaatactatttcagcgatgacaatttgtgcaaggacctttacttgcggcaacacatggatgggcaaggttgggtgccattatccctgatcgctggctttcgccaagtccagaaaattactaataatattcagtttatcttggaaacagtcatgctatctaacattgtggaagtgcagttttaggtaggcagcaggtgtgaccgccccacaaaatcatctttgtggctcatgtggactagctgcaatatttttgcgggtccgaccaccaagcccagtggagtccacctcggtcctccagataactctatccatctgtgcgtgagccacaaagaaatccgttttgccatctccatgacgaactgcaggcagtggcatgccgatcctgatgccaggcttcacatctgtggcacccgcaacttgtgatctcctttctcgaaagtgataccccagatcatgacattcagggagacaagctacggaggcgtggagcatgggagaattggttgcttccaaaactgaactattctgctgggagttcttctggttcgatgacccctgtgacatctaacattgatgctcttgcatctcagtttcgttctgttggacttgagggggcaacgtaccatccaagcatgcctgggatgtctggtgaagctctcctgacaagatcagcaacttcagttagtctaggttaccatgcatcaaccttcggtgggctacagagcaatgggagtgaacctctctttgggccgaagtctgcaagaaatctactcaggagcgataccttttgaggctatatattcaagagaagttaagtacaatggcaggccgagttttcacagtaacggcatgcacaccttatctcaggtgagatgtaaaaacagctgttaaataaaaccaaaaaaggcaaaagcataatacaaaaaaaaagcatacacaaagacaaaaaaatacaaaatgcaaaaacaaaaataaaaagagcataggcagcttttgtgctagtactcctgtcctttgtgttatgtggtatattacctagtaggtttgttttctaatgctaggagtttgatggctcttctgtgtgaaccgagttatttaagtgttatggatggtaccattgggaaactgttgagtggacgacgttatataaaagtacatgaaaacattgttaattatgctgctctctgctgatttgtgccgcatttctt

SEQ ID NO: 2169 - DNA, 1405 bp, Zea Mays
aagtgagacaaggccacaagggggatggggcggcacgcgccccccggccccgccccgcgctacgtggtccatttccagtccagtctccaacaacgccggagcgcaggcgaggcgagcacgccgatcgattccgattcgcatacgcccgcccgccgcgaatggacgatgcggagtccgcctcgagggcggggaggaggcgggcggccgccgccgcggggatgaggttgttctcgccggagtactacgcgctgtgcgccggcggcgggatgctcgcggcgggcgccacccacctcgccatcaccccgctcgatgtgctcaaggtcaatatgcaggtgaatcccatgaagtataacagtatattttcaggactaaatgttcttgtgaaagaagagggaccttcgtcactttggagaggctggggagggaaattttttggctatggtgttcagggtggctgcagtgcctctgctcaaatcatagctgatgttggcctgtgtccgtttgaatcggtgaaagtccgtgttcagactcagcccatgttcgctaaaggtttggttgatggctttccaagggtgtatgcaactgaaggcctatctggcttttacagggggcttttacctctttggggacggaaccttccattttctatgcttatgttttcgactttttgagcataccgtggacttcctatatcagaaagttattcaaaagaaaaaggaggactgctcaacgatccagcaacttggtgctacttgtctggctggttatatatctggtgccgtcggtactgttgtttcgaatcctgcagacaatatcgtctcatccctgtataacaaaaaggctgaaaatatcatacatgctgtgaaaagtattggatttcgcaatttgctcacaagaagcctgcccatccgaatcgctcttgtcggacccgtcataaccatgcaatggttcttctacgatacaatcaagatattaactggattgccaacgactggaggacttccgcgcgaactagaagaggctaacatataatctgaccagtttgagataggcttctcgacgcactttttggtatcgtatggacaagtatttgtctatggttctgacttactaggggaagagtatagttggtagttttcagggaagagccaattgacctgaatacatcatgcgtaaggtttctgctgctggatatggaagactgcctcgtgtcgtatgtttttccacgtcttaaacaaccttgagcttcagcacccctccaggtacagcattgtggccaggtggtgctttagtaagtgtgtttcgtaagattttgatgtatgagaaaaatgcacttgtgatgtatacacgcgaccttgaaagtaaataatccctctgaaggaccgagatttgaagtgaaattctg

SEQ ID NO: 2170 - DNA, 1435 bp, Zea Mays
aagtgagacaaggccacaagggggatggggcggcacgcgccccccggccccgccccgcgctacgtggtccatttccagtccagtctccaacaacgccggagcgcaggcgaggcgagcacgccgatcgattccgattcgcatacgcccgcccgccgcgaatggacgatgcggagtccgcctcgagggcggggaggaggcgggcggccgccgccgcggggatgaggttgttctcgccggagtactacgcgctgtgcgccggcggcgggatgctcgcggcgggcgccacccacctcgccatcaccccgctcgatgtgctcaaggtcaatatgcaggtgaatcccatgaagtataacagtatattttcaggactaaatgttcttgtgaaagaagagggaccttcgtcactttggagaggctggggagggaaattttttggctatggtgttcagggtggctgcaggtttggcctctatgagtatttcaagaagaggtactctgacgtgcttgtagacagtaacaagagcaccatatacttccttagcagtgcctctgctcaaatcatagctgatgttggcctgtgtccgtttgaatcggtgaaagtccgtgttcagactcagcccatgttcgctaaaggtttggttgatggctttccaagggtgtatgcaactgaaggcctatctggcttttacagggggcttttacctctttggggacggaaccttccataaagttattcaaaagaaaaaggaggactgctcaacgatccagcaacttggtgctacttgtctggctggttatatatctggtgccgtcggtactgttgtttcgaatcctgcagacaatatcgtctcatccctgtataacaaaaaggctgaaaatatcatacatgctgtgaaaagtattggatttcgcaatttgctcacaagaagcctgcccatccgaatcgctcttgtcggacccgtcataaccatgcaatggttcttctacgatacaatcaagatattaactggattgccaacgactggaggacttccgcgcgaactagaagaggctaacatataatctgaccagtttgagataggcttctcgacgcactttttggtatcgtatggacaagtatttgtctatggttctgacttactaggggaagagtatagttggtagttttcagggaagagccaattgacctgaatacatcatgcgtaaggtttctgctgctggatatggaagactgcctcgtgtcgtatgtttttccacgtcttaaacaaccttgagcttcagcacccctccaggtacagcattgtggccaggtggtgctttagtaagtgtgtttcgtaagattttgatgtatgagaaaaatgcacttgtgatgtatacacgcgaccttgaaagtaaataatccctctgaaggaccgagatttgaagtgaaattctg

SEQ ID NO: 2171 - DNA, 2512 bp, Zea Mays
atggaggagcgattgatggcaacgctgggaggcagatgcgacgcgatcgggcaacgcagcacgacgaccgtggcaaatctgaggggcgaccgcgtagggctggacgctggcgcacccgtggtcgtcgacaacttctccttcgattcgttccagggccccaccacttcctccatcgccgcgccgatgtacgacgacgacgtgttcgcctcttcggcgacctcggcgtacgatgacgagttcggctcttcggcgacctcggtgtacgatgacgtgttcgccactgtcgtccgcttcgcggcaccttctccttgccacggcgacgacctgcttggtgcgtttgggattttcatccccaaccgcgaggcgctcaacggcaaggcgacgacccacaaccgcttcgacaccgcaccgcgcatggaatcggagtcggagtcagagttcctcacctcccttgctgcccaggctccctcggccgaggaggccatggtcgcggccgcggacgcggggagccccgcgaggctcaacccgctccccaacaccgacgcagaggaggaggacgaggttctcaccatcacgcccaccaagtgttcgacaatagacctcaaccgcagcatctacttcgtccccgacccgatcctcgaccgtcagcacctactccaggactgcgacggcaaccacgtcggagtcgacgttgacatccttcctacctctgagttcgacgagggtcccatcttcgacgaggagcactgcttccaccgcagcctcctggattcagatccaaactcttcctacgactgggtcgtccccgtcatcgccgtacacggcagcgacgacactgagctgtcccacagcgaggccgacaaggtccccgcgaccgccgcgctacccaacccgcacgagaagatctggtgtcggttcgtcgacaggacgaagctgtccgtccgcctaatccacttctccctaccgtcgccggaccaggcgatcggcatccccaccgacacacatgtcttagactgcaccagcacgctgacgagcaaggaggacgaggttctcgccactacgcccaacagtgtgatatgttggaaacattgctttgagtttctagaaaatacatggtcggaagtggacacggctactacactgcatcttcgaggatcgtcacatatttttatcagtgacaaatggcagccaaggttgttaggtgttcaaccattagatcacagactggcagtcaaagtagctaatgggcagagtgtctcctgtcctcatcacttgccagatgttgggtggtttatatcagactaccagtttcatcacttgccagatgcagagtggtttatatcaagctacaagtttgtgaatgacctggtatttttacagcttccactggtttatgtcatcgtagttcgtgaagttctcctaaggtcatcagacaccaagcaggtgcaggacaatggattaacacagcagctaagaagttctaacgatgacctgaagtatgccgtcaaggatagtttccacaacaacaaccaatttctggtgtccatatccaaagaaggttgtgcccagttcgttgccatcttgtgcaacagtgcatcccaagaagtctataacgccaagcttggtagccaagctcttgggtctcgacggattggcctcgccggaaggacgatggagatcaagacagcgagttcaccaagagacttgttcgattccgagaggtccaagccgcagaggctactgcgacagttattcagacaggagtctggtgtagatactgagatgcctcagtcaaaagaactgccacgagagcaatttagtgtccaaaagaattctaccagttcagagaagggcatcgtcgccacttcatgtactaccagagcgattcaagagtatccccagagagagcagtttgcgttttgtgaggttgtgggggaaagcccagcccatgggccgcgcatgattcctactggaccctgggccagctgctttattacatgtcctttatacaactggcaaagcgccgagcagcacagggcacagcactggcggggcagcatgaggctgttcggcaagcacgtgttccctaggcagatcgtcttgttcgccgcagggatggtgttctttggggcgacgacgtacgacgtgcaccggtccatcaagaacaacgagcagccgccgaccagggagcagatggaggcgctccaggactacatcaactccaagaatccaagaggacctccaagagattgaggggagctggggaggccctccacgaatccaagaagcagtgagggggcaacaagcgggtgcgtgctatttgttcgacgatatctcactgaggacttctggaaactggattgtgtataagaaaccagtaaaattaaggctgtctggttgtaattgtaaatcagtaaatggctgtgtaattatgagactagttgggcatgtttcgaggatcctcgttctccggtggacgtacgttcgtaagcaaaccacagcgaaagggcgt

SEQ ID NO: 2172 - DNA, 1277 bp, Zea Mays
  misc_feature (1)..(2): n is a, c, g, or t
nnatcgttgagaagtattccaactccaacattgaaattcatactttcaatcagagccagtatcctcgcattgttaccgaggacttcttgccacttccaagcaaagggaaatctgggaaggatggctggtatcctccaggccatggtgatgtgttcccctctttgaataacagtggaaaactcgacatcttattggctcagggcaaggacacagagatcctgaaccatctgatcaataaccagaatgaatactgcatggaggttactccaaaaacattggctgatgttaaaggcggtactctcatctcttacgaaggaagagttcagcttttggagattgcccaagtacctgatgagcatttcttgcccaacaggtgggtgaaccttaaagctgtcaagagactagtagaggctgaggcacttaagatggaaattattccaaaccccaaggaagttgatggtgtgaaagtccttcaacttgaaactgcagctggtgcagctattcgtttctttgacaaagcgattggaattaatgttccccgctcaagatttctcccggtgaaggctacatctgatttattgcttgtgcagtctgatctttacaccttggttgatggctttgtcatccgcaatccatccagagcgaatccagctaacccttcgattgagcttggacctgagttcaagaaggttgccaatttccttgctcggttcaagtccatccccagcatcgtcgagcttgacagcttgaaggtttctggtgatgtctggtttggttctggaattacgctcaagggcaaggtgacaatcaccgccaagtctggagtgaagttggaggttccagatggagctgtatttgaaaacaaggatgtcaatggccctgaggatctttaagctatgcttgccgtcaccagtttttcccaaggatttgtcaataggagcagccaacccaaatcactcccactgagctctaccttttgtaattctcgtgccattccgctcccgctgtgagggtcctgtgagcccgctagagaatatgactgtaatcttctttggtgcgtctgcccttctgtttttgtgcgccagggacgtatattttgctgaaatgatactaccatagctttgcgtgccggaggtgctatgtggtgtttctgtgcgtttggttgcaatgataggacgggatgagatgagaccctcaaattaggttgtttggttctgggtcaaagattgagacaagaatatcctagtattgtttcatgttgtcctttaaaattggag

SEQ ID NO: 2173 - DNA, 1588 bp, Zea Mays
tctcgccttcgacttggtgggatgtgattctccaccacctccgagcttgccagaggactccacctctttcttctcgcatgcttccttttctttccaaacacaaatgcgcagcaaagaaagtgcaaatcataaagaaaagagcagaattcaaagcagccggaaagctgactagctagaaggagtgaagagagagaagtatatctcagcaacgcctccatggtcttcccttcaccttcagtgcaggtctacctagatccacatccacctaattggaataaccagcagcagcaaggtcagcagccgagggcgaatgggggagctgatgcaccgttgctgcccctgggtccggcggcagctacatcggcggctccggagcaaggtgggttgcctagaagctcatcaatggctaatgccgccgtggctgcgcacgcgaggcccaactcaatggcggagcgcgcgcggctggcgcggatgccgcatccggagccagcgctcaagtgcccgcgttgcgaatccaccaacaccaagttctgctactacaacaactactccctctcccagccccgccacttctgcaagacgtgccgccgctactggacgcgcggcggatcccttcgcaacgtccccgtaggtggaggctgccgtcgcaacaagcgttcgtccaagtcctcatcctcctctgctgggtcttcctcctcaaagatgtctccctcaggaaggctactgggtggtccatcagctacaccgtccaccaccccaggcactaccggtgcgatcattactccgggtctcagctctttctctcaccacttgccgttcttgggctccatgcacccgtcagggcccaacctaggtctagctttctccgccggactgccgctagtcggcatgcagcacctggacacggtggatcagtttccggtggcaagcggcggcggcaccaccataggtgcatctctagagcagtggagagtgcgacagcagcagcagcagttcccattcatgactgggggaatactggatctgtcgcagccgccgacgtaccaattcggtttggaagctaaccgaggaggcagcggctcagctgcggtggcgttcaattcaggacagaccacgacgaccagtgctaccacgggaaggcaggaagggtcatcaaagaagatgggggatagtaaaggagaagatatgagcttacagaagcagtacatggtacctctacgccacggatcaggatcacacggtgtctgggatgggagtgctggtggaactggcagcaacggtggtggtactggcaatggcggttcaagttggccaatgaacatgattcctggattccattcttcgtccactagcggttgcaatgacagtggcttgtcgtagtactctctagctaggggctggggcaatgtcctatcaagaaaaatattttggagatgcatggttgagtctgagcaaatgctagctatagctaggacgatggaggaacaggcgatgaccaatccacaggcatgttcatcatctgctattcttcatcggaattgtagaagcacactgctacctcatgatggtcacagaaataactacatgc

SEQ ID NO: 2174 - DNA, 1789 bp, Zea Mays
gggatgtgattctccaccacctccgagcttgccagaggactccacctctttcttctcgcatgcttccttttctttccaaacacaaatgcgcagcaaagaaagtgcaaatcataaagaaaagagcagaattcaaagcagccggaaagctgactagctagaaggagtgaagagagagaagtatatctcagcaacgcctccatggtcttcccttcaccttcagtgcaggtctacctagatccacatccacctaattggaataaccagcagcaaggtcagcagccgagggcgaatgggggagctgatgcaccgttgctgcccctgggtccggcggcagctacatcggcggctccggagcaaggtgggttgcctagaagctcatcaatggctaatgccgccgtggctgcgcacgcgaggcccaactcaatggcggagcgcgcgcggctggcgcggatgccgcatccggagccagcgctcaagtgcccgcgttgcgaatccaccaacaccaagttctgctactacaacaactactccctctcccagccccgccacttctgcaagacgtgccgccgctactggacgcgcggcggatcccttcgcaacgtccccgtaggtggaggctgccgtcgcaacaagcgttcgtccaagtcctcatcctcctctgctgggtcttcctcctcaaagatgtctccctcaggaaggctactgggtggtccatcagctacaccgtccaccaccccaggcactaccggtgcgatcattactccgggtctcagctctttctctcaccacttgccgttcttgggctccatgcacccgtcagggcccaacctaggtctagctttctccgccggactgccgctagtcggcatgcagcacctggacacggtggatcagtttccggtggcaagcggcggcggcaccaccataggtgcatctctagagcagtggagagtgcgacagcagcagcagcagttcccattcatgactgggggaatactggatctgtcgcagccgccgacgtaccaattcggtttggaagctaaccgaggaggcagcggctcagctgcggtggcgttcaattcaggacagaccacgacgaccagtgctaccacgggaaggcaggaagggtcatcaaagaagatgggggatagtaaaggagaagatatgagcttacagaagcagtacatggtacctctacgccacggatcaggatcacacggtgtctgggatgggagtgctggtggaactggcagcaacggtggtggtactggcaatggcggttcaagttggccaatgaacatgattcctggattccattcttcgtccactagcggttgcaatgacagtggcttgtcgtagtactctctagctaggggctggggcaatgtcctatcaagaaaaatattttggagatgcatggttgagtctgagcaaatgctagctatagctaggacgatggaggaacaggcgatgaccaatccacaggcatgttcatcatctgctattcttcatcggaattgtagaagcacactgctacctcatgatggtcacaggtaggagtttaaagtaaagctgctctttgtttaaacctttttctgtcatttggttttgaacttaaaggtgttctctgcattgtgtccatagcggccgccacttttctacttttcacactattgttcacagggattaattaatcaaatttggtgcctggtatactatgtgataaggtatatttgacatggacgaaaccgattagttgtttcatcactactacttgtgtggaagattg

SEQ ID NO: 2175 - DNA, 671 bp, Zea Mays
tctgcattttcattcctgacaatcttctctaccacttctatgtacgctacattggcagtatctcctgggcagtcctcattaatctctgatgatgctgatgttgttgctctgattgggacaagtaaggacttggcaaaacaaataaatcagaaggaagtacattgggggttgcttgaagattctgttgaagagcaaatggagaaggcactagcagaatctgataaaatagaagctgaaagcaacgatgctgatgcagaagataacaaggcaaggaaaaaaggaatacagaaggtggaaagcaaaatacttctcttgtgtggggacacttgctttcagctgcgaaggagcattgcttgcatcggggtcggctgactgtactgttaagctctgggatgtcgctttcagcacaaaagccctgaagacagaggacaccaaaggcagctcatcagctaaccgactgagactgcttaaatctctgcctacaaaatcagctcctgtctatagcctgcgggttgtgatcttatgatttataaacgccactaaatgtacatatgcctgataggagatagcttgtaagggatgaccggatgatttggtgacaaaacaatgcattttatctacttctcaaacatgtaaaatatggatcatcctatacctttgacgaagcaacc

SEQ ID NO: 2176 - DNA, 1221 bp, Zea Mays
ctcggcctttcgggtctttcgctccccggctcttcgtctccctctcttgccgaatccaagccctaaaccatagggcttgcctggtgcccgggtgggctccccatggcggcaatagaggacgaggagatggagaagaaggtgcagcagtacctgcaccgcaaggggttccgcctcaccgagctcgcgctccacgaggagcgcagtcgcctctccacctccgacgtcgcgcttacccggtctgacaataatccagcaagataccatgagggatacagcagattaatagcatgggccatgaattacttcgcgtcctttacccagtttttatccattgcttcatggatctagtggcagagggacatatgcacaatgctcggtcatttttccatacatttcgggaagctcataaggtgatgcattcaagggatcttcagaagctggaaggcatcctctctccttcacacttggaggaaacggaactggctcgatcttttaggaaaaaataaatttaaaattaaattatgcgagtattcgtatgaattgcttctccagtatctccagaaaacacaagcttttgtggtgcttggagtaatcaatgagcacataacttttgaagtatctcctgggcagtcctcattaatctctgatgatgctgatgttgttgctctgattgggacaagtaaggacttggcaaaacaaataaatcagaaggaagtacattgggggttgcttgaagattctgttgaagagcaaatggagaaggcactagcagaatctgataaaatagaagctgaaagcaacgatgctgatgcagaagataacaagaaaaggaatacagaaggtggaaagcaaaatacttctcttgtgtggggacacttgctttcagctgcgaaggagcattgcttgcatcggggtcggctgactgtactgttaagctctgggatgtcgctttcagcacaaaagccctgaagacagaggacaccaaaggcagctcatcagctaaccgactgagactgcttaaatctctgcctacaaaatcagctcctgtctatagcctgcgggttgtgatcttatgatttataaacgccactaaatgtacatatgcctgataggagatagcttgtaagggatgaccggatgatttggtgacaaaacaatgcattttatctacttctcaaacatgtaaaatatggatcatcctatacctttgacgaagcaacc

SEQ ID NO: 2177 - DNA, 2561 bp, Zea Mays
ctcggcctttcgggtctttcgctccccggctcttcgtctccctctcttgccgaatccaagccctaaaccatagggcttgcctggtgcccgggtgggctccccatggcggcaatagaggacgaggagatggagaagaaggtgcagcagtacctgcaccgcaaggggttccgcctcaccgagctcgcgctccacgaggagcgcagtcgcctctccacctccgacgtcgcgcttacccggtaggtttgcccgtcccgcttccctggcctacattgggctgcagctctcgccctggccagtgacggtagcttctctggtaccaggaaatctagtggcctcgtgtgaagtcgaactggtgcgttttatttggctgctcggtgtctgaacctctgtctgcgtgctctcgccttggctgtcgattttactaatttggttgcttggatgtggaccgttggcttagatagtcaattaggtactcatgttgcggattgaagggtataaagttatgccaattcagttttcatgaagatccatgttttacattgctgccagctgccagttacatgccattgttcaggcccgttacggtagcaaccctgattaaaattgtattactatttgaatattgcaataagtttgttctgaaaaaatgaataactttagctacacagttattttgaggaagagtgtgtgggctgtgttgccatcgtaccattttattctatctcctgaatcctgatacaatgccatgtagttctcctgcgtgtttgaggcaaaaaagatactgctaattttcctttagcagtaagtgccatagtttgctgtcttaggttgtttccacatgtatcggatatctgttctttggagaggaagaaatgagctacatgttgcttagatgttaacactatatcgtgaagggaagggacaggtaacagcaaattcaatgtttttctgcctgaaatttttgtgatcatttggaaaacagtgttttctggatgcttgcatgtgatgattggtgaagcaatcggctttgttggttcagtggtgctttattgatattataataatcgaagttcagttgttttgtcattgtctttcactctcccttcgaaatgccataatatacacagattctgaagtggctatattttcacttacaatcttaccatacacatccgttgattgattatattcttcaataacaggtctgacaataatccagcaagataccatgagggatacagcagattaatagcatgggcgtatagttctcttgatcaatataagtgcactgcttgtagataaattgtacttaatattcagccaaagcatatcacgccttcaaactatttctaactgttaccttcaagtgatgcattttatgaatcctctgtgttctatggcacaaatttacttggcagacctcctctccttttatgaatcccatatctgtcatataagcatgattttgcacttgacaacttatgtaattctagtttttcaaaagggcgtttggttgtggcaggcaaactattttatgttgtgatctgattttttaacttacagtcttacgctccattctgttcttaaacttggcaatataattcatatttcttaattcagatattttttgtagcatgaattacttcgcgtcctttacccagtttttatccattgcttcatggatctagtggcagagggacatatgcacaatgctcggtcatttttccatacatttcgggaagctcataaggtgatgcattcaagggatcttcagaagctggaaggcatcctctctccttcacacttggaggaaacggaactggctcgatcttttaggaaaaaataaatttaaaattaaattatgcgagtattcgtatgaattgcttctccagtatctccagaaaacacaagcttttgtggtgcttggagtaatcaatgagcacataacttttgaagtatctcctgggcagtcctcattaatctctgatgatgctgatgttgttgctctgattgggacaagtaaggacttggcaaaacaaataaatcagaaggaagtacattgggggttgcttgaagattctgttgaagagcaaatggagaaggcactagcagaatctgataaaatagaagctgaaagcaacgatgctgatgcagaagataacaagaaaaggaatacagaaggtggaaagcaaaatacttctcttgtgtggggacacttgctttcagctgcgaaggagcattgcttgcatcggggtcggctgactgtactgttaagctctgggatgtcgctttcagcacaaaagccctgaagacagaggacaccaaaggcagctcatcagctaaccgactgagactgcttaaatctctgcctacaaaatcagctcctgtctatagcctgcgggttgtgatcttatgatttataaacgccactaaatgtacatatgcctgataggagatagcttgtaagggatgaccggatgatttggtgacaaaacaatgcattttatctacttctcaaacatgtaaaatatggatcatcctatacctttgacgaagcaacc

SEQ ID NO: 2178 - DNA, 1722 bp, Zea Mays
tttacccttaaaacagagagccacggcagatagcggagtggggccggtgcggccgcacctcgtcggcgcccgagttccacggcgccaggcagttctcgctggaggagctggcgcacgccaccaacggcttcgccgaggccaacctggtcggcgcgggggcctttggcctggtgtacaagggcctgctgctagacggcaccgtcgtcgccatcaagcgccgcgcgggcgcgccgcgccaggacttcgcaaacgagatcaggaggctgtcagagatctggcaccgcaacgtcgtgacgttgatcggcttctgccaagaaggcggtctacagatgctggtgttcgaatacctgcccaacgccagtgtcagcggccacttgtacggtaatgagctgagctgaagattctcctcctatagtactactactagcagcagtaaccaattaacaccatgttctgttcatcagacaccggcaaggagacgatgaccaggctggagttcaagcagaggctgtcaatagccattggagcagctaaaggtctgagtcacctccacagcctggcgccgccgctgatccacagggacttcaagacgagcaacgtgctggtcgacgagaacttcatcgccaaggtgtccgacgccgggatccacaggctgctgcgagggcctgatggtggcgccgtcgccgctctggcgagtcgcggtgtcttccaagacccggaggtacattcatcggcgcaggcgcagctctctgagactgagagcagcgacgtgtacagcttcggggtgttccttctcgagctggtcacaggcagggaggctgcggggctgatgccgccggggtccagcaaggactctctcgctcaatggatggaggcgcgtttcgcctcgaacgagctggtcgacccgagactgggagggagcttcacctcggagggtatggcggaggtggtgggcctggcgtccagctgcctgagcccgtcggcgaggcggcggcccaggatgcggctggtggcggcggagctggaccggatcctggagaaggagatggccctgaccaccgtcatgggcgacggcggcaccgccatcgtcacgctcggcagccagctcttcacgtcctgactgaccgggatccgatggctggcatcgtcggcccaaggaggaagcatggtcgccgacgaagagacccccgcgttgcttccttcgtgtcctgggccgggagctgaacgacgcaacgcgatgcaagcagttcgtggccgccggtgattctccagctcactgctcacctcaggaaatttcaagagacggcgacaggcgcgcgaacctgtgtcctgcattttcttcagtcttccatgttcagagttccgttggatttcatccagcagctcagccaaaatatgtgtatgtgtaaaaattcacatctggaattggaagatggaatttatactagtactagaggcatattttgggctgtggaacctcatcacccagggtcacttatttccatttgtttattctttctctgaaacaacatgcgatgcgatgcgacactgcagctctcccaaaccgaactgtacccaaccgaagcgtgtcagtccagttcaattttaccactagatcgagctgctcctactactagaactacaactgaaacagaaagcattgtgcatgaattatctgcccaactagtgaagagtgacgaataacagaggtaaataaacggc

SEQ ID NO: 2179 - DNA, 2228 bp, Zea Mays
gcctttgcactctgcactcggttcacgtttaggcatctatacgtgggtgggtttcgcttccgcgacgagcacgtcacgtcacatccatagctggacctgggccagcgtcgtcgtcttgtcttgctccgctccgctcctctcctctcctctcctctatcatatttaccaccaacggcatgccgctgtcgctgcctttaaatagccggcggggggcaaacagctcgtcagtcaggctcgcggccgagccaccgaggagcaaagcaaagctctcgttggtcgtggcggcagcggcggcggtggcggtgtcgagctgcggtgctgaaggcaagagagccgcgcgccgtgaagagtcgtcgtcgatccggccgagctccgtcgcttcattgatgaatgccgaagctatagcggtccttgctcgttccaaggttcgatgccccggtcgccgcccggatgacactgccaaccccggtggtagccggcgttgcggctggcgccgccgcgctgctactggccgccgccctcgccgtggcgtggtggtggctcgtgatcgtgaggcggcgccggcgccgtgaccggagctccgacaccggatcctcgtcggaggctcctcctcccacgctggcggagtggggccggtgcggccgcacctcgtcggcgcccgagttccacggcgccaggcagttctcgctggaggagctggcgcacgccaccaacggcttcgccgaggccaacctggtcggcgcgggggcctttggcctggtgtacaagggcctgctgctagacggcaccgtcgtcgccatcaagcgccgcgcgggcgcgccgcgccaggacttcgcaaacgagatcaggaggctgtcagagatctggcaccgcaacgtcgtgacgttgatcggcttctgccaagaaggcggtctacagatgctggtgttcgaatacctgcccaacgccagtgtcagcggccacttgtacgacaccggcaaggagacgatgaccaggctggagttcaagcagaggctgtcaatagccattggagcagctaaaggtctgagtcacctccacagcctggcgccgccgctgatccacagggacttcaagacgagcaacgtgctggtcgacgagaacttcatcgccaaggtgtccgacgccgggatccacaggctgctgcgagggcctgatggtggcgccgtcgccgctctggcgagtcgcggtgtcttccaagacccggaggtacattcatcggcgcaggcgcagctctctgagactgagagcagcgacgtgtacagcttcggggtgttccttctcgagctggtcacaggcagggaggctgcggggctgatgccgccggggtccagcaaggactctctcgctcaatggatggaggcgcgtttcgcctcgaacgagctggtcgacccgagactgggagggagcttcacctcggagggtatggcggaggtggtgggcctggcgtccagctgcctgagcccgtcggcgaggcggcggcccaggatgcggctggtggcggcggagctggaccggatcctggagaaggagatggccctgaccaccgtcatgggcgacggcggcaccgccatcgtcacgctcggcagccagctcttcacgtcctgactgaccgggatccgatggctggcatcgtcggcccaaggaggaagcatggtcgccgacgaagagacccccgcgttgcttccttcgtgtcctgggccgggagctgaacgacgcaacgcgatgcaagcagttcgtggccgccggtgattctccagctcactgctcacctcaggaaatttcaagagacggcgacaggcgcgcgaacctgtgtcctgcattttcttcagtcttccatgttcagagttccgttggatttcatccagcagctcagccaaaatatgtgtatgtgtaaaaattcacatctggaattggaagatggaatttatactagtactagaggcatattttgggctgtggaacctcatcacccagggtcacttatttccatttgtttattctttctctgaaacaacatgcgatgcgatgcgacactgcagctctcccaaaccgaactgtacccaaccgaagcgtgtcagtccagttcaattttaccactagatcgagctgctcctactactagaactacaactgaaacagaaagcattgtgcatgaattatctgcccaactagtgaagagtgacgaataacagaggtaaataaacggc

SEQ ID NO: 2180 - DNA, 2847 bp, Zea Mays
tgattctcaaatctcaatccatcgtactagtggtaccaccacacacagccccctgtgccctcctgccgtccgtgacgtgacgcagccgagccgcgcgcgcgctccgggccggacgcctccgctcgaatcgatggacgccgaggccggcgtcgccggcgccgaccagcttccgcggaggcagtactacctgaatctactgcttttagcttaccagagctttggtgttgtttacggggacctgagcacatcgcctctctacgtgtataaaagtacgttctctggaaagctcagacactaccaagacgaggagacagtgttcggcgtactttcgctcatcttttggaccttcactctgattcctttgcttaagtatgtcatcatcgtcttgagtgctgatgataacggcgaaggtggaccattcgctctctattcgctcctttgcaggcatgcaaaactcagcttgctgccaaatcaacaagcagctgatgaggagctatcttcatactatagaaatgggttcgcgcctcgcaatggatcttcaccttggtcaagaaggtttctggagaagcacaaaaaaatgaggactctgtttcttctcatagttctctgtggcgctagcatggtgattggtgatggtgtccttaccccagcaatctcagtactctcgtctatgtctggattacacgttcgagctactggtctacatcatagttctgtagttctcctttcatgcattgtgttggttggtctatttgcattgcaacaccgaggtactcagaaggttgcattcatgtttgcaccaattgtcatcatctggctgctttccattggaggaattggtttatacaacattcttcattggaacccaaatgtatatcaagctctctctccatattatatggttaagttctttagaaagacaggcagtgaggcaatgtttgctgaccttggtcactttacgagtgcatctgtcagggtggcttttattaccgtcatatacccatgccttatgctacaatatatgggtcatgctgcatttctgtcgaagaacacatttcacatgccgacaggtttttatgatactatcccagaaccagtgttttggcctgtctttgtggtggccacacttgctgctgttgttggtagccaagctgttatttcagcaacattctccattgtgaaacaatgccatgctttgggatgtttcccgcgagtgaaggttgtccacacatcgaggtggatctatgggcagatatatattccagaaataaattggattcttatggttctttgcgtcgctgtcactattgcatttcgtgatactactcttattggcaatgcctacggtattgcatgcatgactgttatgcttgttactacattcttgatggcattaatagtcatctttgtttggcaaaggaacataatattttccctagttttcctggttttctttggatccattgaagctgtatatctttcgtcatctctcatgaaggttcctcagggaggatgggtgcctcttgtgcttgcattcatattcatgtcagtcatgtacatctggcactatgggtcaaggaggaagtaccagtttgacctacagaacaaagtatcaatgagatccatcctatctctcggtccaagccttggcatagttcgggttcctggtgttggattgatttacacagagctggtcactggtgtaccctccatcttctcccattttgtcacgaatctccctgccttccatgaagttctagtctttctctgtgtgaagtcagtgccagtgccatatgtttcaccagatgagcgataccttgtgggtaggattggacctaaagaatatcggatgtaccgttgcattgttagatatggttacaaagatgtgcagagagatgatgacaattttgagaacatgttagttatgagcatcgcaaagtttattatgatggaagcagaagatgcttcttcagcaagttatgatatcgctaacgaaggaaggatggcggtcataacaaccactgatgcctctggcagcccattggccatgagggatttcgacggcctagctgactccatgtctacgaggagcagtaaatcagaaagccttcgaagtttgcaatcctcctacgagcaagaatccccgagtgtaaaccggcgccgccgtgtccgctttgaggtcccagaggaggatggcatgggtcagcaagtgaaagaagaactcacggcactagttgaagcgaaacatgctgggatcgcatacatcatgggggcattcttatatcaaagccaggaggaactcaaatttcctgaagaagtttgctattgatgttggttactctttcctccggaagaactgcagaggcccatcagtcacgctgcacattccacacattagtctgatagaagtcggcatgatctactatgtttagcttaaggcccattgccgaagctcacatgtggatacccggtcggggcaatgcttgttcggtttgggagagctgcagtgtcgcatcgcatcgcatgttgtttcagagaaagaataaacaaatggaaataagtgaccctgggtgatgaggttccacagcccaaaatatgcctctagtactagtataaattccatcttccaattccagatgtgaatttttacacatacacatattttggctgagctgctggatgaaatccaacggaactctgaacatggaagactgaagaaaatgcaggacacaggttcgcgcgcctgtcgccgtctcttgaaatttcctgaggtgagcagtgagctggagaatcaccggcggccacgaactgcttgcatcgcgttgcgtcgttcagctcccggcccag

SEQ ID NO: 2181 - DNA, 1841 bp, Zea Mays
ctgcattatggactgaaaattggacctcgcgctatcttatatacggcaacgatacaaaattgaggtctccacaagatatcacctttgcagttgcattatttatagcaaggaaaaatggaagctatgtgagctactacatgtatcacggaggaacaaactttgggaggtttgcttcttcatatgtaacaacaagctactacgatggagctcctcttgatgaatatggtttgatatggcaaccaacatggggtcatctcagagaactgcatgctgcagtaaaacagtcatcagaaccactactatttgggacatactccaatctttctataggtcaagaacaagaggcacatatcttcgaaacagaaactcaatgtgtggctttcctagtcaactttgatcagcatcatatatcagaagtagtatttcgtaatatatcactggaactggccccaaaatcaatcagcattctcttagattgtaagcaggtagtttttgaaacagctaaggtaaatgctcagcatggatcaagaacagctgaagaagtgcagtcttttagtgacattagtacttggaaggcattcaaggaaccaattcctcaagatgtgagtaaatctgcatacagtggaaaccgactctttgaacatctatcaactactaaagatgctaccgattatctatggtacattgttggtcttttccttaacattttaggtagaatacatggaagccatggtggacctgccaatataattttcagcacaaatatttctctacaggaaggaccaaacaccatatcattgctaagtgctatggttggatcaccggattcgggtgctcatatggaaaggagagtatttggaattaggaaagtgagcatacaacagggacaagagccagaaaatctgctcaacaatgagctatgggggtaccaagttggcttattcggggaaaggaataacatctacacacaagattcaaaaattactgaatggacaactatcgacaatttgacatatagcccacttacttggtacaagactacattttccacaccagtgggaaatgacgcagtgacactgaaccttactggtatgggtaagggtgaagtatgggtcaatggagagagtatcggacgatattgggtctctttcaaggctcctagtggcaatccttcgcaatcactgtatcacataccacgagaatttctaaaccctcaagacaataccctagtcctttttgaggaaatgggaggcaacccacagctaataacagtgaacacaatgtcggtatcaagagtgtgtggcaatgtgaatgagctctcagctccatcacttcaatataaggataaggaaccagcagtagatctctggtgtccagaaggcaaacatatatcagcaattgagtttgcaagctacggaggtcctacgggtgactgcaaaaaatttggtttcggaagatgccatgcaggatcatcagaatctgttgtaaaacaggcttgcttgggtaaaagtggatgctctgttcccgtaacacctatcaaatttggaggcgatccatgtcctggaatccaaaaatctcttctagttgtggcgaactacaggtgacactagacagtcacacaagtatacatcatagaaaagaagttggacgagtataaaaaataaaaagatgagttacaaaatcaacgagcaatagagtggagggaaagtataagtcaaaacatatagtaattgttattaggtaggcaattgatcacttgaggcttagttggtagaccccatgtaccgattgttttgacctggcatagatatgtgttatctgtatatcgatttcacatgaat

SEQ ID NO: 2182 - DNA, 2793 bp, Zea Mays
agaggaacacaatgcaagctaggagcgactgcaaggaactaactggtccgggaggtgcaggcaggagaggcgagctgaccgatcgatcaccaggggataccgtaccgtggcgtggtgggggagagagagagcgagatggccgcggcggagatagtcgtcgtcgccgtcgtgaccttgcttctcgggctaacgtcgtgcatggcagagagttcggtatggagggaggaggaccggcgcgtccgaggagaggtgacgtacgagcagagggccctggtgctggacggcgccaggaggatgctgttcgccggggagatgcactacccaaggagcacgccggagatgtggccaaaactcattgctaaagcaaaggagggcgggcttgacgtgatacagacctacgtattctggaacgttcatgagcctatccagggccagtacaacttcgagggaagatatgatcttgtcaggttcatcaaggaaattcaagctcagggtctctacgtaagcctcaggatcggtcccttcatagagtctgaatggaaatatggaggatttccattttggctacatgatgtcccaaacattaccttccgaagtgataacgaaccctttaagcaacacatgcaaagatttgttacagatatagtaaatatgatgaaacatgaaggactttactacccacaaggaggtcccattataacttctcagattgagaacgaataccaaatggttgagcctgcatttggctcaagtgggcaacgttacgtcagttgggcagctgcaatggctgtagaccttcaaacaggtgttccctggacgatgtgcaagcaaaacgatgctccagatccagttgtcggtattcattcctatactattccagttaacttccaaaatgatagcagaaactatcttatatacggcaacgatacaaaattgaggtctccacaagatatcacctttgcagttgcattatttatagcaaggaaaaatggaagctatgtgagctactacatgtatcacggaggaacaaactttgggaggtttgcttcttcatatgtaacaacaagctactacgatggagctcctcttgatgaatatggtttgatatggcaaccaacatggggtcatctcagagaactgcatgctgcagtaaaacagtcatcagaaccactactatttgggacatactccaatctttctataggtcaagaacaagaggcacatatcttcgaaacagaaactcaatgtgtggctttcctagtcaactttgatcagcatcatatatcagaagtagtatttcgtaatatatcactggaactggccccaaaatcaatcagcattctcttagattgtaagcaggtagtttttgaaacagctaaggtaaatgctcagcatggatcaagaacagctgaagaagtgcagtcttttagtgacattagtacttggaaggcattcaaggaaccaattcctcaagatgtgagtaaatctgcatacagtggaaaccgactctttgaacatctatcaactactaaagatgctaccgattatctatggtacattgttggctatgaatatacaccgagtgatgatggccaacttgtgttgattaatgttgagtcacgagcacatatattgcatgcctttgtcaacaatgcatatgtgggtagaatacatggaagccatggtggacctgccaatataattttcagcacaaatatttctctacaggaaggaccaaacaccatatcattgctaagtgctatggttggatcaccggattcgggtgctcatatggaaaggagagtatttggaattaggaaagtgagcatacaacagggacaagagccagaaaatctgctcaacaatgagctatgggggtaccaagttggcttattcggggaaaggaataacatctacacacaagattcaaaaattactgaatggacaactatcgacaatttgacatatagcccacttacttggtacaagactacattttccacaccagtgggaaatgacgcagtgacactgaaccttactggtatgggtaagggtgaagtatgggtcaatggagagagtatcggacgatattgggtctctttcaaggctcctagtggcaatccttcgcaatcactgtatcacataccacgagaatttctaaaccctcaagacaataccctagtcctttttgaggaaatgggaggcaacccacagctaataacagtgaacacaatgtcggtatcaagagtgtgtggcaatgtgaatgagctctcagctccatcacttcaatataaggataaggaaccagcagtagatctctggtgtccagaaggcaaacatatatcagcaattgagtttgcaagctacggaggtcctacgggtgactgcaaaaaatttggtttcggaagatgccatgcaggatcatcagaatctgttgtaaaacaggcttgcttgggtaaaagtggatgctctgttcccgtaacacctatcaaatttggaggcgatccatgtcctggaatccaaaaatctcttctagttgtggcgaactacaggtgacactagacagtcacacaagtatacatcatagaaaagaagttggacgagtataaaaaataaaaagatgagttacaaaatcaacgagcaatagagtggagggaaagtataagtcaaaacatatagtaattgttattaggtaggcaattgatcacttgaggcttagttggtagaccccatgtaccgattgttttgacctggcatagatatgtgttatctgtatatcgatttcacatgaat

SEQ ID NO: 2183 - DNA, 1533 bp, Zea Mays
ctgggttatgtcagcattatgcctacgtcgctgaacaaagtgtccaaaacgagcactagtgtattttttattcctactcccagtcgccgcctgcatttgtctctcggtcaggaacatggaggggagacggctttcacggcggcagttacgctcgctaccggacgccgcgtccttctcgccggaagtcgcggccagcccggggctcgtcggctccggccagttgggtctcggtctctcggcggcgttcgagactctgccgccgggtaaaggaagagcattttgtgctggaggtgatgttgctgcagttgttcgatctatacataaagacagctggaaatatggtgctgatttcttccgaaatgaatttttgttgaattacataattgcaacttataccaaacctcaggtttctcttcttagtggaatcgtcatgggtggaggtgctggcgtttctttacatggaaggtttagagttgccactgataacacggtttttgcaatgccagaaacagctctgggtctctttccagatataggggcctcatattttctgtctcggcttcctggattctatggagagtatgttggtcttgctggtgccagattggatggtggggaaatgcttgcatgtggtctggcaactcattttgtccagtcaaatgtaggttgtgtatgtgctagtctaataactcctagtaaatactctgttcctcagagtctgctatcgctggaagaatcacttaaaaaggtggatacttccaatgcttttgcagtgtgtggtatcatcgatcaatttgctcaacaaccatcactgaaagaaagcagctctttgaataggttggaaatcatcaacaaatgcttttccaaaaggacagtcgaagaaattatatccgctcttataagagaagggaggacacaaactgttggggagtgcttgcagcgggaatatagaatggtctgccatgtcatgcgtggtgacttcagcagagacttctttgagggatgcagggctatattgctggataaagaccgaaacccaaagtggatgcctccaaggttggaacaagtgcatgacgaggctgttgaacagtatttctccagaattgatgatccacagtgggaagacttgaacctacctgctagacgctcccacggaagaaatatcgagtccaagctttgatcgaaggtcatgggagaaaggtggaactctggaacggagccttggtagtggtcagaataacacattattgcacatcatctcaagtttgaagagtctgcagactattgataaaataaacatgaatgtgccatataggtcaacttatatcacagaaagaaactctttgctgtttatacgtggagactggagtcatatgcatttttaaataattataagtaataaaatcgaaaaagaaatcgttggaaagacttttcttggagtcagaccctacttgatggtgataatcgatgagctttctacacgaccaattgttagatgaacgcgtagggctgtggagctggcccatgtacggc

SEQ ID NO: 2184 - DNA, 1629 bp, Zea Mays
ctgggttatgtcagcattatgcctacgtcgctgaacaaagtgtccaaaacgagcactagtgtattttttattcctactcccagtcgccgcctgcatttgtctctcggtcaggaacatggaggggagacggctttcacggcggcagttacgctcgctaccggacgccgcgtccttctcgccggaagtcgcggccagcccggggctcgtcggctccggccagttgggtctcggtctctcggcggcgttcgagactctgccgccgattttggtagaagtgaatggctttacaaggacactgattttgaataggccaaagcagttaaatgcactctcctcgaccatgattatgggactcttgaggtgtttcactgcttatgagaaagacgatggagttaaattgttgattatgaagggtaaaggaagagcattttgtgctggaggtgatgttgctgcagttgttcgatctatacataaagacagctggaaatatggtgctgatttcttccgaaatgaatttttgttgaattacataattgcaacttataccaaacctcaggtttctcttcttagtggaatcgtcatgggtggaggtgctggcgtttctttacatggaaggtttagagttgccactgataacacggtttttgcaatgccagaaacagctctgggtctctttccagatataggggcctcatattttctgtctcggcttcctggattctatggagagtatgttggtcttgctggtgccagattggatggtggggaaatgcttgcatgtggtctggcaactcattttgtccagtcaaatagtctgctatcgctggaagaatcacttaaaaaggtggatacttccaatgcttttgcagtgtgtggtatcatcgatcaatttgctcaacaaccatcactgaaagaaagcagctctttgaataggttggaaatcatcaacaaatgcttttccaaaaggacagtcgaagaaattatatccgctcttataagagaagggaggacacaaactgttggggagtgcttgcagcgggaatatagaatggtctgccatgtcatgcgtggtgacttcagcagagacttctttgagggatgcagggctatattgctggataaagaccgaaacccaaagtggatgcctccaaggttggaacaagtgcatgacgaggctgttgaacagtatttctccagaattgatgatccacagtgggaagacttgaacctacctgctagacgctcccacggaagaaatatcgagtccaagctttgatcgaaggtcatgggagaaaggtggaactctggaacggagccttggtagtggtcagaataacacattattgcacatcatctcaagtttgaagagtctgcagactattgataaaataaacatgaatgtgccatataggtcaacttatatcacagaaagaaactctttgctgtttatacgtggagactggagtcatatgcatttttaaataattataagtaataaaatcgaaaaagaaatcgttggaaagacttttcttggagtcagaccctacttgatggtgataatcgatgagctttctacacgaccaattgttagatgaacgcgtagggctgtggagctggcccatgtacggc

SEQ ID NO: 2185 - DNA, 2021 bp, Zea Mays
ctgggttatgtcagcattatgcctacgtcgctgaacaaagtgtccaaaacgagcactagtgtattttttattcctactcccagtcgccgcctgcatttgtctctcggtcaggaacatggaggggagacggctttcacggcggcagttacgctcgctaccggacgccgcgtccttctcgccggaagtcgcggccagcccggggctcgtcggctccggccagttgggtctcggtctctcggcggcgttcgagactctgccgccgattttggtagaagtgaatggctttacaaggacactgattttgaataggccaaagcagttaaatgcactctcctcgaccatgattatgggactcttgaggtgtttcactgcttatgagaaagacgatggagttaaattgttgattatgaagggtaaaggaagagcattttgtgctggaggtgatgttgctgcagttgttcgatctatacataaagacagctggaaatatggtgctgatttcttccgaaatgaatttttgttgaattacataattgcaacttataccaaacctcaggtttctcttcttagtggaatcgtcatgggtggaggtgctggcgtttctttacatggaaggtttagagttgccactgataacacggtttttgcaatgccagaaacagctctgggtctctttccagatataggggcctcatattttctgtctcggcttcctggattctatggttatcttatatgtctcttctttttctttatattcagtcgaattacatgttgcgatgtcatttccatctatacagtattgttggatattattcagtcctgaaatatcacgcatcttcaaattttcctttgaagttttccaaataccgtctacttgattgaattttagcaatagtgcttcatgcacaatagtgattgtggagataaatcatataggttgtggagatataatcatatatagaaatgagagtgaccaaatgtaggttcacttatgacttatattagttgtaatgcgtgaaggcagcttcttagttgatggcaaaggtatcttaggagatactgttcactaaactgttttcatgttcttttctccaggagagtatgttggtcttgctggtgccagattggatggtggggaaatgcttgcatgtggtctggcaactcattttgtccagtcaaattaaatactctgttcctcagagtctgctatcgctggaagaatcacttaaaaaggtggatacttccaatgcttttgcagtgtgtggtatcatcgatcaatttgctcaacaaccatcactgaaagaaagcagctctttgaataggttggaaatcatcaacaaatgcttttccaaaaggacagtcgaagaaattatatccgctcttataagagaagggaggacacaaactgttggggagtgcttgcagcgggaatatagaatggtctgccatgtcatgcgtggtgacttcagcagagacttctttgagggatgcagggctatattgctggataaagaccgaaacccaaagtggatgcctccaaggttggaacaagtgcatgacgaggctgttgaacagtatttctccagaattgatgatccacagtgggaagacttgaacctacctgctagacgctcccacggaagaaatatcgagtccaagctttgatcgaaggtcatgggagaaaggtggaactctggaacggagccttggtagtggtcagaataacacattattgcacatcatctcaagtttgaagagtctgcagactattgataaaataaacatgaatgtgccatataggtcaacttatatcacagaaagaaactctttgctgtttatacgtggagactggagtcatatgcatttttaaataattataagtaataaaatcgaaaaagaaatcgttggaaagacttttcttggagtcagaccctacttgatggtgataatcgatgagctttctacacgaccaattgttagatgaacgcgtagggctgtggagctggcccatgtacggc

SEQ ID NO: 2186 - DNA, 2145 bp, Zea Mays
atggtggtgaccgctccctatgatgcccatgacagggtgctcgtcggagtcgtggtggcagtatccatgcctcgaggagaggtcgacatggagggagaagggatagaggaactcgaagtcgtggcgacaatatccagcagctccgggagagaactcggtagggaagggacaaactggcaacgagaggacatggcctcgttggttatcagagatcaaagatgcttccttgtccggcggaagcggatgacctcgatgtctcccccaagcgctgcgggcgacgactctgaccaggtcctttttctatacattttggtagaagtgaatggctttacaaggacactgattttgaataggccaaagcagttaaatgcactctcctcgaccatgattatgggactcttgaggtgtttcactgcttatgagaaagacgatggagttaaattgttgattatgaagggtaaaggaagagcattttgtgctggaggtgatgttgctgcagttgttcgatctatacataaagacagctggaaatatggtgctgatttcttccgaaatgaatttttgttgaattacataattgcaacttataccaaacctcaggtttctcttcttagtggaatcgtcatgggtggaggtgctggcgtttctttacatggaaggtttagagttgccactgataacacggtttttgcaatgccagaaacagctctgggtctctttccagatataggggcctcatattttctgtctcggcttcctggattctatggttatcttatatgtctcttctttttctttatattcagtcgaattacatgttgcgatgtcatttccatctatacagtattgttggatattattcagtcctgaaatatcacgcatcttcaaattttcctttgaagttttccaaataccgtctacttgattgaattttagcaatagtgcttcatgcacaatagtgattgtggagataaatcatataggttgtggagatataatcatatatagaaatgagagtgaccaaatgtaggttcacttatgacttatattagttgtaatgcgtgaaggcagcttcttagttgatggcaaaggtatcttaggagatactgttcactaaactgttttcatgttcttttctccaggagagtatgttggtcttgctggtgccagattggatggtggggaaatgcttgcatgtggtctggcaactcattttgtccagtcaaatagtctgctatcgctggaagaatcacttaaaaaggtggatacttccaatgcttttgcagtgtgtggtatcatcgatcaatttgctcaacaaccatcactgaaagaaagcagctctttgaataggttggaaatcatcaacaaatgcttttccaaaaggacagtcgaagaaattatatccgctcttgaagtagaggcctcaaattcggcagatgaatgggttgctacaacaatccagtccttgaagaaggcttctcctaccagtctgaaaatctctctgagatcgataagagaagggaggacacaaactgttggggagtgcttgcagcgggaatatagaatggtctgccatgtcatgcgtggtgacttcagcagagacttctttgagggatgcagggctatattgctggataaagaccgaaacccaaagtggatgcctccaaggttggaacaagtgcatgacgaggctgttgaacagtatttctccagaattgatgatccacagtgggaagacttgaacctacctgctagacgctcccacggaagaaatatcgagtccaagctttgatcgaaggtcatgggagaaaggtggaactctggaacggagccttggtagtggtcagaataacacattattgcacatcatctcaagtttgaagagtctgcagactattgataaaataaacatgaatgtgccatataggtcaacttatatcacagaaagaaactctttgctgtttatacgtggagactggagtcatatgcatttttaaataattataagtaataaaatcgaaaaagaaatcgttggaaagacttttcttggagtcagaccctacttgatggtgataatcgatgagctttctacacgaccaattgttagatgaacgcgtagggctgtggagctggcccatgtacggc

SEQ ID NO: 2187 - DNA, 1477 bp, Zea Mays
acagacaaagcgatggctggtttgagagcaaaacttgagacagcttataagacctctggagggaaaaaagttaatttaatctcacattctatgggtggattgctagtacgctgcttcatgtctatgaatcatgatgtattcactaagtatgtcaacaaatggatttgcattgcttgtccattccaaggtgcccccggatgcatcaatgattctctacttactggattgcaatttgtttatggttttgagagcttctttttcgtatctagatgggcaatgcaccaattgcttgtcgaatgcccatcaatctatgaaatgttaccgaatccagaattcaagtggaaggaaaaaccaattattcaggtttggcgtaagaaccctgaaaaggatggaactgtggagcttgttcaatatgaagcaactgattgtgtgtccttgttcgaagaagctttaaggaataatgagctcacgtataacggaaagaaagtagcactaccattcaatatgtcagtcttcaaatgggccaccaagactcgccaaatcctagacaatgctgaattaccagatactgtgagcttttacaatatatacgggacatcttatgaaactccatacgatgtatggcttataggttgtcaatgtataaagttcaaggtagagaaactttaggttctgattgagatggttcaatacaaatagccaatatgaattagaatctgattgagattcacattttctagctccacagctggagctgtgacttgtatccatagtacctttttcagtgaggatgcttcaaattttgttttagtggaaaaaaatactctagtgagagtctgacagttgaaatatgtaatttcgttcctctggctctaagtatatcactgctattttccacagctatggctcagaaagctctccgattggagatttgtcagaagtgtgtcacacagtgccgtcatacacttatgtggatggagattgcacggttcccatagaatcggcacgggctgatgggttctctgcgaaagaaagagttggcgtcaaggccgaccaccgtggcctgctgtccgatgagaacgtattcaagcttctcaagaaatggctcggtgtgagcgagaagaagtcagagtggcgttgcgtgtctaaatcctactccaaagtgggtaattgggttgccctgtagttcttcaggaagactgttattttggcctttcctcctgaagagaagatgaaacaaaattctggtgattgtattgtatgtctgcacgatgtaaatccctgcgagctgcacggaacaagggattagtgccccttgtacgatgtatcattgccagacatttcttttgaagcctagggtcatatattcattgccccttccaactttggagcatagtaaatgaataatatgaaatcgatcataatttcagaagtgttctgtatttggattagaatgttaatttgcccataacggtgg

SEQ ID NO: 2188 - DNA, 1593 bp, Zea Mays
atgctcggcgcggcgctccgcctccgcgtccgcgtgctccgccgccgccgctcccaccgcgggcgccgtcgaggcaggcggtctctcggtcgggtcggggatgacgacgacgacgagggaggccgggagccggtgctgctagtgtccgggatgggcggctccgtgctgcacgcgcgccgccggtccaactccaagttcgacctccgggtctgggtgcgcatcctcttcgccaacctcgacttcaagaagtacctctggtcgctctacaacgccgataccgggtatgtggagccgctggacgacgatgtggagattgtcgtgccggaggacgaccacggcctgtttgccatcgacattcttgatccttcctggtttgtagaacttctccatctgtctatggtgtatcacttccatggtatgattgatatgctcataaactgtggatatgagaaagggaccacactatttggatatggttatgattttcgccaaagcaacaggatagacaaagcgatggctggtttgagagcaaaacttgagacagcttataagacctctggagggaaaaaagttaatttaatctcacattctatgggtggattgctagtattcactaagtatgtcaacaaatggatttgcattgcttgtccattccaaggtgcccccggatgcatcaatgattctctacttactggattgcaatttgtttatggttttgagagcttctttttcgtatctagatgggcaatgcaccaattgcttgtcgaatgcccatcaatctatgaaatgttaccgaatccagaattcaagtggaaggaaaaaccaattattcaggtttggcgtaagaaccctgaaaaggatggaactgtggagcttgttcaatatgaagcaactgattgtgtgtccttgttcgaagaagctttaaggaataatgagctcacgtataacggaaagaaagtagcactaccattcaatatgtcagtcttcaaatgggccaccaagactcgccaaatcctagacaatgctgaattaccagatactgtgagcttttacaatatatacgggacatcttatgaaactccatacgatgtatggcttataggttgtcaatgtataaagttcaaggctgatgggttctctgcgaaagaaagagttggcgtcaaggccgaccaccgtggcctgctgtccgatgagaacgtattcaagcttctcaagaaatggctcggtgtgagcgagaagaagtcagagtggcgttgcgtgtctaaatcctactccaaagtgggtaattgggttgccctgtagttcttcaggaagactgttattttggcctttcctcctgaagagaagatgaaacaaaattctggtgattgtattgtatgtctgcacgatgtaaatccctgcgagctgcacggaacaagggattagtgccccttgtacgatgtatcattgccagacatttcttttgaagcctagggtcatatattcattgccccttccaactttggagcatagtaaatgaataatatgaaatcgatcataatttcagaagtgttctgtatttggattagaatgttaatttgcccataacggtgg

SEQ ID NO: 2189 - DNA, 1556 bp, Zea Mays
tcagtagaatacacctagaaaagtaaggtgctataatacatacaagtcacaggttgaaattcaaagtgcaaattttgattttgattattttgattccaaaattactaaagctaccatcttctcttagtagacttaaagattgttcttttgatgtttgttccaagatgctagattctatgttttcccatataaaaaccacctcatgaggcactccttatcaacctgagaaggccaaaagggtatcaaaagacttaaggtcagacaagagggtgtttgagtttgtcaacaggaagcattccaacacaagttcaggctttgggaacagagtaaagaggccactggaaaacacaggccacaaagcagcagatgtatcaccaacatcagggtccgagtgagctcttcaccacgaggacatcctttccaatggagcagcatccgtttttgcgtggaggaaatgcccaaggagattctgggctggttctctcaactgacgctaaaccaaggctgaaatggacacctgagttacatcagcgatttgtagatgcagtcaatcaattaggtggagaagagaaagctactccaaaaacagtcatgaggctcatgggaattccaggactcaccttgtaccatttgaaaagccatctccagaaatacaggctcagcaagaacctccaagctcaagcaaatgccagtacatcgaagaatgccataggatgtacgcccgttgctgataggattcccggaacaaccgcagcaacaatgagcagtacaaatgttcttcctcaggcagagaagtaaggactatgttaacactctgtaattgtataaaatcccaatactgaaataatactcttttcctgggttcaaggactattcaaattggtgaagcactgcagatgcaaatccaggttcaaagacagttaaatgaacaacttgagggatacacaacgtcgatggggagagtaacgtccgcttctccagagtcgtcgacagctggtaatggaggtgggtctccaagaacggcacccaccatgggtctcgacggcgacgacagggctggagaggaaggaagcaaagtctcaccgcgggccatgatagcagcttaatgacgctcaagtacgcctaatgatacgagatgctgttctgggaaagaaccattgtcagttgtcacaggtgccatgttgtcgtgttcagcgttcgagatgctgcaataccaaagagcgttgttgggtgtgccaatattccaaatttctcacagccaacagtcgcgcaggacgctgcgaggaacgcaagtgccgcgagcgaggcgaggagcgcaagcgcgtcgaccgcagccggcgaggagtggtcgcagagggcgggaaataaccggccccgcgatcgcgaccgcgaggtggaggaggagggacgcgcggcgggaccacggggaggaaggatcggaggaggcgcggcgcttgtgcagttgtggtgctcgaaggtccggactagtctgggaatatgggtcgggtttttcggaccagcacgagcacggtccaaaaataagaactcaaagcacg

SEQ ID NO: 2190 - DNA, 6000 bp, Zea Mays
ctgacctgcaaggacaagtcgagacgagacatcatctcttctctctccccatctctcgacccgacctcgctcgccgtctctgttgtgccctgcccctgtcccttttctctctccgcctccgccccacctcggatcgagtccaagccgccgagcccactccgctgacccagagcctggaaacccccaatcgagcccgaccggagcccgtcgattccgccggattcgagctcccgccgggtgaggcggtccgcccgaatcggccgattggactcgaattcgggtggtccggatgcgcgcagagcggaggctcgcggatctagggtttcggagggcctagggttagtgccggtgatctggtgatggtggtgcgacgcggcgccggagctcggcgaggaggagggttcggcggcgacgttggggaagatgcagcgagccggatatgcatgggtggcgcggcgctgaggggtgtgacgtcaggaggcggcgtctcgttcggctcatgtggccagcggcacgcgtagaggcagaagctccaccaccaccggcacaaggaccagctacttctccttctggttcatctgttcccccgtctcggacgacttctcttccgcccgaatcggcggcgcagcaggagtgcatcgatcttcctcgcccagtgtcacccggttcctttgtaaaggacggtcgtgaaattagagtaggggattgtgctctttttcgggctgtcggtgctcctccgttcattggattgatacgttggattgagaaaaaggaagaagcacatcccaaattacgtgttagttggctttatagacctaccgacgtgaagcttaacaaggatatacaactcagcgctgccccaaacgagatcttctactctttccaccaggacgaagcatctgctgtttctctactgcatccttgcaaagttgcctttttacgtaaaggtgttgaactaccagctggaatttcatcatttgtatgttggcgcgtgtacgatatagacaacaagtgcttatggtggcttactgacaaggactatattaataaacggcaggaagaagtaaatcgacttctacacagaacaaggctagaaatgcgtgccgcattgcaatcaggtggacgctctccaaagcgtttaaatggtccatcagcttcccaacaactgaagactgcttcagttggtacgcaaaatggtggtttgtctaaaggaaagaagagagatagaagtgaacagggagttgatccagctaagcgggatcgggatcatctacttaaggttgacgagagtgagcctggaaactttaacttggatgatattaagtctgaaatatcaaagataacagaaaaaggtgggcttccaaatgcagaagcagttgaaaagcttgtacatcttatgcaacttgatcgaactgagcagaagatagaccttagtggtcgggttatacttgctgatgttattgcggctacagagagtcctgattgcctcggcagatttgtgcaatcaaggggccttcccgtgttggacagttggcttcaagaggcccacaaagggaagtctggtgatgggactagtcctaaagaagcagataagcctattgacgaacttctctcggccctgcttcgtgcattagctaaattgcctattaatctcagtgcattgcaaagttgtagcattgggaaatctgtcaatcatcttcgtagccataaaaatctggagattcagaagaaagctaagtgtcttgttgagaactggaagaagcgtgttgatgctgagatgaagtcaaatgatgtgaaacctttagtttcaggtcaatctgtttcctggtcaggaaaagcaggtttccaagaaatttcaaatgctggtaccaaacgaggtggttcaagtgagaacagtccaaaaaatccagtgcccactctttcatcatcaaaaattttgactgataagcctgggggcacagatgctgaagcgaagttgaaccctggggtatctgccttgtcaaattcacaacacgtgcaaccgacaaatgttactaccaatttgaaggatcagccctgcaaatcaactggtggaactggtcctgagctgcctactgtaaaagaggagaaaagcagcagttcaagccaatcaccgaacaacagccagtcaatatctagtgagccatcgaaggatgcaagaagttcaactgctgcttctggtggtgctagcaaaacttctgaaagttcttcacgaagccatcgaaaggcaaacaatggtcttgtttcagggaacctgaaggaagcttctgtaggaagatctgtctcccttgatcgatcattgctacaggacaagtcatctcaaactggaacagcttctgaaaaaggagttgatatgccacctgatcatggaaataatcatagattgattgttcgctttccaaatcctggtcgtagtcctgctaatagtgcaagtgctggatcttttgatggcccatctgtaactggggatagagcttcatctcctgtggttgcagataggcatgatcagactgagcgctgggtgaaagggaagactgaaaattctcggcctcatttagcatctgatgctaacacagagtcttggcacagcaacgacggagctgctggttcagaggaaggtgataaatcgccgtgtgctatattagatgatgacaacagcaggacacccgacgattctgttaaggatgcacatgcatcacgagttgcatgctcgtcacatatgaatgaaaaagatgtcagtgaaactaaggtgggaactctgttcagcccaatgaatgctcttattgaaatcaagtactctgaagctagtcattcacggcaagctggagatgacgcagctatgaatcttcttgctagtgtggcaggggaaatatctaaatctgaattggtttccccagtttcttcacccagaagttcttctgcaaagaaattggcccgtgagagtgacaacattggaaaggttaaagtagaaagtgacatgggcccatcacatccagggcaagcagatgctaagaaaggtgccatggggaaggaagtaaaaaatgatgcttgtttggtttcaatggatgaacaacgccaaactacgccatctcctgagctaccatattcaaaagcagttgtatcttcagctaagattgaaacccatgaagttgaagccaagattgcaaacaaatgcaactctcagcatgcttcaattgattccaaaggtgaacatgatcaaaacttcaatttgcgccactcagctaatactaaagttgtcaatatgtctaatatgtattcatctgcaggtgaaagtcaggatgcctgtactgcccatgggaatgttgaagatggcagtacagacaaggatggtgccatggaatctgcattgggcagccagtgtagcttggttgtttccagtagaaattcaagattggttcatgctggggaatctgcattgtctgctgctgacaaacaggcacagggtttgttaaaatcaactaatcataagcagcttctgagtgtatcggacaacccaggagcctttgatagacgtgacagtatggctggcaaattagatttgatggctgcagaggtgagaaaaactgatgtcctgggcaatagtagcatagtgcagaacgaggctgaaaagaaggaacatgcttcttcctttttgcctgatgttcccaaactagttgtagcagcagcatctccagttggtgtggcaaatgtgaataaggagattaaagaatcaaaagacagttcaagtgaatccaatagccatgtaaaatctgaaggtgtcaattctcatcaaagcgagcaaagtgcaaagcagagttcaaagaaatccagtgatggtgtgagtggaaaagaggacgaaaaagaagaccatgtcttatcagacgaaggttcttctctagccgctaacaccaagtcaaatgctacagccaagcttgatttcgacttgaatgaaggaatacctggagatgatgggcatcagtctgagccaactatctcgcctgttgtatgttcttcagcaatccatttaactgggattttgccattcacttcgcctattacaactgggttgcagccagcttcagttacagtagctgcaccagctaaaggaccctttgttcctccagaaaacctgctaagagcaaagccggagattgggtggaaaggttcagcagctacaagtgcatttcgtcctgccgaaccaaggaagattttggagatgcctgttgctgcacgcgacatttcagtttctcatgctgctggtaagcagtctcgtcccacgcttggttttgatttgaatgttgccgatgatcaagctcttgaggaagatatcccacagagttctgcacaaactacctgttctgaatctggaaatacgagaagtcgagatggctcttcacgaagcgctggtattgaatttgatctgaacagagctgatgaagttgcagataatggccaatttgtgccaagtgcttcgcacagagttgaagtgccattgttgtcaacaagatcgttacatggagttttctctaatgctggcctgaatagctcgagggactttgatcttaatagtggaccaggtcttgatgatgttggcactgaagctgcaccaaagagcctaccttctaaaaatacaagcagtattcaattcctaccacaagttcctgttaggatgaatagtgctgccatgagtaatatatcaccatggcttgcctctgccagcccttgtggtccagtagctatacaatcttttttaccaactagagaacagccatacccaattgaggcagcagctggggcccaaaggatcattgcgcctacagctgatgctggccaattcggaggtgatccctgcaggcctccagttgtttcaacgtctccagcgatggtttatcatccgcctgcatatcagtatccaggattcccttttcctcccagtgttcaccttcaaacaccggcattttcaattggatcagcaacatttaataattctgcatctccaggagttccatactttccaactgtctccccttcttttgttgggccagctggagcgttaactccccaacatttaaggcagtttgctataaaccttgctgagggtagcagcagcagtggacgagacagtaatcgtaaatgggaaagtcagggccttgatcttaactcaggccctggaagtatagatttagaaggaaaggatgaacgggtacctttaccagtcagacaaaatttgatcccacccccacacggctttgtggaggatcaaggaagaatctaccagatgccagttgtaggaacaaagagaaaggaacctgatggcagctgggactcagaaaggtctacatacaagcaattatcatggcaatgatggctctgaagatcattctgcaccggactggtctgcgacgagcgtacctgcatgtagaacttgggcggtgtgttcttcagtcactgcactatacttgggggattggggattcagcccatgacgatgatgtgggatcgaggaaacgaaaacttgctgtaattgttgtagattttttccctagctgttaggcttttggttctaatttactcaggagggggtatggctgcggaggaggaatctttgtgattctgagctctggggctattgtaattagaccgtccgctctgtgtttgttggtgatatactattgatcacatgctgcagctttacattacataagaatttagatgtgaccttgttccttgctggggaagcgttacgtcagctgaccatatgaacactggtgcaacgaacagctcgagttgctacgccatgtatctttggattgcagtgcagctgtatgtataagaattctagcagatcagcaagctatatttttttgctgtttttttttgtccatctgcatctgatttagtcttgactcttgatgctctttctttaaactatttgtcggaagtgatgaccagcaggtacgaacaggaacaaaataaatgaag

SEQ ID NO: 2191 - DNA, 2406 bp, Zea Mays
ggaatgaggtgatgatggatcaactcattctattcaacaaaccaaataaaaatgtgagaagtgagaagaagatgaatcactttattcctcgaaccaaacacacccttaatgttttactctagagcccatgctaaacacgccatgagtcttggtctatttaacacactttaaatagttaataggtctgtataaacttattaaacaatatatatggatctaaataacacactccaaatagtggtactgatgcactttactctctcaacagcaaccacaaaagaaaagggtgcgtagcccctaacccatatgtgtgtaatattgactcgatactgtgtgcctaccacgatttcggagagaccgagacagcggacttccgtaccgcgcgccgccgccaccgccatctatcctggaagcctgctgctctccacgcaaccacgccggcccccgtcaaccggtcgccatctctcctggactcctgctctccacgcaacgccgggcagccccgcctcagctcctcaccctcctcgacaactctccctccggccggtcgccccccacgactccccggggcccgtcgtccgcacgggcacgggctgcacggtggtgggagcagaaccagagcagccgaggaggcacatctactccgggctccggacctccctcggcctcaacccctctggagtctggattctgccatttcataccatctccgcttcgccactgccagcgcgctggccctggagcggaggcaagaggggtgactacaaggagcttttcgtcatggcactgcctaaggacggctgcctcgatggtgccaagatcacagaggtaggaggggtcggctacaaggagcttcttgtcatggcgctgcctaaggacgacagcatcgatggcgccaaggtcgcagaggccatcggcgtcaagctgccagacgtcgggggggccataaggactattttgaatagcagagaggccagagaatttgccagtggggcactagctggtgctatgtcaaaggctattcttgcacctctagagactatcaggacaagaatgattgtaggagtaggacctaggcacatttttggtagtttggtggatatcatccaacaaaacgggtggcaagggctttgggcagggaatacaatcaacatgctccgcatcattccaacccaagcagtcgaactcggaacatttgaatgcgtcaagaggagcatggcagaagcacaagagaaatggaaagaggacggatgcccaaagatacagcttggtaatatgaaaatcgagcttccacttcacctcttatctccagttgctattgccggtgctgctgctggaatagctgccacactggcgtgccatcctctcgaagttatcaaggatcgcttgactatcaaccgagaggtttatccaagcattggccttgccttccgcaggatctataagacggatggtataggtggtttctatgctggcctgtgtccaacgctgattggcatgattccttacacaacatgttacttctttatgtcttactgcaagcacaatcagcttccctctggaagtagcaaggaagcggttgatggccggcgccctgcaggggaagtgcccgcctaacatgattgccgccttgtcggaggtgatccaggaggagggcgtcatggggctttaccgcgggtggggggcgagctgcctgaaggtgatgccgaattctggcatcacctgggtgttgtacgaggcatggaaggatgttcttctggctgacaggaacaagccacgctctttagcgaactaaacaggccgtccttgagcaatggaggcgttgctgggattcctgatctattttcagttttggaatcccggctgcggcgagtggggtacatagggcgcgtttctctcttttttgattgactgatgagtggtaagcgttttgttgtgtcatcggcacacagacaaacatcattaatgtgtcaaaaaactaagcgaaaagacaaacccttctgtatttcctgagtggaaagatggggaacctaaccctacctggagcctctgcaggaaccttttccttcatctaccaatcagatacagggagcttcaggttgacagatcgcaccaactgaaggacgaacctgttctgcgacaacaagcaggataagctgaggaacctgttttgcaagctaagttgagatgtaatttttgtcttgggctgggtggttatagtgttttctttcggcttttcttttctttctgcctcaagtctgaagcgaagtttataaattatttttcctcggctaatataatttgggtggcaaagcttttgccgcttccttaaaaaaagagtggtaagcattttgttgtgtcatcaattctgaattcttgtgctgttataagaaaaaaggatttggg

SEQ ID NO: 2192 - DNA, 2478 bp, Zea Mays
ggaatgaggtgatgatggatcaactcattctattcaacaaaccaaataaaaatgtgagaagtgagaagaagatgaatcactttattcctcgaaccaaacacacccttaatgttttactctagagcccatgctaaacacgccatgagtcttggtctatttaacacactttaaatagttaataggtctgtataaacttattaaacaatatatatggatctaaataacacactccaaatagtggtactgatgcactttactctctcaacagcaaccacaaaagaaaagggtgcgtagcccctaacccatatgtgtgtaatattgactcgatactgtgtgcctaccacgatttcggagagaccgagacagcggacttccgtaccgcgcgccgccgccaccgccatctatcctggaagcctgctgctctccacgcaaccacgccggcccccgtcaaccggtcgccatctctcctggactcctgctctccacgcaacgccgggcagccccgcctcagctcctcaccctcctcgacaactctccctccggccggtcgccccccacgactccccggggcccgtcgtccgcacgggcacgggctgcacggtggtgggagcagaaccagagcagccgaggaggcacatctactccgggctccggacctccctcggcctcaacccctctggagtctggattctgccatttcataccatctccgcttcgccactgccagcgcgctggccctggagcggaggcaagaggggtgactacaaggagcttttcgtcatggcactgcctaaggacggctgcctcgatggtgccaagatcacagaggtaggaggggtcggctacaaggagcttcttgtcatggcgctgcctaaggacgacagcatcgatggcgccaaggtcgcagaggccatcggcgtcaagctgccagacgtcgggggggccataaggagaggccagagaatttgccagtggggcactagctggtgctatgtcaaaggctattcttgcacctctagagactatcaggacaagaatgattgtaggagtaggacctaggcacatttttggtagtttggtggatatcatccaacaaaacgggtggcaagggctttgggcagggaatacaatcaacatgctccgcatcattccaacccaagcagtcgaactcggaacatttgaatgcgtcaagaggagcatggcagaagcacaagagaaatggaaagaggacggatgcccaaagatacagcttggtaatatgaaaatcgagcttccacttcacctcttatctccagttgctattgccggtgctgctgctggaatagctgccacactggcgtgccatcctctcgaagttatcaaggatcgcttgactatcaaccgagaggtttatccaagcattggccttgccttccgcaggatctataagacggatggtataggtggtttctatgctggcctgtgtccaacgctgattggcatgattccttacacaacatgttacttctttatgtatgacacgatcaagacctcttactgccgcttgcataagaagtcgtctctgagccgccctgagcttctacttatcggcgctctttcaggtcttactgcaagcacaatcagcttccctctggaagtagcaaggaagcggttgatggccggcgccctgcaggggaagtgcccgcctaacatgattgccgccttgtcggaggtgatccaggaggagggcgtcatggggctttaccgcgggtggggggcgagctgcctgaaggtgatgccgaattctggcatcacctgggtgttgtacgaggcatggaaggatgttcttctggctgacaggaacaagccacgctctttagcgaactaaacaggccgtccttgagcaatggaggcgttgctgggattcctgatctattttcagttttggaatcccggctgcggcgagtggggtacatagggcgcgtttctctcttttttgattgactgatgagtggtaagcgttttgttgtgtcatcggcacacagacaaacatcattaatgtgtcaaaaaactaagcgaaaagacaaacccttctgtatttcctgagtggaaagatggggaacctaaccctacctggagcctctgcaggaaccttttccttcatctaccaatcagatacagggagcttcaggttgacagatcgcaccaactgaaggacgaacctgttctgcgacaacaagcaggataagctgaggaacctgttttgcaagctaagttgagatgtaatttttgtcttgggctgggtggttatagtgttttctttcggcttttcttttctttctgcctcaagtctgaagcgaagtttataaattatttttcctcggctaatataatttgggtggcaaagcttttgccgcttccttaaaaaaagagtggtaagcattttgttgtgtcatcaattctgaattcttgtgctgttataagaaaaaaggatttggg

SEQ ID NO: 2193 - DNA, 3070 bp, Zea Mays
ggaatgaggtgatgatggatcaactcattctattcaacaaaccaaataaaaatgtgagaagtgagaagaagatgaatcactttattcctcgaaccaaacacacccttaatgttttactctagagcccatgctaaacacgccatgagtcttggtctatttaacacactttaaatagttaataggtctgtataaacttattaaacaatatatatggatctaaataacacactccaaatagtggtactgatgcactttactctctcaacagcaaccacaaaagaaaagggtgcgtagcccctaacccatatgtgtgtaatattgactcgatactgtgtgcctaccacgatttcggagagaccgagacagcggacttccgtaccgcgcgccgccgccaccgccatctatcctggaagcctgctgctctccacgcaaccacgccggcccccgtcaaccggtcgccatctctcctggactcctgctctccacgcaacgccgggcagccccgcctcagctcctcaccctcctcgacaactctccctccggccggtcgccccccacgactccccggggcccgtcgtccgcacgggcacgggctgcacggtggtgggagcagaaccagagcagccgaggaggcacatctactccgggctccggacctccctcggcctcaacccctctggagtctggattctgccatttcataccatctccgcttcgccactgccagcgcgctggccctggagcggaggcaagaggggtgactacaaggagcttttcgtcatggcactgcctaaggacggctgcctcgatggtgccaagatcacagaggtaggaggggtcggctacaaggagcttcttgtcatggcgctgcctaaggacgacagcatcgatggcgccaaggtcgcagaggccatcggcgtcaagctgccagacgtcgggggggccataagggtttttgacgcgatgattcgtcacagagtttcagattcttatgttttgtcacaagggcaagtctttttgctgcttaagtgctagtatgcaaactgtgtatgtttgatcatcaagtgatgattttctaccgtttttgcaagtaatgacttgctgtgaaaccgacatttgggctataagatgtggtattttgtggggccctacagaagcacatagttgaatgtacattacttacctcaataacttgtaatttacactataatgtatagatacggcgtcttcaataaatactgaaatgccttttgtttatatgatggaattagataatgtggttgctaattcgttacacacttacgctattaaatgtactttgtaacttgaactatcttactctctaatcttcggtacattgacaaccatacaatgccaaagaacttgcagttgcaggtaggctttgcctagagaagtcgcttcaatttcaatcctcatagatgccttatatatgaatttaaactttgaagtaacgatgaatttttgactgatcgtttgaggccttccttttatccaattcaccacagactattttgaatagcagagaggccagagaatttgccagtggggcactagctggtgctatgtcaaaggctattcttgcacctctagagactatcaggacaagaatgattgtaggagtaggacctaggcacatttttggtagtttggtggatatcatccaacaaaacgggtggcaagggctttgggcagggaatacaatcaacatgctccgcatcattccaacccaagcagtcgaactcggaacatttgaatgcgtcaagaggagcatggcagaagcacaagagaaatggaaagaggacggatgcccaaagatacagcttggtaatatgaaaatcgagcttccacttcacctcttatctccagttgctattgccggtgctgctgctggaatagctgccacactggcgtgccatcctctcgaagttatcaaggatcgcttgactatcaaccgagaggtttatccaagcattggccttgccttccgcaggatctataagacggatggtataggtggtttctatgctggcctgtgtccaacgctgattggcatgattccttacacaacatgttacttctttatgtatgacacgatcaagacctcttactgccgcttgcataagaagtcgtctctgagccgccctgagcttctacttatcggcgctctttcaggtcttactgcaagcacaatcagcttccctctggaagtagcaaggaagcggttgatggccggcgccctgcaggggaagtgcccgcctaacatgattgccgccttgtcggaggtgatccaggaggagggcgtcatggggctttaccgcgggtggggggcgagctgcctgaaggtgatgccgaattctggcatcacctgggtgttgtacgaggcatggaaggatgttcttctggctgacaggaacaagccacgctctttagcgaactaaacaggccgtccttgagcaatggaggcgttgctgggattcctgatctattttcagttttggaatcccggctgcggcgagtggggtacatagggcgcgtttctctcttttttgattgactgatgagtggtaagcgttttgttgtgtcatcggcacacagacaaacatcattaatgtgtcaaaaaactaagcgaaaagacaaacccttctgtatttcctgagtggaaagatggggaacctaaccctacctggagcctctgcaggaaccttttccttcatctaccaatcagatacagggagcttcaggttgacagatcgcaccaactgaaggacgaacctgttctgcgacaacaagcaggataagctgaggaacctgttttgcaagctaagttgagatgtaatttttgtcttgggctgggtggttatagtgttttctttcggcttttcttttctttctgcctcaagtctgaagcgaagtttataaattatttttcctcggctaatataatttgggtggcaaagcttttgccgcttccttaaaaaaagagtggtaagcattttgttgtgtcatcaattctgaattcttgtgctgttataagaaaaaaggatttggg

SEQ ID NO: 2194 - DNA, 3204 bp, Zea Mays
ggaatgaggtgatgatggatcaactcattctattcaacaaaccaaataaaaatgtgagaagtgagaagaagatgaatcactttattcctcgaaccaaacacacccttaatgttttactctagagcccatgctaaacacgccatgagtcttggtctatttaacacactttaaatagttaataggtctgtataaacttattaaacaatatatatggatctaaataacacactccaaatagtggtactgatgcactttactctctcaacagcaaccacaaaagaaaagggtgcgtagcccctaacccatatgtgtgtaatattgactcgatactgtgtgcctaccacgatttcggagagaccgagacagcggacttccgtaccgcgcgccgccgccaccgccatctatcctggaagcctgctgctctccacgcaaccacgccggcccccgtcaaccggtcgccatctctcctggactcctgctctccacgcaacgccgggcagccccgcctcagctcctcaccctcctcgacaactctccctccggccggtcgccccccacgactccccggggcccgtcgtccgcacgggcacgggctgcacggtggtgggagcagaaccagagcagccgaggaggcacatctactccgggctccggacctccctcggcctcaacccctctggagtctggattctgccatttcataccatctccgcttcgccactgccagcgcgctggccctggagcggaggcaagaggggtgactacaaggagcttttcgtcatggcactgcctaaggacggctgcctcgatggtgccaagatcacagaggtaggaggggtcggctacaaggagcttcttgtcatggcgctgcctaaggacgacagcatcgatggcgccaaggtcgcagaggccatcggcgtcaagctgccagacgtcgggggggccataagggtaaggaaatctccacctgattttatgtcgtttccatgtttgtggagcaatgaaagggacacgactttcggttttggccagttacttttttttctgaactaattgaaactggcgtactgtgttttcccaattggttgtggtttaatttcaggtttttgacgcgatgattcgtcacagagtttcagattcttatgttttgtcacaagggcaagtctttttgctgcttaagtgctagtatgcaaactgtgtatgtttgatcatcaagtgatgattttctaccgtttttgcaagtaatgacttgctgtgaaaccgacatttgggctataagatgtggtattttgtggggccctacagaagcacatagttgaatgtacattacttacctcaataacttgtaatttacactataatgtatagatacggcgtcttcaataaatactgaaatgccttttgtttatatgatggaattagataatgtggttgctaattcgttacacacttacgctattaaatgtactttgtaacttgaactatcttactctctaatcttcggtacattgacaaccatacaatgccaaagaacttgcagttgcaggtaggctttgcctagagaagtcgcttcaatttcaatcctcatagatgccttatatatgaatttaaactttgaagtaacgatgaatttttgactgatcgtttgaggccttccttttatccaattcaccacagactattttgaatagcagagaggccagagaatttgccagtggggcactagctggtgctatgtcaaaggctattcttgcacctctagagactatcaggagtaggacctaggcacatttttggtagtttggtggatatcatccaacaaaacgggtggcaagggctttgggcagggaatacaatcaacatgctccgcatcattccaacccaagcagtcgaactcggaacatttgaatgcgtcaagaggagcatggcagaagcacaagagaaatggaaagaggacggatgcccaaagatacagcttggtaatatgaaaatcgagcttccacttcacctcttatctccagttgctattgccggtgctgctgctggaatagctgccacactggcgtgccatcctctcgaagttatcaaggatcgcttgactatcaaccgagaggtttatccaagcattggccttgccttccgcaggatctataagacggatggtataggtggtttctatgctggcctgtgtccaacgctgattggcatgattccttacacaacatgttacttctttatgtatgacacgatcaagacctcttactgccgcttgcataagaagtcgtctctgagccgccctgagcttctacttatcggcgctctttcaggtcttactgcaagcacaatcagcttccctctggaagtagcaaggaagcggttgatggccggcgccctgcaggggaagtgcccgcctaacatgattgccgccttgtcggaggtgatccaggaggagggcgtcatggggctttaccgcgggtggggggcgagctgcctgaaggtgatgccgaattctggcatcacctgggtgttgtacgaggcatggaaggatgttcttctggctgacaggaacaagccacgctctttagcgaactaaacaggccgtccttgagcaatggaggcgttgctgggattcctgatctattttcagttttggaatcccggctgcggcgagtggggtacatagggcgcgtttctctcttttttgattgactgatgagtggtaagcgttttgttgtgtcatcggcacacagacaaacatcattaatgtgtcaaaaaactaagcgaaaagacaaacccttctgtatttcctgagtggaaagatggggaacctaaccctacctggagcctctgcaggaaccttttccttcatctaccaatcagatacagggagcttcaggttgacagatcgcaccaactgaaggacgaacctgttctgcgacaacaagcaggataagctgaggaacctgttttgcaagctaagttgagatgtaatttttgtcttgggctgggtggttatagtgttttctttcggcttttcttttctttctgcctcaagtctgaagcgaagtttataaattatttttcctcggctaatataatttgggtggcaaagcttttgccgcttccttaaaaaaagagtggtaagcattttgttgtgtcatcaattctgaattcttgtgctgttataagaaaaaaggatttggg

SEQ ID NO: 2195 - DNA, 2471 bp, Zea Mays
aaacacaccgccaataattcattaacctacgtggacgccactggctactgattactgctactaatctaccagtagtatactagtaactagctaaagcaagctgttcgtgcagtgcagcgttgtttgattgggtactgctgccgcgtcgctgtccgctgccaccgggcggtagttcgcctccgggttggccgcgagccgggaaagcgaccgcccctcctcttctcctccctttctctcgtctcgtcggctcctagctcctcctcctcgctcgccaagggagacgcacccggtccattcgtcctctcctcctatcgcctccccctctcctccccggagatccccgctaccgaaggattatcccgtgcagaggcccactagtatatcagcttggagttgaggagaatggctgttggtgggactcaaccagtccttaggaagtacctaggcgccctcaaggacacgacgactgtgagcttggcaaaagtgaacagtgattataaggaattggacattgcaatcgtcaaggccacaaaccatgttgagcgcccatcgaaggagaagtacataagagaaattttccattccatttctgctgctaggccacgggcagatgtagcctattgcattcatgcccttgctagacgtctttcgaagacgcgcaactgggcggttgcgctcaagacattgattgtcattcatcgcgcccttcgggaagttgatcccacttttcgtgaagagcttattagttatggcagatctaggtcccatatgttgaacatggcctactttaaggatgactctagtgcagaagcttgggattattctgcatgggtgcgcatttatgctttatatttagaggagaggctcgaatgtttccgagtgttgaagtatgatgtagaaacagatcctccgagaactaaggatcttgatactgttgctttgcttgatcatctaccatcattgcagcaactccttttccgtcttcttgcttgccagccacaaggagcgtcgtcttacaatgttataatccagcatgcactctcaatggttgctttagagagtattaagatctacactgcgattagtgatggaacaatcaatctagttgacaagttcttcgagatgcaaagaaatgatgctgttagggcacttgatgtatacaaaagagcaactaaccaggctgaacgactttcagagttttatgaagtgtgcaaaactatacacattgggcgtggtgagaaattcctgaaaatcgagcagcctccagcatcattcctgaataccatggaggagtatgttagagatgctccaacaggtcaaaaagagaaggctatactagcgatagaatacaaaaaagagccagaggaggaagaaaaaccgtcctcacctcctgcggctccagaaccagaaccggaacaagtgcctgagccagaacccgagccagtgaaagaggaagcaccagaagctgaaccagatttgctgggtctgaacgaacccaaccctgctgcaactgcgatagaagagcagaatgctttggcgctagccattgttccgatagatgatgctccgaaagctgctcccacttttggaaatggagtcactggctgggaactggcccttgtgacagcaccaagttcaaatgagaccgccgttgccccaagcaagaaactggccggtggtctggacttgctgacccttgacagcctgtacgacgaggcgaaccggagagcgagccagccagcaagctacaacccctgggaggcgacccccgccgcgcctgccccgatgatgaccatggcgccggtgatgcacgacccgttctacgcctcgaacgggtacgctgcgccgcacggcgtgcagatggcggcgatggcgcagcagcagcaggccttcatgctgcagcagcagcagatgatgacgatggccccggcgcagccggtggtccaccacccgatgcagatgcagcagaaccccgcgaacccgttcggcaaccccttcgcggccgccggcatgccgctccacgccgggcccggcaacgtgtacacggggctgatctgatccggtccggcggtccatttcttggtctgcattagcgctgctgttaccacatcattcattcttttttgcccgagttttcttgttgccattgtgagaaggaaatttgtagcacagacacagacacaggtagagtgtattatagcgtcggtcggagtgtatagcaagcagggggtcgtcatcagtggtatcccgtacgtagaaggtgattgcatgtatattatacacacagagtttggtcacctgttcatgtgcagttgagagtccattcttgcggcgaggagacgcggcacggcgccacgtcgagattgagattggattattcttaacattggatacggttgaataatgcagcagccattctttttagcacatgacactgttcgatggaatggaacaggacggttgagatcgac

SEQ ID NO: 2196 - DNA, 2374 bp, Zea Mays
ggctggactggacccccaacccaacaacagcagcaggaacaggaaaaagaaaaaactctctcccattcccatctcgcctcccacctcctccgcctcgccgccgcggcaggcaccgccaccaatcttctcttccgccccctcgttcgttcgctcgctcgctcgccaggagatcgactcgaggcgaggccatgaagtacgtgctggtgaccggcggcgtggtgagcgggctcgggaagggcgtgacggccagcagcatcggcgtcgtgctcaaggcctgcggcctccgcgtcacgtctatcaagatcggtggacttggaccttggaaactatgagagatttctggacatcaagttgactcgtgacaacaacataaccacggggaagatataccagtctgttattgacaaggaacgtagaggagattacctaggaaaaactgttcaggtcgtgccacacatcacagatgaaatacaagattggattcaacgtgtggcaatgaatccagttgatgacaccgaagagccagctgatgtttgtgtcatagaacttggtgggactataggggacattgaatcaatgcctttcatagaagcactaggccaattttcataccgtaaaacaaagcccacccaacatagtgttcgcggacttcgaggacttggactcatgcctgatattttggcatgtcgcagtacacagccacttgaagaacacgtgaaagtgaagctcgcacaattttgtcatgtcccgataccaaatatcattaatctccatgatgtcaccaacatttggcacattcctttgttgctcagagatcagaaggcccatgaagctattttgaaggtgttagaccttcagtgcgcgagtaaagttgctcgagaaccccaattgtctgaatggactgaaagagtcagcagatgtgacagattgaaatctccggttaggattgcaatggttggaaagtatactggcctgtcagactcctacctatctgttataaaggctcttttgcatgcgtcggttgctttggacaggaaacttgtggtggactgggttccttcctgtgatcttgaagattctacagcaaaagagactcctgacgcctatgaaaaggcatgggagtcgttgaagggtgcagatggtgtgttggtgccaggaggttttggagacagaggagtccaagggaaaattctggctgcaaaatacgcgcgagaaaacaacgttccatatcttggcatttgcttgggcatgcaaattgcagtgattgagtttgcacgctctgtcatgaagttgcacggtgctaacagcacagagtttgatccaaccacaaaaacaccatgtgttgttttcatgccagaggggtccaaaactcatatgggagcaacaatgcgccttggttcaaggaggacctttttccaggccactaactgcaaatctgctaaactgtacggcaatgcttgctacgttgacgaaagacaccgccacagatacgaggtgaatcctgacatggtcccagaatttgagaaggcagggctttctttcgttggcagggatgagagtggcgaacgcatggagattatcgaactaccaactcataggtttttcgtcggagcacagtttcaccctgaattcaagtcaaggcccggcaagccatctccgcttttcttaggattggtagcagcgtcatcaggccagcttgaccacttgctccaacgtggccttaccagttcagcaggcagagacatctgcggcaaagggggagcgcagaaaccaaaagcttgccagaacgggcatgtcatgaagccactgaatggcctggtgcacgggcactattcagcgactcgctgcaatggcgtcattcccatctagcaggctgttttcgcttgttctttttctttccgttctacctacctgcagggcaaccaggaagagaagggctgtttgctctagcgacacggcagccgtttccgatgttttaacgaggaagcaattggcatgcaaagctgtcgcgcgcattaagaggcaaatctagcagcttattagctagggttcgattagtagtagtagtaatccgatgttgctggtttatttgttagtttgtttgctaagaaagattacaagggttagtgatgtgcagctagctccagtgtagcctgccgtctcgccccatttgtacattgtaaaaccactgctactctccatgattgactgaatggatgagtataaacgtattggaccaacatgctcggtgttataaaaatctaagttgcaatccaactgtagttgtctcggggatgttcggtaaagttgcgtgagctggtggcacgagctatgggtttggtaaaggcttagcagactcatatgtacatttgca

SEQ ID NO: 2197 - DNA, 1277 bp, Zea Mays
cccaaatcccaacacctcgtggccttccgccttcgccgcccgtctccgctccgcttccccccgcggggcgggagccgggagtgcgcgctcgcgtccccccaccccctcacctcttcagatctccccggccgctgcctcggttggacctggttgtcgcgcccaggccaagcttggttgtgtccccggcgacggcgatgcggcgaggcgctgcgctgctcctggtggccgtcttcgccgtggtcgccgtagcgaaggaaggaggagtcagcaatgatattggtgacaacaacaagaaggataactcaacagaagtaaccaacatcagaagagatggctccatacagcagccaaagcacaaagatagcatcatgacaaagtcttcacaaccactagatttcttggaagattctcttatcaaggagtgtgatccatcacatagatgtatcattgaaaacaagaaattcatcgcctgcttaaaagtttctggagaagactcattggctctgtcacttctgatggacaacagaggcataaacccactagatgttagcatcatggctccagattatgtcactttagctgaagattccatccatgttgaagcaaatggtcacaatgagacacaagtgagagtttctgtcaatgatgatgcaaatagcacgacaatagtcatcaaagttgcagaaaaatcctgcaacatcagcattcacagtgcaatcacaagggagacggctggcagtggcagagtcataaggatgccacttacgccaacatacacgctactgccagtcttccttctcctcgttgcggtggcagtgtgcatcgtggtccggaggtggcgcaaccaggacggcgaccctgcgtatcagaagctagacatgtcagacttgccggtttcggttggaggcaagaaagaacatgacgatcggtctgacaagtgggacgacaactggggagatgactgggacgacgaggaagctccggtgacgccatccaagcctctgcccaacccttcgtccaaaggtctcgccccgaggcgatcggcgaaagatggttggaaagattagttagccacatgacgccacttaaaaggagcattgcggaaatagttccagtgcatgcagtatatttttaccttcatctttgttgttaaatatttctggaggatgctaatgtcagagagtgcaatacattgataccaagcagaaaattttgtgatcttcctctgccaaactgagtaactggcagctattgaatatagttattggacttccgac

SEQ ID NO: 2198 - DNA, 543 bp, Zea Mays
cagcaatcgatcataataagcacaaggaaggtagcacatatatattcacagcaagcaaccatgtcgggcatatcgactacggtgcctaagccaaaaggatcgcaagcagaccatcaaacggaataccagaggcccaaagttcatgaccaacatgctcctcctcctcgaggcagtgatggtctgtcaagccctgcgctagcgacggcgggatcaaggaagaagcagcgacagcaggagccgtacaacaaacgaccggatagcggagaaaaagcaggcccaaaagctacgggtatttcgtacctcaattggccatgacggatctacagaagctcagcaaaggaatatatagtgcaagctcccttgtcaaggatcgtgtgtgtgcatcacgatgttttacataacagtataagacatcatatgcatattagggaaaaaaatgttacttcatttatttcgatgatattattagtttattggatatgttaatgtatgcattgttgtatacagtatccgaaataaatggccagcctatatcctttttgt

SEQ ID NO: 2199 - DNA, 1622 bp, Zea Mays
tgaccttgtagagctgactatcggattcacggaccaatcctcgtcttctcccaattctcattgcatcgaatcgggctcgatgctgcccctctccctcttcgtttccctcttggtgctccatctcccccacgcatccgccgacggcgacatctgcatcatcggcggtggcatctccggcgcctccaccgccttcttcctcaccagctacaccagcaccctcggtggagcgcagctgcgcgtttttgagcgccgtcagaaggtgggcggccgcctgggcaccgtcactctcgcgggcgacagcttcgaggccgggggctccatcatccacccccgcaacctccacgcgcgccgcttcgccgacctcctgggactcgccgtgaagaccggcggcgacgactggctagggatctgggacggcaaaagcttcgtcttccagacggcccgcccacctcctgtcggcagctcctggtggcggcgcaagctgcacagtctcgtcaactcgctgctgctgctcaggcgatatggtctgtccctgctaaagatggacaagtttgtccaggaaatgttgcggcggtttatgctcttctacaatggcatggagtctcgccctgtgtttgccacggttgaggagatgctccaatggacgggtctctatggcctcacccgcaggacccttgaggaggagctgctggatgccggcctcaacacccgaacgatagcagagcttgtcactgttatcacaaggatcaactatgggcaaagcacacacataagtggcctggcaggcgccgtgtccttagctggatctgagtcaggattatgggctgtcaaagggggcaactggcagctagctgccggattgctcaagacctctaatgctaccttgcatcttcaagaaggcatagactccatcactgatgccggggatcactacgttctgagatccaatagtgggagcgaatacgagtgtatggtgacggtggtggcaaccccactcgacgagctgaacattacgtttagccctccaatctccattccgccgaggaagatgcagcacacacatgcgacctttgtgagaggcatattgaacccgaggtacagcgaaggcgacatggcggcgtacaagatgttttcacgggcaaagctggatgatggtttgctggatcagatcttcagggctcggatagagacgatccggatcaactgggctgcttacccgcactaccaagccccagaggagtttgctccgatagtgttggacgggaagcagctgtactacgtgaacacctttgagagcgccgcgagcgccatagagacgggtgctgtagcagcagagaacgtggcgcggctcatcatctccaggctctctctactaccgcaggcacagcagcagcagcctcatatcatcaagtcattcgccgaacaagaatcccagcgtcgccatgtagacctgtgaaatgttgtaatggcattgtagccagttttatcccagctagcattttggtacatttatttatgtatttgaccaatggtttggtttgtaaatggatgatatagttagtaattgttagcgccgatctagatgtctagacgtcgatcattgcgatgagtatcggcgatgg

SEQ ID NO: 2200 - DNA, 5430 bp, Zea Mays
aaagggtcaatgtgagcgtatctgtttggactggagctgctcttccgatccaagcgtggaagcatcattaccactcgactctatagccactagtcactcagtcaatcatccacctgcgctgccgctggaatttaattaaaaaaaaagagcccgatcgatccagcaaagtgcatcacgccgttcacggcttcaggacatagggagctcccaagttctcctcctcctcctcctccacctcctcctcgtcgtcgtcttctctctcaggtctcagccatcgtatcgtccggacccaccgtatccccagtccgccggcggccgtcgattcattatcccggccgcccgggctgcccgtaagtcaagcggcggcggcggcggcggctaaggtatagccaaggctggagcgaggccggtgcggccgaccatccctgtgtgtgcaccctgcagaaccaacctcacccccgatcaaggttcttggatggcgggcgtgtgcgggagcccgttctgctccagggaagcttcagctccagctccagcgtcatgtggacgatgggacgaactactcaactcctccacctgcgcgaacaacatcctggcgaccggcgccgctgcgctgctcgccgtcgtcctcgcgctgcagctgctcgtcagggtcgcaaggaacggactacgacacgcgcccgtcgtcgcgctcagctcgccgctgcagcgggccgccgtggcggccaacgcctgcctgggcctggcctacctgggcctcgcggcgtggatgctggggacggacctgacccagcgcgcctccgtctacctcccacaccggtggctggtgagcctggcccaggggctctgcctgctcctcgccggcttcgccttcagcgtcagggcgcagctgctcggagcggcgttcctccgggtctgggcggctctgctggccgcgtacgccgcgttcgtttgctgcacctcggtcgtgcacatggtcgcagacaaggtgctggccgtgaagacgtgcttggatgttctgtccctgcctggtgcgctgctgctccttgtgtacggcattcggcacgccagggaagaagaagaaggagatggtaacggaggaaccgaaagttctttgtataagcctctgaacgccgaggctcacgacgacggtgcggccgactcgcgtgtcaccccgtttgctaaagccggggttttcagcatcatgacgttctggtggctgaaccccatgatgaagaagggttacgagaagcctctcgaggagaaagacatgccgctcctaggcccctcggaccgagcgtacagccagtacctgatgttcttggacaacctgaacaggaagaagcagctgcaggcacacggcaacccgtcggtcttctggaccatcgtctcttctcacaagagcgcgatcttggtctcgggtctcttcgcgttgctcaaagtgctcacgctgtctgcaggcccagtgcttctgaaagccttcatcaatgtctcgcttgggaaaggttccttcaagtacgagggctttgttctggccgcggcaatgttcgctatcaagtgctgtgagtctctgtcccagaggcagtggtactttcgcacccggaggctagggctccaggtgaggtcgctcctgtcggccgccatctacaagaagcagcagaagctgtcgggctcttcgaagctgaagcattcctctggagagatcataaactacgtcaccgtcgacgcctaccggatcggcgagttcccgtactggttccaccagacgtggacgacaagcgtccagctctgcatcgctctggggatcctgtacaatgcggttggtcttgccatgattgcatcgctggtcgtcatcgttctcactgtgatctgcaacgctcctctgtccaagctgcagcacaagtttcagactaggcttatggaagcacagggcgtgaggctgaaggcgatgtcggagtccttgatccacatgaaggtcttaaaactctatgcgtgggagacgcatttcaagaaggtcattgaggggttgagggagattgagatcaagtggctgtcggcgttcaaccttaggaaatccttcaatggtttcgtgttctggacatcaccggttctggtctcggctgcaaccttcctcacatgctatcttctgaaaatccctcttgatgcaagcaatgttttcacgtttgtggccactctgcgccttgttcaagacccaattaggcagatgccggatgtgattggagtcgttatacaggctaaagttgctttcactaggataacgaagtttcttgatgcgcctgagctgagtggacaggccaggaagaaatactgtgtgggagatgaatatcgtatagtgatgaactcttgcagtttttcatgggatgagaacccgtcaaaaccaactctgaagaatataaacttggtggtcaaggctggggagaaggttgcaatatgtggcgaggtaggatcaggaaagtcaacactattggctgcagttcttggagaggttcctaaaacagaaggcatgatccaaatttgtgggaaaacagcatatgtttctcaaaatgcatggatccaaacaggaacggtgcaagacaatattctctttggatcttcaatggacaggcaaaggtaccaagaaacgcttgagaggtgttctttagtaaaagaccttgaaatgcttccatatggagaccatactcaaatcggggagaggggcgtaaatcttagcggtggccagaagcagcgtgttcagcttgctcgtgcattataccaaaatgcagacatttatcttctcgatgaccctttcagcgctgttgatgcccacacagcaactagtctttttaacgaatatgtcatgggagctctgtcagataagactgtccttttggtgacccatcaagtcgattttttgcctgtatttgattctgttctgttaatgtcagatggtgaaattattcgtgctgcaccttatcaagatttattggcacattgtcaagaatttcagaacctcgtaaatgcccataaagacactattggtgtttcagatcttaacagagtcagatcccatagaacaaatgaaaacaagggatcgattgatattcatggaagcttatacaaagagtctttgaagccatcaccagcagatcagctgatcaagacagaggaaagagaaatgggtgacactggtctcaagccttatatcctttacttgcgccagaataaaggcttcttcaatggctctatgggtattctttgccatgtgattttcgtatgtggccaaatagcacagaattcatggatggctgctaatgtccagaatcctgatgttggtacacttaagttgatttctgtgtacattgcaattggattcatcacagtgttcttcttgctgtttagatcgatagcacttgttgttcttgggatccaaacatcaagatctttattttcccagttactcaactcattgttccgtgcgccaatgtccttttttgattctacccctcttggaaggatacttagccgggtatcttcagatttgagcattgttgatcttgatgttccatttggattgatgcttgctcttggtgccagcataaatgcatatagcaatctgggggtgttggctgttgttacatggcaagttctgttcgtctctgtgccgatgatggttttggcactcaggttgcagaagtactatttagcctcagctaaggaactgatgaggatcaatggcactaccaaatcagctctggctaatcacttgggagagtcggttgcagggtctataacaataagggctttcgaggaagaagatcgtttctttgagaaaaattcggaacttgttgacaagaatgctgcttcatatttctataattttgcagcgactgaatggctgattcaacgcctggaaacaatgagtgctgcagttctttctttttctgccttcatcatggctctcctccctgcaggaacttttagctctggctttataggaatggcgttgtcttatggtctgtccctgaacaattcctttgttttctctatccaaaaccagtgccagctatcaaaccagataatctctgtggaaagggtgaaccagtacatggacataccaagtgaagcagcagaggtcattgaagaaaatcgaccatcaccaaactggccccaagttggtagggtggagcttagagatctgaagatacagggaagatgctccccttgtactgcatggaatcacatgcacttttgaaggcggagataagattggtatagtcggccggacaggaagtggaaagacgactttaatcggtgcattgtttcgtcttgttgagccaactggggggaaaataattattgactctgtagatatcaccacaattggcttacatgaccttcgttcacgtttgggtatcattccacaagatccgacactctttcagggaaccataagatataatctagatcctcttgagcaattttcggatcaacagatatgggaggttcttgacaaatgtcagcttcttgaagctgtccaggagaaggaacagggattggactcacttgttgtggaggatggctcgaactggagcatgggtcagaggcagctcttctgtttgggacgtgcactgctaagaagatgccgtgtcttagtcctcgacgaggccactgcatctatagacaatgctaccgatgcgatccttcagaaaacaatcaggacagagttcagagactgcactgtcatcactgtcgctcaccgtatacccactgtcatggactgcagtatggtacttgcactgagcgacgggaaactggtggagtatgacaagcctacgaagctcatggaaaccgaagggtctctcttccgtgacctcgtcaaagagtactggtcgtacgcatcgaatgggaatatctagaagccacctccaaactacgaccgtttgcatgtttccactcgctgcatcctcttgaaaggagatacaagaatctgggcttgcacatccgaagaactattgtatctgaaatcttgagaaaaggcgtcaggcattgtcatgaaatgcttgttgtcaagttttcaccactcgtttttcagcaactttttggtagtttctgttttgggtcattgcttcccttccaggcgctgaataaaagaaaacatgtctccatccccccccccccttcttctcccctccaaaaaaaagtagaggaaatcctcaacatttctttgctcacagtgatactttatgctcataacaaaaattcttaggcttggtgctcaacactattccattcagaatttgtggtgtatgcttacattcgtacaaagctgtagtagggtatatgatgtctgtttttttggggtgcaatcatggcttttcagcaccctcttgttcatgtttgatgtatattcatcggtgtctggagccaagcaat

SEQ ID NO: 2201 - DNA, 1316 bp, Zea Mays
gaggaggaagcttcagtgaggccctgcactgcagcgggatggcgtcgccgccgccaccacgcgtatgcgtaaccggtggcggcgggtacgtcgcctcatggctcgtcaagctcctgctctcccgcggctacgccgtgcacgccactgtccgcgacccaagtgatcccaagaacgcccacctgcaacagctggacggggcccgggagaggttgcgcctgttcaaggccgacgtgctcgaccgcgacgccctggcgaccgcggtcgtcgcgtgcgagggcgtcttccacgtcgcctcccctgtgcccgcggacaaagtcctcgatcccgagtccgaggtgctgtctcctgctgtcaagggcactctgaacgtcctccaggcctgctcggcaaacaacgttcagaaagttgtcgtggtttcgtccacggctgccgtttactttaacccgagctggccccaaggtagaaccaaagacgagagttgctggtcagacagagatttatgcattaagaacgagaactggtactgtgctgccaagacgattgctgaagaaactgcagtggagtatggagagaagaacgggctgattgttgtcacggtctgcccttgtatcgttttaggcccactcctgcagccgctgatcaatgccagcagcgaactcctcgtctacattataaaaggtggcttttatatattcctgctagtttcaaatatccactggttggataattactcgcatggaggtcctagggtgctgaaaaacctcccctggaacatagtcgacgtccgtgacgtagctgatgctttgctcctagtatacgagaaagtggaatcatccgggagatacatctgtgcgcctaatcggatcagcacaaacaacatggtgaacttgtttaagaagtcctaccctaactacaattatgtgaactgcgacaacaaggactatgaatctgaaatctcaccagttacatcggagaaacttaagagtctaggctggaacccaaggacaatggagaaaactttgttggacaacattgagtatttcgagaaggcagggtttttgcgtgatggagagggttatccttgtcgtctacctcatatttttcatttcgcttctgactaatgaaatatattctgtaaaacaattacgacaactactataactgtcttcggacaatttatttctcttctctgtcgtgtttgtttttagatgttctgcacacgcttttacagattgaaccggataacaacaagccttcattataacaaaagtggtagccctaaaaccacatcctcagggtgagatgttgtgatatac

SEQ ID NO: 2202 - DNA, 1339 bp, Zea Mays
actatatactatgctgctggtgctgggttgcaagcaagtggcaactggcaatatacggacaagccgtggcgggtatatacggacgaagaggaggaccggaggaggaagcttcagtgaggccctgcactgcagcgggatggcgtcgccgccgccaccacgcgtatgcgtaaccggtggcggcgggtacgtcgcctcatggctcgtcaagctcctgctctcccgcggctacgccgtgcacgccactgtccgcgacccaagtgatcccaagaacgcccacctgcaacagctggacggggcccgggagaggttgcgcctgttcaaggccgacgtgctcgaccgcgacgccctggcgaccgcggtcgtcgcgtgcgagggcgtcttccacgtcgcctcccctgtgcccgcggacaaatccgaggtgctgtctcctgctgtcaagggcactctgaacgtcctccaggcctgctcggcaaacaacgttcagaaagttgtcgtggtttcgtccacggctgccgtttactttaacccgagctggccccaaggtagaaccaaagacgagagttgctggtcagacagagatttatgcattaagaacgagaactggtactgtgctgccaagacgattgctgaagaaactgcagtggagtatggagagaagaacgggctgattgttgtcacggtctgcccttgtatcgttttaggcccactcctgcagccgctgatcaatgccagcagcgaactcctcgtctacattataaaaggaggtcctagggtgctgaaaaacctcccctggaacatagtcgacgtccgtgacgtagctgatgctttgctcctagtatacgagaaagtggaatcatccgggagatacatctgtgcgcctaatcggatcagcacaaacaacatggtgaacttgtttaagaagtcctaccctaactacaattatgtgaactgcgacaacaaggactatgaatctgaaatctcaccagttacatcggagaaacttaagagtctaggctggaacccaaggacaatggagaaaactttgttggacaacattgagtatttcgagaaggcagggtttttgcgtgatggagagggttatccttgtcgtctacctcatatttttcatttcgcttctgactaatgaaatatattctgtaaaacaattacgacaactactataactgtcttcggacaatttatttctcttctctgtcgtgtttgtttttagatgttctgcacacgcttttacagattgaaccggataacaacaagccttcattataacaaaagtggtagccctaaaaccacatcctcagggtgagatgttgtgatatac

SEQ ID NO: 2203 - DNA, 1025 bp, Zea Mays
tgagtatctatgcagtttctgcacgattactatgaattacgaactgaacttaaatcaaatacttcagtattggtctctagagaggaagctctgccaaccattattaataactgagaagatgttcgcgtacagggagacggtgttggaggaggcacatcagggcatggagctacatgagcactgccgccatatagttgacaacgatgaccaacactgtagattccattctctgtgtgtacaccaagttgggctgaggaacactgagcagcaacaacaatatcgtaaggagagtgcatatgttggacaaatggtatgccatatcttcagttctcttatgatgcttcagcgctgcatcttcagttttctcggctaaaaagagatcatagtcaatagtatacctatgtgtgaaatactgtcaaacttggtatatggacctcagaaagtataggaaagcgctatgctatttgcatgtttgctgggagaaagaaaagatagatgaagttttgtgaacaaccctaacttatgtggtcctggcaccacaaaaccttgtcctgatgctcctcccttttctccacctcctccatacaaccctacaaccccgatgcaatcaccaggtgatttattcagattgtccagtgaaatccttgagttcaataggacctttccttccttactctttcatctaaatgacatcctaattgggaaaatgtatacttccaaaacaagcataatgctgtcaaggctggagagcggtaaggaagaactgcacgttttcctgaaaattaagttgaaaataatttgtaatcaggagctagagcgttacatggtactatgattctgtgctgctattagtctgtggcttagcggtatgtgtgttgtactgctgttaatttgctatactggaatactggaatacaataggaagctactatctgtacctcgtgggattcaggaatgcagaacaagtcaataactaccttgtccttttggttttccctaccctacattagtacgagagtgattaa

SEQ ID NO: 2204 - DNA, 2167 bp, Zea Mays
ggcgtccacacacctgacgttctgcctcccacagtcccacccgacatcctcgcccagaacgcgtcgctaatctcgcgatcgcgcctcggccgttccgcgcctgcctgccgccgcccgcgattgtagctcaccccgacaccgtgccccctctcccctggcgtgatgcccgcctcccacccccttctccgcaccgcacggatctagcgcgggaactgctcagccacggctccgcacaccctcccttcccatgatacggagctgtcctatcctgctcgcgaggcaacgaaagggtacgtgatcctctgtctacatggaaggtgaggcagatcggggggagagtggctcgtggcagtcgcctcgatggcgtccttcgcgccgtccggcgaggtgtcgtccaagcacggcgtcgtcggctacgggatcgtgggtgggcccaacggcaacgccgtcgcgcccgctgccaagtccaccgtcgtcgagaccaccatcgagaggtttgcatatgcttctagtgtgccacgattgctacttctgcagataaatgaagtcagcaaggaatacttcttaaaaactgtaagtaatattgttggtgataaattgcttaagcaagctgcttcacaatatcaaatgcaggcacaacgaagccctcagacaaacccaagcaactattctttatcaggtcaagtttctggtcagcagactgctcccagtggttctgtgacaggagatgaacagaagggatatccatgggcgcacaccatccctatgagacaagctattgccagcactcgaccacctcaatttcggccttcctcgtctggccaaatgcggagtaatacggcatcacgtgcagcgaccacaaacatcttcaccagtgtttggggcaaatagtattcatgcacgtccatttctgcggccagttggaggtccagctgcaccatttagaccacaaatggcagattccaatccaagagcacacttgattcagggagctgtgaccacaatatctaggagtgtgccaaaacgatccatagtgtctggaaatgcgccagtcaatcaagccttgggatcttcaaaagtcagtgctggcatggaaagccagtcacaacaattgagtgcgcctaagcctttagctgcaacaagcttaagtcagactcaatctcatggcattcaagaagagcctaaaattcaggggaagaaacaactattattcgagagtttgcctgcaaccgatctaaagtattggtctctagagaggaagctctgccaaccattattaataactgagaagatgttcgcgtacagggagacggtgttggaggaggcacatcagggcatggagctacatgagcactgccgccatatagttgacaacgatgaccaacactgtagattccattctctgtgtgtacaccaagttgggctgaggaacactgagcagcaacaacaatatcgtaaggagagtgcatatgttggacaaatggaggcgacccaacccttggtagcgcccccgttccaacagtggccacccacgggggctgtgctgcccctgcccgggtccacggcctcggtcaccaacccaccgtctccccccatccccggcgcgtctgacattgttgccgcggacgaggtctgcaccatcttcatggatctgcctatagatgtcaaggaaacggagatgcacaacctgttgtgctggctcttaggattcgaggcgtttgagatgaacttcaagggcaaccagcccatgggcttcgcgctcttctccactgtgcaccaggccatcactgcaaaggctatgttccaggatacggtgtttgatactgagactaaggtggtgttgcaaactgatatggccaagaagaacctcttcgtcaagagatcgaatcagttggatttagtcaaaggtggatttattgcaaatgtgcagtgtgaagaagatgtggacgatgacggagccgagagaggtcattcgaaggcaatgccggaggtgacgacaagggtcataaatagagaagaggttttgctgcaaggaacaagccgcctgttgagggacgtacacaatttgtttgactgaatgacgcaaaatgtgacattgctctgatgttctcggcttctaggtgctcgaagttgaaggatgagagtggcaacctgtgagaaagttgag

SEQ ID NO: 2205 - DNA, 2687 bp, Zea Mays
ggcgtccacacacctgacgttctgcctcccacagtcccacccgacatcctcgcccagaacgcgtcgctaatctcgcgatcgcgcctcggccgttccgcgcctgcctgccgccgcccgcgattgtagctcaccccgacaccgtgccccctctcccctggcgtgatgcccgcctcccacccccttctccgcaccgcacggatctagcgcgggaactgctcagccacggctccgcacaccctcccttcccatgatacggagctgtcctatcctgctcgcgaggcaacgaaagggtacgtgatcctctgtctacatggaaggtgaggcagatcggggggagagtggctcgtggcagtcgcctcgatggcgtccttcgcgccgtccggcgaggtgtcgtccaagcacggcgtcgtcggctacgggatcgtgggtgggcccaacggcaacgccgtcgcgcccgctgccaagtccaccgtcgtcgagaccaccatcgagagggttatcttcgatttttggttcctggcgctcctccccgccgctcgggaaccactccaccgctgagaccgtcgtaacgatcggctccgttgtggcccgcctgtgaccccgtatccgcttgcgctcagctagggttcagatctaaaaatggctgatgacggtgcgaggaggggaatgcccgctgaaggctgaagctgcccccacgggctacagtaggtgccatcgctcgccacaccgaacaccccactgccctccagaccgtgctccagggccctacggcgataggaggccactgaggatggatcagtgcggtactgctgccttccggaggacgccgagcgccggagagggggctcttctattggacttggagcaagcccacggcaacaacgccggaagcaaaatggcctcttctctagaaggacatgagttcgatccaccgtaaggaggcgtgcccgccaggctccatcttcggatctgatcgcccaccaagtgggttgagttcggatgacgagagtttgcctgcaactgatctaaaggttagagcgagcggcatgtgatgcggataaatgaagtcagcaaggaatacttcttaaaaactgtaagtaatattgttggtgataaattgcttaagcaagctgcttcacaatatcaaatgcaggcacaacgaagccctcagacaaacccaagcaactattctttatcaggtcaagtttctggtcagcagactgctcccagtggttctgtgacaggagatgaacagaagggatatccatgggcgcacaccatccctatgagacaagctattgccagcactcgaccacctcaatttcggccttcctcgtctggccaaatgcggagtaatacggcatcacgtgcagcgaccacaaacatcttcaccagtgtttggggcaaatagtattcatgcacgtccatttctgcggccagttggaggtccagctgcaccatttagaccacaaatggcagattccaatccaagagcacacttgattcagggagctgtgaccacaatatctaggagtgtgccaaaacgatccatagtgtctggaaatgcgccagtcaatcaagccttgggatcttcaaaagtcagtgctggcatggaaagccagtcacaacaattgagtgcgcctaagcctttagctgcaacaagcttaagtcagactcaatctcatggcattcaagaagagcctaaaattcaggggaagaaacaactattattcgagagtttgcctgcaaccgatctaaagtattggtctctagagaggaagctctgccaaccattattaataactgagaagatgttcgcgtacagggagacggtgttggaggaggcacatcagggcatggagctacatgagcactgccgccatatagttgacaacgatgaccaacactgtagattccattctctgtgtgtacaccaagttgggctgaggaacactgagcagcaacaacaatatcgtaaggagagtgcatatgttggacaaatggaggcgacccaacccttggtagcgcccccgttccaacagtggccacccacgggggctgtgctgcccctgcccgggtccacggcctcggtcaccaacccaccgtctccccccatccccggcgcgtctgacattgttgccgcggacgaggtctgcaccatcttcatggatctgcctatagatgtcaaggaaacggagatgcacaacctgttgtgctggctcttaggattcgaggcgtttgagatgaacttcaagggcaaccagcccatgggcttcgcgctcttctccactgtgcaccaggccatcactgcaaaggctatgttccaggatacggtgtttgatactgagactaaggtggtgttgcaaactgatatggccaagaagaacctcttcgtcaagagatcgaatcagttggatttagtcaaaggtggatttattgcaaatgtgcagtgtgaagaagatgtggacgatgacggagccgagagaggtcattcgaaggcaatgccggaggtgacgacaagggtcataaatagagaagaggttttgctgcaaggaacaagccgcctgttgagggacgtacacaatttgtttgactgaatgacgcaaaatgtgacattgctctgatgttctcggcttctaggtgctcgaagttgaaggatgagagtggcaacctgtgagaaagttgag

SEQ ID NO: 2206 - DNA, 3108 bp, Zea Mays
ggcgtccacacacctgacgttctgcctcccacagtcccacccgacatcctcgcccagaacgcgtcgctaatctcgcgatcgcgcctcggccgttccgcgcctgcctgccgccgcccgcgattgtagctcaccccgacaccgtgccccctctcccctggcgtgatgcccgcctcccacccccttctccgcaccgcacggatctagcgcgggaactgctcagccacggctccgcacaccctcccttcccatgatacggagctgtcctatcctgctcgcgaggcaacgaaagggtacgtgatcctctgtctacatggaaggtgaggcagatcggggggagagtggctcgtggcagtcgcctcgatggcgtccttcgcgccgtccggcgaggtgtcgtccaagcacggcgtcgtcggctacgggatcgtgggtgggcccaacggcaacgccgtcgcgcccgctgccaagtccaccgtcgtcgagaccaccatcgagagggttatcttcgatttttggttcctggcgctcctccccgccgctcgggaaccactccaccgctgagaccgtcgtaacgatcggctccgttgtggcccgcctgtgaccccgtatccgcttgcgctcagctagggttcagatctaaaaatggctgatgacggtgcgaggaggggaatgcccgctgaaggctgaagctgcccccacgggctacagtaggtgccatcgctcgccacaccgaacaccccactgccctccagaccgtgctccagggccctacggcgataggaggccactgaggatggatcagtgcggtactgctgccttccggaggacgccgagcgccggagagggggctcttctattggacttggagcaagcccacggcaacaacgccggaagcaaaatggcctcttctctagaaggacatgagttcgatccaccgtaaggaggcgtgcccgccaggctccatcttcggatctgatcgcccaccaagtgggttgagttcggatgacgagagtttgcctgcaactgatctaaaggttagagcgagcggcatgtgatgcggataaatgaagtcagcaaggaatacttcttaaaaactgtaagtaatattgttggtgataaattgcttaagcaagctgcttcacaatatcaaatgcaggtaaataatatttccacttcattgtgttatatgtaaacataacgtgtcttgccaccatagctttatatttttggtgtgatgcaatcttattagtcattcttaccagcactttttgttttgttttgtgggttatttactcatgtttgctcaggcacaacgaagccctcagacaaacccaagcaactattctttatcaggtcaagtttctggtcagcagactgctcccagtggttctgtgacaggagatgaacagaagggatatccatgggcgcacaccatccctatgagacaagctattgccagcactcgaccacctcaatttcggccttcctcgtctggccaaatgcggagtaatacggcatcacgtgcagcgaccacaaacatcttcaccagtgtttggggcaaatagtattcatgcacgtccatttctgcggccagttggaggtccagctgcaccatttagaccacaaatggcagattccaatccaagagcacacttgattcagggagctgtgaccacaatatctaggagtgtgccaaaacgatccatagtgtctggaaatgcgccagtcaatcaagccttgggatcttcaaaagtcagtgctggcatggaaagccagtcacaacaattgagtgcgcctaagcctttagctgcaacaagcttaagtcagactcaatctcatggcattcaagaagagcctaaaattcagattacgaactgaacttaaatcaaatacttcagtattggtctctagagaggaagctctgccaaccattattaataactgagaagatgttcgcgtacagggagacggtgttggaggaggcacatcagggcatggagctacatgagcactgccgccatatagttgacaacgatgaccaacactgtagattccattctctgtgtgtacaccaagttgggctgaggaacactgagcagcaacaacaatatcgtaaggagagtgcatatgttggacaaatggaggcgacccaacccttggtagcgcccccgttccaacagtggccacccacgggggctgtgctgcccctgcccgggtccacggcctcggtcaccaacccaccgtctccccccatccccggcgcgtctgacattgttgccgcggacgaggtctgcaccatcttcatggatctgcctatagatgtcaaggaaacggagatgcacaacctgttgtgctggctcttaggattcgaggcgtttgagatgaacttcaagggcaaccagcccatgggcttcgcgctcttctccactgtgcaccaggccatcactgcaaaggctatgttccaggatacggtgtttgatactgagactaaggtggtgttgcaaactgatatggccaagaagaacctcttcgtcaagagatcgaatcagttggatttagtcaaaggtggatttattgcaaatgtgcagtgtgaagaagatgtggacgatgacggagccgagagaggtcattcgaaggcaatgccggaggtgacgacaagggtcataaatagagaagaggtaattgtggatgggttgagggataatgtgttcgccttctcagagaatgttccaggcaccacaaccaagggcatcatggacacagtcctggtcacccagtactttggcaccatgagattggggcctcctcgaagtcatctcgttcatcccccatggtcctggagctgtcaaggatgtctcggcatagataagagatggcttcctgcatgctaatctttagtgagaaaacaaaggattgatatggcccatataggtgagggcattggtactatcatgctatgaaattgttaattatagtcaatatatgatatataaagctagacttgattggtctgtaaaagcatagttcgattgagctataagtgcacttgtgagtgagcctaggtatccaaacctgtcagctcttcatggaaatcctttgggtcagactgtg

SEQ ID NO: 2207 - DNA, 2241 bp, Zea Mays
gcacgttcgcccacagccacagctccacttgtccctgtccatccattcatcattccccgtcactccaccaattcaccacccaaaaccctaaaccccattccgtacctcaacgccgccgccgccgccgccgccgctgcgatgcagtccatggcgctcacctccccctcactcccggaggtcggccccgtttccggccgccgtctccagcgcatccgtgccaccgcggtatccgacgagctcaagctgaacaagtacagcgcgcgcatcacggagcccaagtcgcagggcgcctcgcaggccgtgctctatggggtcgggctcactgacgctgacctccgcaagccgcaggtcggcgtctcgtcggtgtggtacgaggggaacacctgcaacatgcacctgctccgcctcgcggaggccgtccgtgacggcgtccgcgaggccggcatggtcggcttccggtttaacaccgtcggtgtcagcgacgccatttccatgggcacccggggcatgtgctacagcctccagtcccgtgacctcatcgccgacagcatcgagaccgtcatgggagcgcagcactacgacgccaacatttccatacctgggtgcgacaagaacgtacaataatggcaatgggacggcttaatcgacctagcataatgatatatggtggaactattaagcctggtcactttcagggcaattcctatgatatagtatctgctttccagtgctatggagaatatgttagtggttcaatcactgatgagcaaagaaagaacgtcctccgcaattcatgtccaggagcaggtgcctgtggtggtatgtacacagcaaacactatggcatctgctatcgaaactttgggcatgagtcttccatacagttcttcgacacctgctgaggacccactaaaactagaagagtgccgtcttgctgggaagtatcttttagagttgctaaagatggatttgaagcctaaggacattatcactgagaagtcattgcgaaatgcaatggttattgttatggcacttggtggttcgactaatgctgttctgcatttgattgccattgctcggtccgttggtttgcatttgactcttgatgatttccagaaggtcagtgaccaagttcctttccttgcagacctcaagcccagtggcaaatatgtcatggaggatctacataagattggtgggacacctgcagtcattcattaccttttggagcaaggtcttcttgatggtgattgcatgactgttactggtaaaactctagctgagaatgctaaaatcttccctcctctgtctgaggggcagcaaataattcgaccacttgacaatcctatcaaaccaactggccatattcaaatactttatggaaatcttgcaccggaaggttctgtcgcaaaaataactggcaaagagggactgttcttctcaggtcccgcattagtttttgagggtgaagaatccatgatcacagctatctcagaaaacccagcgaatttcaagggaaaggtagtagtaatccgaggagaaggaccaaaaggagggccagggatgcctgaaatgttgactccaacaagtgcaataatgggtgctggtctcggaaaggagtgcgccctgctgacagatggtagattttcaggaggctcacatggatttgttgtcggccacatatgccctgaagcacaggaaggtggcccaattggccttgtccatagtggtgatgtaatcaccatcgatgtaagtaagagggtaatcgacgttgaccttaccgagcagcagctcgaagaaagacggaggaaatggaccccaccgccatacaagtccacctgtggagctctttggaagtacatcaagcttgtggctccagcgtctagaggatgcgtcactgatgagtaggatgtgttacattctgttaggtatgacaataaattgccggtttctaagagcttagcaatgctgcagaaactgctgaataatcgagtgtaatcggggtccgtgagcaatcacatctttgtcagtctcccttgttttgtttgtctcattgtttgtagtaccttgttcaaagagatgataatgtcgattattctttggtcctccacatgtaaccacttagcgtctggtgtggttaaggtagtgtttggttccagagtacggtgggctgaagctgtttcactcctaatttattgttgtttggattgatttcagataaaatggagctgctttaaaaaaa

SEQ ID NO: 2208 - DNA, 3423 bp, Zea Mays
cgaggctgcgtctctcgaagtccaaaacgccccgccctggaaccctaaccctacctttcctctcccgccaccgcccgccccaatggcgaagccgatgaagtacgacgatgaggaggagatctcgtcctccgccgaggaggaggaccagtccgacgccgccggctccgtatctggcgaggaaggggatgacgacgacgaggatgctgcggcgccgcccgcggaggaagctgagggcgaggggcagcaggaggaggaggtcgacgaggaagagatcgaagccgtcactaccggcgctggagctgaggacgaggaggacgccggtgccgttaccgccgctgaaggcgacgacgagtcccagtccaccgaggacgacgagcccgtcgcgagggacaaggacgatgacgacgagactgatgcagtggttgggaagcgagagaaagcaaggctaaaagaactccagaagatgaagaaacataaaatccaagaaatattagatactcaaaatgccgccattgatgctgacatgaacaataaagggaagggacggttgaagtaccttcttcagcagacagaaatatttgctcactttgcaaaaggaagtcagtccaacgagaaaaagccacgcgggaggggacgccatgcatcaaagatgactgaagaagaggaagatgaagaatacctcaaagaggaagaagatgcccttgctggtgcagggggaacacgtttagtttcacagccttcatgcatcaagggaaagatgcgtgattatcaattagctggacttaattggcttatacgattgtatgagaatggtatcaatgggatattagctgatgagatgggacttgggaaaacacttcaaactatttcattgctgggctatctgcatgagttcagaggtataactggtcctcacatggtggttgcgccgaagtccacccttggcaactggatgaaggaaatccaacgtttttgccctatcctacgtgctgtgaagttcttgggcaatccagaagagcggaaccatataagggacgatttgctacagcctggaaaatttgatgtgtgcgtgactagttttgaaatggcaatcaaagaaaaatctgcgttgaggcgcttcagttggcgctacataattattgatgaagctcaccggataaaaaatgagaattctcttctatcgaagactatgaggatttacaacactaattatcgtctcctcatcacaggcactccactccagaataatctccatgagctctgggctctcctcaatttcttgctccctgaaatatttagctctgcggaaacctttgatgaatggtttcaaatttctggggaaaatgatcaacaggaggtggtccagcagcttcataaggttcttcgcccatttcttcttaggaggctcaagtctgatgtagaaaagggtctacctccgaagaaggaaaccatacttaaagttggaatgtctcagatgcaaaagcagtactatcgcgctctgcttcagaaggatttggaggttattaatgccggtggtgaacgcaagcgattgcttaacattgccatgcagctgcgcaagtgctgcaaccatccatatttgttccaaggagctgaacctggcccaccctacacaactggtgaacatctagttgagaatgcaggaaaaatggttctactagataaattgctgcccaagctaaaggagcgtgattccagagtcctaattttttcacagatgaccaggcttttggatatcttggaagattatcttatgtatagaggttatcagtattgtcgaattgacggaaatacaggtggagaagatcgtgatgcatccattgaagccttcaataagccaggaagtgaaaagtttgttttcttactttcaactagggcaggtggccttggtatcaacttggccactgctgatgttgtggttctttatgacagcgattggaatccacaagctgatctgcaagctcaggaccgtgcacataggataggtcaaaagaaagaagttcaagtgttccgcttttgcactgagataatgcaaacgaaattacagtacactatcgaggaaaaggtgattgagagagcatataagaagctagcattggatgctttagttattcagcaaggacgattggcagagcagaaaactgtcaataaggatgaccttctgcaaatggtgcggtttggtgctgaaatggttttcagttctaaggacagcacaataactgatgaggacattgaccgtattatagctaaaggagaggagacaacagctgaacttgatgcaaaaatgaaaaagttcacagaggacgccattaaatttaagatggatgataatgccgaactgtatgattttgatgatgagaaggatgaaaacaaggttgatttcaagaaacttgttagtgataactggatcgagccacctagaagagaaaggaagagaaactactctgagtctgattactttaagcaagcgcttcgccaaggtgcaccagcgaagcctagggagccaaggattccaagaatgccgcacttgcatgatttccagtttttcaataaccaaaggctaaatgaattgtacgaaaaggaagtgcggtacctcatgcaagcaaaccagaagaaagataccattgatggtgaagacgaagatcaattggagcctttaacagcagaggagcaggaagagaaggagcagttattagaagagggttttgcatcatggacaaggagagacttcaacacatttattcgtgcatgtgagaaatatggtcgcaatgatattaaaagtatatcctctgaaatggagggtaagacagaagaggaagttcaacgctatgctaaagttttcaaggagagatacaaggagctgactgattatgatagaattataaaaaatattgaaaggggggaagcaagaatatcccgcaaggatgagattatgaaggctattgggaagaagttagaccgctacaagaacccatggttagagttgaaaattcaatatggccaaaataaagggaagttctataatgaggaatgtgaccgctttatgaatacgactccaacaaagagagcagcactaaggaattcagagggtgagagtgctccgttgagctcattcaagaggcgacggcagtctcttatggacgattatgtgggctcgctctcagcgagatgcagtctctgcaatgctttaagcccgtacgtgctgtgcttagtttcttgtgcacgtgagttgaatgcctcaagggctggtgactttgtagttgctgtagattcggacttcgcaattgcaactgttgctacacttttgttcactttttcatcgtggccctaacactcattccaaattataagattagagattttaacttaacactagagttcgatcaaatttatgcaataaaataa

SEQ ID NO: 2209 - DNA, 3264 bp, Zea Mays
caaacaacaacaaaaaaaaacagagatggaataatttatttccctttttacaggacacacatgacctgacctactctttttctactactactgtgctgcagcaagctacatgacccttctcagcacattgccgtcgtgtattgcaaaatttcggaggctttgactaaaaaagcttcgttttttcgagcttgctcctgccccgaaataaaattcggggccccaaaaattcgcaattctgggggctggccccccgaattagcgcgcctcccggagatccggcgccggctaaggcaatgaagatttctaatctggatgcacacttaatcttgtccagttcttgatcttgggctttgctgcttcctctcaagttagtttgttggccaatcgagtccagaggcgcagatgagtgaggagtacaatatggatgtggccctaaaagccaaaaatgttgctgagaccaagttccatgcccgagacatcaggggtgctcggaagtatgcactcaaggcccagaatctctgcccaacacttgaaggcatattgcagatggtctcaacgcttgaagttcatcttgcagctgagtccaagattgatggagagagtgactggtataggatattgtgtctaggtgcctttgcagatgaagaggaggtgaggaagcaatataggaagctagctctgctgctgcacccagacaagaacaagtctgttggtgctgaggaggccttcaaactgatctctgaggcgtggagtgtgttgtcagatactagcaggaaggtagtttatgatgagaagcgaagaaatcattctgttgtcaatgtaaccaatggcatttatacctatgataagaaggcaaacaagagggctcgaaagaatgctgctgctgcagctgctgccgctgctgctgccgctgcagctgaggctactactcgtcctgttgggattgatacattttggacatcttgcaaccgctgccggatgcagtatgagtacttaaggatttatcttaatcataacctgttgtgcccaaattgccataatgcattcttggcagtggagactgggttcccttgcaatggaagcagctcatcattctcatggtcaaccaagcagcagccgcagcagaaccacaattcaaccaagcattcatatggctcaacaagcaggacttctagcatccctggtacagggaatggggggtaccagcaagataatacttatgattcttacaacaatcaaggcttccagtggaatcagtactccaagacaacaactgcagctgttactaatgcttatagtacacaggccttggagaaacagagaaggaagcatgacgagagctacagctacaactattctgaaagcggcaacacatatgttcatgagaaagctgcttcaaggcgcggtcgcttctcaaagcggagaaggcataactatgatgcttataccactgtggattatggtggcgataacaaagaaacagttgctgcaactgcaagcacagaaccaactgctgtttttactgatgtgggacgggtcaatggtacttcagtggaaaggtttaaatctgcagtgagtggaagaagagcaaatattctgggtgagattacccagattgatacacgaaatttacttcttgagaaagccaaggcaactgtctgtgaaaaattgcatgaattaaacatcacaccatcttcacgagctgcagatagaagaggatctgaaggaaagctgtatccttgtgacaacaacataaaggtcaacggtgtcctctctgacaaacctggcaagggagtcaagctatgcaactcaagaagcatggaaatccaagtgcctgctaccgatgacaaaaatccagagcaacgccgtgtgcctgtgtccatcgatgtcccagaccctgacttccatgatttcgataaagaccgaacggagaaggcttttgatactgatcaagtatgggctacctatgactgcgaggacggcatgccccgcctatatgtaatggttcagaaagttctttcaacgaggcccttccggatccgcatgagctttctcaactcgaagtcaaatatcgaactggcgcctataaactgggtcgcctctggtttccaaaagacatgtggtgacttcagggttgggagatatcaggtgagcgaaacggtgaacatattttcacatagagtgaggtggactaaaggtccccgtggcatcatcaggatcgttccccagaaaggggacacgtgggccttgtaccgtaactggtcccccgactggaacgagctgacgcctgatgacgtgatatacaagtacgagatagtggaagtcgctgatgatttcactgaggagcgagggctgactgtcatcccgttgctgaaggttgccggattcaaagccgtcttccacagacacgtggatcccgaggaggtgaggaggataccaaaggaagagctgttccggttctcgcaccgggttccttctcgtctcctgacgggcgaagagggcagcaatgccccgaaaggctgccatgagctggaccctgctgccactccagtggaccttctcaaggttatcacggagcacaaggaagacgcggtggcgcagagtcctaaataggagtgagcgactccgataacagcgaagataaggtagctggatgtctgagtgaccagatccccacttggttaatgacagcgtgccagcacatgatggtgtctaaagctctactacgccatcttattttcggctgatggcttggacaacacttccagggcaagcagcctgtgtgtgtgtgtgacggacttctgaccttgttaattcttaggcattcctaacatttgattctatcactacacaagccaaccgccacgtagattaaatggccattgggaggaggccggccgcgcacggcaccgagatgagatgaggaggttagtcacggaggtagggagggtgaagatgttacttgtttgtgttgctcactctgtaatgtaggaggcaggctcgagccgagggaaagagctgcttggctttgcttgcccatgtaccccgcatttctgtacctgtttttttacttatgatgatgatgatgtatttccttcttgttttatagtagtaagtaattcacggccagtaattgtagactctggtaaccgtttcggaaaatctagtgctttatctggtggatgattctgtctgaccctgtgctgtttggctgtgcaccgagctacttggatggattggctgattcgaggatgaattctttgt

SEQ ID NO: 2210 - DNA, 2725 bp, Zea Mays
cctggcccctgtgctccccttgccaccgaacgagagccaaaagcctcccgccccacgacgcgcccgccccggcggcgacgccccggaggacgtttcccgcagcgaccggcgaccaagccttgattgcctccgccccatggctacccgggcgcgggcgtagccgccgcctcggccgcagcaggctcggtccgcccccctcggcgatttctgttccagtcgcatcgcgcgacagctcgtcgtccgattcggatccccgccaccgcggcggaacgaggcgtctccggtccccgagggtattcggggaatttgagactgataagtcgggatcctgtcgataatgcggggctacgtgtacgagaccaatgaagtggaagatgagtacggagatgagtactatgatcaagatgagtatgaggaggaaggttcgggtgctggggatgggtatgctgaggaggaagagcctacagagggacaaaaggagatccttgaattgagagaaagattaaaagagcagattaggcgaaaggcaaaggctgctgctgcctgcacagctggtcgatcatcttcttcacaaatacctcaagccagggacaaatttggctctttttttgggccatccaagccggtgatttctcgtcgagtgatagaagaaagaaaatcattgaaagaactgcatagcacggttgcaagggagccaaggccttctggagtacataaggatattccatcgtcctctaaagtgcaaagtagagtaaatggacatcagcataaacaaaagattgttaatcaggtaaagaagaaggctgaggcacttaaggataaccgggattattcatttctactctcggatgatgctgacctgtcatcctctccaaaggagaaacctgctgctagatcttccttgactcaaagggctgatcgtgaggtgacacaatcaacagtaaagaggaaggcaccaacaagtcaacctgcacgcttgtcaaatggatatggacctaagaacacaatgtcaactcaaaggcatgctgaaggtaaggtaaattccatgagaagggaggatttctcgaatacagaaagggttgtttcacgtgacaatgagaggatgtatgaaagggttgtttcacgtgacaatgagaggatgcatagtattgcaagaaatggatccaaccaggcaagtactagcaaaaccacaatccaaaagcatccaagcaggggtcccattgctaataagcaaccgtccaaggattcgaatgatgcaactctgaggaagagcagtgtagcctcaaagcaccatcccttagagattgacagaccaaaatcctcgcaaagtcagaggatgcagtcagctggtcagagaccacagcattcttcccatggtcagacgccacatcaatccatgcagcataggacgcagcagtcattgcagagtcggaggccacaacaaatgacacagggtcagaagccacaacagtctttgcagagtcaaaggactcaacagtccttgcagaatcgaaggccacagcagtcctcacatattcagaaatcgcaatcctcacaagcacacagaccacagtcattaagtaacaggtctcaggctttacaaggacaaaggcctctttcttcacagggtcaatatccggagcaaagaagagtacatgcaagtgacagagtcaaacaagctgaaaggcagattcggcctccttccaagtccatgccatcacggccagtctcttccaatggaattcgtgatgatcatgcaaaaaggaagcaagtggcaaaaagaagatttgatgaagatgatgaagaccccttagcaatgatcagaaatatgtttgggtattgtctagacaagcttactctatcctttctgttttggactttgtggctttttgaagatgttgcttatagatatttggattctaattttggcatactttgcaggtatgatcctagtagatatgcaggcagagatgaagatgtcagtgacatggaagccgattttgctactatagaaatggaagagaaaaggagcgcgaggattgctaggcaggaggatgaagaacaacttcgcttgattgaggaagaagagagacgcgagcaggagagaaagaggcgaaagatggcacgaggccgatagtcgaatacactcctatttggatgttataatatactaccttcgttctcgaatatttgtcgtccgctggttcatttttgaactaaaccgtgacaaataaaaaagaacgcaggagtatctggcaggcctgattgcctgaatacgaagccccatggcggatcagacaggcacttctcttgcagtcctgtttacccttaccacgatgattatctggaggcaaatcaagggaaaacgacaggtgaccaacactgggcacgtgtaacagcagactgtagttgtagtggtttagttctcgaagctgacatggactatatttaagttctcgtcagattgtttggatagcagaaggtttccattgttgcagcgcctcaccagattgtttcttcatatgatatactgattctttcagtcaagcctatataaggatgcgtaatacaagtgcccctcttgtatatctttttcgggtgtaatagtgttgtaataaacgatgttcgaattttcggatatgattttgagctttgtcaggcgatcactgcaccacggtccacagagatgcgcttctggccgggagccaatcgaaggaagcgggaa

SEQ ID NO: 2211 - DNA, 2052 bp, Zea Mays
gctagtttctggagtatgggcagagtccgcgcgggtgcggacatgtcgttcctcacggaatcgtcgtcaacctctggctgattgatgctcgatcggtacctcaagtagccggcctatcgccatcctcgtcattggagcacctacggcacggccacggcgccacacactcggtgggtggcgtctgctcgtgctcgaatacgcggcggcagcgaggacgtcggaacttgcagccatggacgcggcggcgacggccgtgtcgtcgagcggcgacgctcccgttctcctccttgccctcgccgtctccctgctcctcctcgcggcggccgtctggtcctcgaggcggcgtgccgctgcaccgctcgctggcggcgctgctgccgcgcacggcgcggggggccagctggcgccgctcctgtccctgcggctgggcgcgcggcgggcgctggtggtgtcggagcgcggcgtggccgaggagtgcttcaccgcgcacgacgccgcgctggcgggccggccgcgggtgctggccggcgaccggctcgggtacgggtacacgatgctggtgtgggcgtcccacggggaccactggcgcgcgctccgccggctcctggccgccgagatcttctcggcggcccgcgtggccgcgcgcgccgccgaccgccgctccgaggtcgccgcgctcgtcaccagcctggcggcgctccacctccactgcggcggcggcgcggtgagtctccgacccaggctcttcgagctggtgctcggcgtcatgctgcgggcgctcacgggagagcgcgcgcacggcggcgacgtgcgcacgttccagggcatcgtggaggagacgttcgccgtgagcggcgcgcccagcgtcggggacttcttcccggcgctgcggtgggtggaccgcctacgcggcgtcgacgcggcgctcgtgcgtcttcaggccaggcgcgacgcgttcgtcggcggcctcgtccaggaccaacggcggcgaaggcgcgacgccggtgatggccgaggccgacacgcggcggagaagcagagcatcgttgacgagctcctgtcgctgcaagaaactgatcccgagtactacacggacacgatcatcaaaggcgtcgtcttgatgctactcactgccggcaccgacacgtcggcgctgaccaccgagtgggcaatggcgctgctgctgacacacccggaagcaatgcggaaggctagagccgagatagagactagcgtcggcaccgcgcggctcgtggaggagtcggacatcgcgaacctcccgtacctccaatgcgtggtgaaggagaccctgcgcctgcgccccgtcgggccggtcatcccggcgcacgaggccatggaggactgcaccgttggcgggttccatgtcgaacgcggcacgatggtcctcgtgaacgcctgggcaatccaccaggatcccaagctctgggacgcgccagaggagttcaggccggagaggttcctggacgccgccggtacggtgaccgcggtcaccacgcccatgctgccgtttgggcttggacggcggcgctgccctggggaggggttggcgttgcgtctgattagcttgacgctggcggcgctcgttcagtgcttcgagtgggatgttggtgaaggcggtgtcgttgacatgaccgaaggcgttgggctgacaatgccgatggccatgcccttggctgctgtctgccggccccgggagtttgtcaagggcatgctctctacttgaagtcttgaacatgatgagttaaacaatggttttttttataaacaaaaacaaaaagttatgctatcagtatttgattgttcagtattctgtaatcagtatgctatcagcactactaagaacaaaaaaatgtttatatgtatatacattggtagagctgtgttctaaactgagaaaaatctcaagctcaaatacgaaaactgttacacaagcatggcaatgcacactcaaatgatttttacacacaaatattttttgtttttttttctttcttaccgaccggtagaagtggggatttcatgctcaaatgt

SEQ ID NO: 2212 - DNA, 2659 bp, Zea Mays
atggctgtcctcgtcgcggaattcatcctcagattcacagtaatgctaatggacttggaggtaatcactggaattctaaaaaataagcttcttagacatgccattatcctaataccaaattggatttacgatgaaagcaacaatgacaaaagatttgacaaatattcagggaaggttgcctctgaaaagcaagggagctccaatgatagagccctaagggaagaactcgccatcttttcaaaagaagtaatacgatttggcaacctctgcaaagatcctatatggcataacttggggcgatattttgacaagttagcgacagataatacacctcaggatcattcaaaggggagtatggaagctattgtccagcaattgattaatttggcacaaaacacttctatcattcagttttttcctatcaggttcatgcttcaaagcaactttattgtcattcttatcggattaaccaatagtatcctacaagctgacgaagagcttctttctgatcttgggactgatgttaaagacgaatgcaccaagtttgatctcgtggataatgtcaaggtgaactatgcaggtgcttttgtgatgatgataaattgcaacctttgcttatccatcggtgtgatttgcttaatggatgcatttttcataaacaccatggggatatcctacacatccaatgaggccttggggacgcccccatggccaacacagccactaccatcaccagcgatggagagggtgctcaaggatgacgccgtcgaggagaagggcgagcgcgccaggatggcttcactacttttccagcttgcgcgcttaatttcagcgggtgttttaaaatgggcatggttccgtgcttgggtgttccatcccatgtgctggcatcgtttgttggggccatggcaatctcggatttggtgaagaccacattgggcccaaaaggaatggacaagatcctgcaatcaactggcagaggacgtaatgttactgttacaaatgatggggctaccattttgaagtcacttcacattgacaatcctgctgcaaaggtccttgttgctggagaacttttgaaggaggctgagaagttaattaacatgaaaattcatccgatgactattattgcaggttacagaatggctctcgagtgtgccagagattctttgctaaaaaagaccatggacaacaaagaaaatacagataaattcagatctgatctcatgaatattgctatgactactcttagttcaaaaatactttcccaagacaaggagtacttcgctgaacttgcggttgatgctgtcttgaggcttaagggtagcaccaacttggaatctattcaaattctgaagaaacctggaggatctcttaaggattcctttttggacgaagggttcattcttgacaagaaaattggcattgggcagcccaagcgcattgagaatgccaaaattttggttgcaaacactgctatggacacagataaagttaagatatatggagcacgggtccgggtggattcaatgtctaaggttgcagatattgaagctgctgagaagcagaaaatgagagagaaagtccaaaagatcatagcacacgggatcaactgttttgtcaacaggcagttaatctataacttccctgaggaactctttgctgacgctggcatacttgcaattgagcatgctgactttgagggcattgaacggttagctcttgttactggtggtgagatcgcatcaacttttgataatccagagtctgttaagcttgggcaatgcaaggtcattgaagagattatgattggggaggacaggctaatccatttctctggggttgcgatggggcaggcttgcaccattgtcctaaggggggctagtgagcatgtgctcgatgaggctgagaggtccttgcatgatgccttgtgcgtgttgtcccagacggtaaatgatacccgtgtcttgtttggaggcggatggcctgagatggtgatggccaaagaagtggatgaacttgcaaggaagacccctgggaagaaatcccatgctatcgatgctttctcacatgctctgcaagccatcccaacaatcatagctgacaatgctggtttggatagcgctgatttgatctctcagctacgagctgagcaccacaaagagaactccactgctggaattgatgtcatcacaggcactgttggggacatgcaaaagctagggattcaagagtcgttcaaggtgaagcaggccattcttctgtctgcaacagaggctgccgagatgatcctcagggtcgatgagatcataacctgtgccccgcgcagaagagaggataggatgtgatattacacgctgtttctcgatgtagcgggatgctcatcaccctagttttgaggggtattatggtttaggggcgctcaagttggtcagatttcgagtgtttttggcccctaagcgaccggtacttattatttggttgaaacaatcagccttaggtttgtgttctatattctcatgctgtaccgtttggtagcgagttacgtcgtacgatatgcttgttccatcatgtttttctattccttttaacgtaagaatgggcttgtctttgtttccggacgtggttgctacatgtgttgttggttttgagcgtcagg

SEQ ID NO: 2213 - DNA, 1633 bp, Zea Mays
taacgaaccagacccattacatatttctactgctccgaggatgttgcggttgggaggcactcaatgttttgcttgcaatcttgtagcgtcaggctccaacgataatgcaggattggtgtgcatagtgtgattgagataacactggatttgatacacatacgaatttggatttgttaatcgtggatcattatgtcaacactaggattttgtgcctccctcgtcaataaacgtcttctaccatcttggagaaaatcaatgttaagaagcttgtgtctgtcgtgaaagagaaattagcaaatcggcaggaagaggcctcttggaccaaagatttaaagaaccacttgcatgatgttatgtctttaggtgtaggcacggagatcttgatcacaccagacaccactttgctgctggagttatttgatatcaagaaaggcaatcgaggaaaagcaatatttcaccacgagcttcctcatcataatattacattccaagcatcttggcctggattatttgttgataagaagggaacatattgggatgtgccattatcattatcggctgaccttgcttcagttggctccagttctggattgagttatcatctattattgcagcagaatagtggggaaccaaaatgttttgggggtgatgaaacagatgatgttcctactgctctgttacctggcctatgtgctaaagtggctatttccatgaagaaaagcattgatgcttggaggaaaaaagaagataagctaaaaaaagttcagccatatgatgtatttctctcggattcacatgtttctttaactggtattgttggtggagtagccagtggatatttgggagactgttcaaggagagtggctatacgagatgaaacacacaagagtaatgcttttataatgtttgacgagaggaataaacgtgctgcctttgcagacctctttgcttctgttactttcactgctcaatacgggaattttcagaggctttttctggatttgactaagatagttgggcccttcagttttcgtgttgaatcctctgtagccattgaccccagaagccaggaccattttgttcgagtggatgatccgatcttcgcaattgattgggctctcaaagtcctgggttcagcaaaggccacagcgtggtattcacccaagcatcaggaggccatgatggagctccggttctacgaaacctgaagctgttcatcgtgaacgttgtataaaataatgcctggacttcatgattgctatggtcgctgatttcactaggatcagatggtatgaatggctgacgccgtgatggtcaaatgaatcaacccccgtgtaatatctattcatatcctgctttaccggtttgagtcatcagttttttttgcttcaggtgatgtagcttgtgctgttctcggcgttaacagaggaagttaatactgtttgagtctttagtgaacttgctaggtgaaccagtctgagtttctgattgccttttgtcagtgtacaaaaaccatgcccccaccatttttatttctttaaatatatgaattttagggtgagcttattaaataattaatccttttttagacatccatttgttcatctttttgacaaaactcaagacagctgaa

SEQ ID NO: 2214 - DNA, 1638 bp, Zea Mays
gattttgtgcctccctcgtcaataaacgtcttctaccatcttggagaaaatcaatgttaagaagcttgtgtctgtcgtgaaagagaaattagcaaatcggcaggaagaggcctcttggaccaaagatttaaagaaccacttgcatgatgttatgtctttaggtgtaggcacggagatcttgatcacaccagacaccactttgctgctggagttatttgatatcaagaaaggcaatcgaggaaaagcaatatttcaccacgaggcaaaaaatctggatgctcttaacctatttggtatacagacacccctttacctattgcagcttcctcatcataatattacattccaagcatcttggcctggattatttgttgataagaagggaacatattgggatgtgccattatcattatcggctgaccttgcttcagttggctccagttctggattgagttatcatctattattgcagcagaatagtggggaaccaaaatgttttgggggtgatgaaacagatgatgttcctactgctctgttacctggcctatgtgctaaagtggctatttccatgaagaaaagcattgatgcttggaggaaaaaagaagataagctaaaaaaagttcagccatatgatgtatttctctcggattcacatgtttctttaactggtattgttggtggagtagccagtggatatttgggagactgttcaaggagagtggctatacgagatgaaacacacaagagtaatgcttttataatgtttgacgagaggaataaacgtgctgcctttgcagacctctttgcttctgttactttcactgctcaatacgggaattttcagaggctttttctggatttgactaaggcaagtgcccgatttgatatcacctctggttcattgttcttatgtggtgcttctcgccttgcacaagatttcttcttctctagaagacctgatgtagagacattctgcgatatttgtcctgatgtgacagtttcctttcaacaacagatagttgggcccttcagttttcgtgttgaatcctctgtagccattgaccccagaagccaggaccattttgttcgagtggatgatccgatcttcgcaattgattgggctctcaaagtcctgggttcagcaaaggccacagcgtggtattcacccaagcatcaggaggccatgatggagctccggttctacgaaacctgaagctgttcatcgtgaacgttgtataaaataatgcctggacttcatgattgctatggtcgctgatttcactaggatcagatggtatgaatggctgacgccgtgatggtcaaatgaatcaacccccgtgtaatatctattcatatcctgctttaccggtttgagtcatcagttttttttgcttcaggtgatgtagcttgtgctgttctcggcgttaacagaggaagttaatactgtttgagtctttagtgaacttgctaggtgaaccagtctgagtttctgattgccttttgtcagtgtacaaaaaccatgcccccaccatttttatttctttaaatatatgaattttagggtgagcttattaaataattaatccttttttagacatccatttgttcatctttttgacaaaactcaagacagctgaa

SEQ ID NO: 2215 - DNA, 1861 bp, Zea Mays
ccctagcctaggtccctatccctatccggctcctcgcccaccaatctgtacacactccgacgccgacgcgaaatcggaaggaccaccaagctcaaaaaagcgccgcccggcgccgatgttgctgcggcggatgcgatggatgtcggagggggacggccggtgggagctggatgcggagaccccggtgacgatggagggcacggcgcgccccgtcccgggggaccccctgccgctggggctctcacggggctaccgcatcacccgtcccaagcagctagacttcttccaccggttcatggcgtcccctctggtcttctaccatcttggagaaaatcaatgttaagaagcttgtgtctgtcgtgaaagagaaattagcaaatcggcaggaagaggcctcttggaccaaagatttaaagaaccacttgcatgatgttatgtctttaggtgtaggcacggagatcttgatcacaccagacaccactttgctgctggagttatttgatatcaagaaaggcaatcgaggaaaagcaatatttcaccacgagcttcctcatcataatattacattccaagcatcttggcctggattatttgttgataagaagggaacatattgggatgtgccattatcattatcggctgaccttgcttcagttggctccagttctggattgagttatcatctattattgcagcagaatagtggggaaccaaaatgttttgggggtgatgaaacagatgatgttcctactgctctgttacctggcctatgtgctaaagtggctatttccatgaagaaaagcattgatgcttggaggaaaaaagaagataagctaaaaaaagttcagccatatgatgtatttctctcggattcacatgtttctttaactggtattgttggtggagtagccagtggatatttgggagactgttcaaggagagtggctatacgagatgaaacacacaagagtaatgcttttataatgtttgacgagaggaataaacgtgctgcctttgcagacctctttgcttctgttactttcactgctcaatacgggaattttcagaggctttttctggatttgactaaggcaagtgcccgatttgatatcacctctggttcattgttcttatgtggtgcttctcgccttgcacaagatttcttcttctctagaagacctgatgtagagacattctgcgatatttgtcctgatgtgacagtttcctttcaacaacagatagttgggcccttcagttttcgtgttgaatcctctgtagccattgaccccagaagccaggaccattttgttcgagtggatgatccgatcttcgcaattgattgggctctcaaagtcctgggttcagcaaaggccacagcgtggtattcacccaagcatcaggaggccatgatggagctccggttctacgaaacctgaagctgttcatcgtgaacgttgtataaaataatgcctggacttcatgattgctatggtcgctgatttcactaggatcagatggtatgaatggctgacgccgtgatggtcaaatgaatcaacccccgtgtaatatctattcatatcctgctttaccggtttgagtcatcagttttttttgcttcaggtgatgtagcttgtgctgttctcggcgttaacagaggaagttaatactgtttgagtctttagtgaacttgctaggtgaaccagtctgagtttctgattgccttttgtcagtgtacaaaaaccatgcccccaccatttttatttctttaaatatatgaattttagggtgagcttattaaataattaatccttttttagacatccatttgttcatctttttgacaaaactcaagacagctgaa

SEQ ID NO: 2216 - DNA, 2948 bp, Zea Mays
ccctgcctctcctccatctcagcctcgcgatcgaaccctcgccctcttgcttcccttcccccacctccgcctccgcgccgttccgtcctcccactcctcatctcgcgattggcaaattctagggtttcgcggcggccacccggatccagctcggcttcgcgagcgcctctaaagcttcaggtcacgagagggcgctttgctctctccctgtcccgccctcaccgcggccgccgccacgacgacgacgacctgcggtgcgcctgtgcctgggttcggatcgtccggcgcctctccgttggccactggataccagctcatgatgtggaaatctcagctctaaatccgcttgggttgtgatatcgtgacagtgtgggtactgacataactggcactgtgcaagatgttttggcatgtgccgggactctccgctgcatcaccggttgatactattttggacaaggaaaattttaagttggaatgtcttcttgatgaggatgaaataattcaggagtgcaaagcactgaatacccgcttaatcaattttttgcgggacaaggttcaagtggaacaattactccgctacattgtagaggaggctcctgaagatgcagaaaagaaaaggatatttagatttccgtttatagcttgtgaaatatttacatgtgaagtggatgtcatcatgaagacattagtggaggatgaagatcttatgaatttacttttctccttcctgaaacctgaccacccccatgggacattgtcggctggttactttgccaaggtagtgatttgcttgatgatcaggaagacactcccactagttagttatgtgcagggccatcctgaaatagttagccaacttgtcgatcttattgggattacttctatcatggaggttttgattcgcttaatcggtgcagatgaaactatgtattcaagctatgcagattctatgcaatggttagatgacatacaagtccttgagatgattgttgacaagttcagcacatcagattctcctgaggttcatgcaaatgctgctgaaatcctttgtgcagtaactagatatgcccctccagcacttgctgcaaagatttccagtccaagctttgtggggagattatttcaacatgcttttgaagattcaaggccaaaatcggtgctggtccactcattatcagtgtgcatatcgttgttagatcctaagagacttgtatcggcttcctatcaggctttccgtagtcagttgagccatggaacacttgtcaccgcaagtccagagacagtaaatggcatgctggatagcctaggggatttattgaagctgctggatgtttcatctgctgaaaatgttctgccaacaacatacggtagcttacaacctccactcgggaaacatcgcttgaagattgttgagttcatctctgttcttctatcaattggtagtgcagctgccgaaacacgactgattcaactaggagcaatcaagcatgctatagatctattttttgagtacccgtttaacaacttcttgcaccaccatgtcgagaatatcatcggctcatgtttggagagtaagcaggatcgactgattggccatgtccttgatgactgtaaacttgttacaagaattctggaagcagagaagaactctgctctgtcgtcagatttaactaagcatactatgtcttcagagggaagatctcccccaaggataggaattgttggtcatatgacacggatagctaacaggctccttcagctggtcaacacaaacatcatggttcaatcacatttgcagcaaaattctgattggattgagtggcatgccagtaccctgacgaagcgtaatgcattagaaaatgtttaccagtgggcttgcggtcgaccaacatcactgcaggatcgtggtagggatagcgatgatgaagacttccgagatagggactacgatgtggctgcacttgctagcaatttaagccaagcatttaaatatggtatttacagtagtgaggatattgacgaggctcaagcatcacttgagcgggatgatgaggatgtatattttgatgatgaatctgcagaggttgtaatctcctcccttcgccttggagacgaccaagaaagtggttcgctctttacaaattccaattggtttgcatttgacgaggacaaggcactgaatgatggtttggttagctcagaagcatccccatctccaaattcggaaatatccgcactaaaagaggatgatgaacatgatgaagtcattcttggcgaaattatagatgaaataaaaggttctgaaccaactctaccagtcttcaacaaagatgcaaacaaagaatctggttccaccggcttggcaaatggtaccgttgacaaattcgaagatgatatcagaccaccaactccggatgtaaaagagagtcaacctgagtttgttgaatggaaggaggaagaagctgaacctggtgatattgccgagaaggataccgcagttcctgatattgaggttgaaaatgagaagcagctggattccatggatgatgttatgctttgcgatgcaaagttaggagaggaaaagaagagtgatgagcttggcatatgaagtgaatttcagaggagcagaatttcagaggaagcacttggaactggtcagaccattattgcacaagcagtctgaggatcatatgtgagttctctgttgtacacttgaaggtggtcccggaccgtgcatctgatggagcctcaaagattcaacttgtctgatggatagatgtgtaacatgatttggtggtggttattgttatgtgcctatagtctgggctacatcgagacgcaaaattctgaaagtagtcttccttgtcctttcggggttctagttgtgacccaggtacttaatgcataattcatttgttataatataaacgacctttggtacaaca

SEQ ID NO: 2217 - DNA, 2274 bp, Zea Mays
acaccctgcagtcggcgccgcggccggagcccggattgccctaacccgccaaaccgctcaaaacccgaaatcaaaattccccatctcgcctcggctaggcgaatccgcaaacacagctctgtctatggcgtcctccgttcccgtggtcgacatcctcgacgacgacgacgacgacaacacctgcctcggcatcgcctcccctgcctcgtgcaagcggtccctcggatcctccggaacctcttcccgcgatttcctcgacgcgttctcgccgtccccgcccctgcgaaagcggcctcccctcgcggcggtggcccccatcaacctcgacgacaccccgtctccgcctaagcggcggcgctcctcggtctccatcaacctcgacgacaccccgtcaccgccaaagccgcggctctcctcggtgcccaagcagccggtcggggtggacgacgacgtggcgctctcacccactggtgatgttgttgccgacaggcccgattctatcttttactgggccgctttctccgagtcaccagagacggttgtgcccacttctgacggcctcggcagtcttgctgctgagactccgggcttcgcctccccggactcggttaggccacctgctgcccctgacatgtcaatgtcatctgctccgccggcacaaaaaggatctggagttacctctctgatatcacttgatagtgacaatgagtcagatgatgacatcatgaacatggagcctttgaccaatttgccaaacaataaggaagcgatgatgtgccaaaaggacggtaccgagcaggttcatgagaagcagaaaagacaaccggcagggaagaaactgacgaaggaggagaaagacaagctgatgcaagaaagaaaacaaaaacggcaggaagataaactactgaagcaagccttgaaagatgaactagctaagaagaagaaaatggaaaaagcaattcagaaatgggaatcaggaaaatttgctttagaatgtataactgttgagattgacaacagtgttatccaaaggggctctattggaggtcctcttctttcaagtttgacagagaatggtctttcctatgaacctaccaagaatagaatcagcggttcaattttatggaagttggatgttcctgatgatattgctcaggcgttttccgaccttaacaatagctgtgatatgaaccaaaatccattgtcacaagtgaaatatgtagcaattgtgcttgaagctgaggaattttgtaaccttataagcaatggatcgttctttgatcatgtccaaagagtttgtgatggatacccaggattcaccatttgctacatcattaataaattgatgaactacatcaacaaatgtgagcaaagtcaatacaagaacccttcaaatacttggagacgtccgccagtggaagaggaaaccactgacatggttatctgtgcaagctaacggtgcagttatcccgaaaggttttgttcataaggacctggcgaagaaagacacctggttaaaagctttaatagcgatccctgacatccagccaagatatgcttttgcaatctggaagaagtatccctgcatgagatcccttctaaatgaatatatggatggcagtaaaaccgttgccgagaaggaacttctgcttagcgacttgaagtgggaagatcgactgggtgacgaaggcaaaaggctggggaacaaatgctctagaagggtgtacagaatgctcatggcacagaatggagacctggatgcagatgaccccgaagctggcggtagatcttagtgcctaatcatctggaccttgggccatcaatatatgcatgcccgccctcttgctgaccggtttgtgtacatatcgtccttttgaccatgcttgcactgtcagtgtcatggtgaaagagtcgcgcattagctcgtgcgatgtttggtgccgaaagcatggcctgcaatgctacacacgatggcacatggtgtgtgtgttttatttattaggtacctgtgaaaagcatttggtcgaagtcgaatgctaggaaactgggcattcgttgtgcgtagctagcttactgcctctatagagccccccaacaggctactccaacttttgagaacctataatatattatactagtagttcagaaaggcacgaggaaatgtttgtattgaatccatgctgccgtgctgtgtacggtaacccgcattgatccactgaaagatcccatgtatcgccgtttgtggaggacagctaccagtgaagtgacccttgc

SEQ ID NO: 2218 - DNA, 1787 bp, Zea Mays
gatggcgggtcaaggttgaagccatcaaggcaacgtacgcctaggagtggagacgacgagagtggaggagggctgctgatgggcggaggagacgaccggagagcggcggcgctccagcgatcctcgtcgccatggagcgtgggcgagcggtggcgggcgcacgccgggatggtcctcgtcatgctcgcctacagcggttaccacgtcctcgccaagtccgtcctcaacgtgggcatgaaccaggtcgtcttctgcgtctaccgcgacctcctcgcgctcctcgtcgtcgcccccgtcgccttcctccgcgagagaagggttaggcctcccgtgacgcctcagctcctcgcttccttcgctctgcttggcttcactgggctgtatgggaacccgctcctctgcctcgtcggcctccgctacacaaacgcctcctacgccgcggctttccagccctccataccagtgctcacgtttctcttggctgccattgtcgggtgactatactacataccatccatatatataaccctcacaatgtatataccatcatgacaaattcaaggtgtcttttagtctgcatcactaggtgaaattaacagtcctgaactgccatcaattcgggagctaataatacagcaataataccgactgaatatgactgacgactaacttatctagctacagtgttgaagcgatcagcgtcttcaccaaggacggcatcctcaaagtcaccggcacggccgtgtgcgtctccggcgccattctgatggccctgtaccgaggcccatccttgatcgcccttcttagaagcatgcccaccgcatggacgagcgctccctaccaccctgctacccccgactggttcacaccagccgtgcccgtgctcgagcagggtgtagaagcatggcagcttggcgtcctgtgcctcataggaaactgcctcttggtggctgtctatctagtcgtgcaggctccagtgatgataaagtatcctgcgagcttatccgtgacagcttactcctattttttcgccacaacctttatggtgctaactggagtatgcgcgactagtggcttacacgagtgggcactgacaaaagccgaggtcatagctgttctgtatgctgaattgtcgcatcctgtctgagctactcgatcatgacatgggcgaacaaagttcttggaccttctctggtcgccctctacaatccactgcaaccagccttttccaccgccctctcaactgttttccttggcgacccagtttacctcggaagcgttattgggggagtctctataattgctggtctctatctggtcatctgggctcgctacaatcaagggcagcgggcgcctacggatggttgtttggaccctcttattattgtggataatccaagaatccacaagacacaagaaagtcccttcgtgtagatcctgaaaaaaatgtgtggattatccacacatttgtataggtggtcttaaaagacagtatacttctatttgttaaacttcacatatgcattcaaataaacaagtggtcaaagattgtagtgaacctaggctctaattagaattgtatgttttgtagaacatttttataggctattcacctatctctagccatctagatcctatcagtcaccctgtaaaaatccatatagtccttcaatcgttggaaacagataaggatccattttgacataaggaagatgctgaggaaactttggtacgtgaagttctctatctcaacaccattggttcactaatgtgcctcctaaattgca

SEQ ID NO: 2219 - DNA, 2274 bp, Zea Mays
gggctgatggcgggtcaaggttgaagccatcaaggcaacgtacgcctaggagtggagacgacgagagtggaggagggctgctgatgggcggaggagacgaccggagagcggcggcgctccagcgatcctcgtcgccatggagcgtgggcgagcggtggcgggcgcacgccgggatggtcctcgtcatgctcgcctacagcggttaccacgtcctcgccaagtccgtcctcaacgtgggcatgaaccaggtcgtcttctgcgtctaccgcgacctcctcgcgctcctcgtcgtcgcccccgtcgccttcctccgcgagagaagggttaggcctcccgtgacgcctcagctcctcgcttccttcgctctgcttggcttcactgggctgtatgggaacccgctcctctgcctcgtcggcctccgctacacaaacgcctcctacgccgcggctttccagccctccataccagtgctcacgtttctcttggctgccattgtcggtgttgaagcgatcagcgtcttcaccaaggacggcatcctcaaagtcaccggcacggccgtgtgcgtctccggcgccattctgatggccctgtaccgaggcccatccttgatcgcccttcttagaagcatgcccaccgcatggacgagcgctccctaccaccctgctacccccgactggttcacaccagccgtgcccgtgctcgagcagggtgtagaagcatggcagcttggcgtcctgtgcctcataggaaactgcctcttggtggctgtctatctagtcgtgcaggctccagtgatgataaagtatcctgcgagcttatccgtgacagcttactcctattttttcgccacaacctttatggtgctaactggagtatgcgcgactagtggcttacacgagtgggcactgacaaaagccgaggtcatagctgttctgtatgctggaattgtcgcatcctgtctgagctactcgatcatgacatgggcgaacaaagttcttggaccttctctggtcgccctctacaatccactgcaaccagccttttccaccgccctctcaactgttttccttggcgacccagtttacctcggaaggagcgcacgactgccacgggcccacggcaactctggtctgcaaaaggccagcgagcaaatcgaatccgttggacttggacataacgcaacgcccgccgcgaaaagcactaccggcctgtgctgctgtggtagttagtttcaagcagcaatggaagccgtggtggccacgacgacaacgagggtgtccttccctctgctgcccaccgcggggaggcccctgctcccgccggtcctggcgcggccccgccgcggcttcgcctccgtctccgccacctccacatccggcgcaggcggcggcggggggcgctcatctgcaggcggctgcggcggcgacggtggaggggacgactccggtgccggcgcagccgcggccgccgcggctgtggcggctctgggtgagtccgagcagcaggaggacggcgactctgacgcaatcgtgctccatgtcgggcctgaggttgctgcagctacagttgatgtcgaaaaggccaccgctattgtgtggacgacacctgaagcgaaggctaccaaagactggcaaaaacaattggccgagaaacttgccaaccatctcacctcttgcgggttccagtctcatctgcaagacgaaggcgaggctgaacaaactgatgcttaacctcagcagtgcattacgtatgtatgactatgagtggccaggaagttttagcatggagggtccttgcatgaagcaatgtctcccacttcagaagttgttacatgcgggtctacgatgtacttcttttatttatttgtcgcagtttagttcaaaaatgaactcgcaggaagtttttatgccgttatattgttgttaaggacttgtggttgaacttcgaaacagctgaactgttgagtatcgaaggcgaactagcgataaaataaaatgatgaagtatcgtacaagcttactcctacagaaacgtttggaaagattttgagggcctgtttggtaaatgtttcttaaaaccatgattttacaatactacacttgcaattgcaattgtcatgacaatattatagttttagtcagctacaaaactaatagctattatttagatacaacattgtagtttatggtatttagataaaagctaggcatactattcaaactttaagttggagccgagtcttcaatactccaaagatactatggtatctaaaata

SEQ ID NO: 2220 - DNA, 1091 bp, Zea Mays
aaggagcatcgccacccgccggaggcatgagatgagaaaagagtcacaggatcatggatgtgaagagataattcaccactaccactgacaccagattatggaccagtagtacgctatgctgatggtgtctttgatccccatttccatcgtttcgtaactataatggaagaccatcggcacaatagctcaaatcccatcactacaattgttgctgtaggaataagtgatccggatgtcaaagagagataaaagaaaagatctgtgttgctggtggagacccaacaatagtagaatctcctactgaacccaagtggtcttcaaaaggggagctgttcttcataaccgatcgaaggagtgggttttggaatatttataaatgggatgaacacagcagagcggtaacacctctgcattcacttgatgctgaattctccaagcccatgtggatttttggtgtcagctcctatggtttccttggaatagatgacacaagtcacaaaattgtttgctcttacaggcagaatggaaagtcatgttggagtgcttgatcaagattctgagtccttcctgaaaattgacattcccttctcttctgtaactaacatagtggtatctggagatagatccttctatattgagggtgcatctgctactcttccagtatcaatagcaaaggtgacacttgatgaaaagagaactatggcaactgatttctctattgtttggtcctcctctgaggatgttgcacaatatgaatcatacttcagcttgcctgaatttgtggagttcccaaatgtgatcaatggtcagcatgcatatgcttatttttatgctccgtataataatttttttcaaggttcatcagacgaaaagcctcccctactggtcagaactcatgattatgcaaaacactagattgtactattcacagagtgaagtttgaaatacaagataggataagtaagctgctgaagacaacctaagagtgacaagtgtttgcctgctactgcagtcagtatctgtcaattcagtctttcggcaacataatctcttagcattttgatgatagacgtgcatacattagtttatgc

SEQ ID NO: 2221 - DNA, 6711 bp, Zea Mays
atggcctcacccacggtcgcctccccgatccgggcgagccccgtcgacaaccccaccgtcgcgccctcactggcctcctgccgctgcgccttatcgctagatgctcgacatccccatccgcgcgctcgaggcagaggccagggacaccaagatgagcccgaccgcgaccgcctagccatcagctccaaagaagaagccaggggaccgatggacgtcagtgttccgtcgtggtggcccgctagatccatattcagcaagaaagatatctcgccatgccggcccagggccgcagcccgtcaccttcctccccccgcacccgccgtgacagccgcctccccacgcccgcttacccgactggccgcacaagatgcccacagtggcccccatcgcgcccacccgctccccccatccaccgcgacctcagccgccacgccgacgccatccccgtcctctagcgcgttgtcgccgtcgtcacaccgccaaaggtgcctgccccctgctaccgaggtcgacgaccagcagcggcaagctgccgagctcgacgacacgcacgccatgcttggccatatggacgagtccatcgcctgctacgagaaggggctccagatccagatgtccgcgctcgatgagcgcaatccctgcctccctgagacctgcaggtaggtgacaatgtcatcaagggcccctccccctttgtcgcttctcgatctagatctcgcctctccctaaagcacgggttgcacctccccccgtcacccactccttccttggcttctcccgggaaacgaccttcagtctttacaggtatgaggtcttattgtgtgccatcattttcttttgctattcattcccgaatccccactgtgccctccagtgatgatggggtatgagctctgaataacaaacaaggtaaatgtttactcttttgagtagctgaattttgctatgatgtagtaaattatactagtaaattatacttgtactgaatatgaatataagaaaaaaatactgcactaattatttttctacgctctatattgtaaaataataggaatataataaaaagctgacataaaagctaatttacaacatccctttattttactatgttttatgataaataccttgattttccttgtaagttgtatcttttagtgattttcaaagaaactcctatttgcttggtgctttttctgtaagcatatgttgattaaatctttgtgtattctttctgtacactaatttaacttatcattattctgtcatccagtatgttgtcttatttgaatggttcatttccttctttaggtgattgacaaggtttaggaggaaacttccaaaagccggtcaagtatggagtgcttaacatcactttggcaacttatatttttttacatgtttgctttgtttgttaacaacataatttatgggctgacaatgtgatcatgtattctttctggtagtcttcgtgtcactgcttgcagttgcaggggagggatcatggctttcttttattttccatgtgcaatgtttaatttaggtgatgaactccaaagcttatcccattgttttctagcaagagctaagcaatactggatggagaacatttatctttttaataacgagtaaaagcataatggcatgcttgtgtttagttctctgtttgttgaccaatcgctatatttaatcttgattttttttatctataacttgaatttcaaagattcaatattttttattcagacattttctcttctctagatattcttttatgcaaataacgcggttacactagatcagccaacattctgggaaataagctatatggtcagagtaagaggttcaagagttgatagttcaacaactttaactgagagcaaatctacaagaaaaaggaaacaagcaacctggaacctacaactgcaggagcttgcttgaaagtgaacaatcaaggttgtgtgtatatattatgcccgacatttttgaaggatattgcgagggccattgtatctgctggaaaaatcatttcaacttgtcgaacatggtattaggatacgaattggagtggtcaacagaaattctggacagatatgtcaaatttcagaatccacgatggtcctccaagaaataaagatgctcttgatcatctattgagaagtggaatactaattttttgctgcagcgtgatggataaaggtttttgcgtattcttgggtttttttcctttcctttttggctacacacaactctttttaaatatacattcagtaggtggcaatgcctcctatttccctaaaaatatagcgccaaagagttcaaaattgaattctcataatctgctattaggaaaagaggtcaacttctatattttttacatcaggtaatttggctataatacaacggcatgctgaggtcaacttctgtatttttttctgcaagtaacttggctataatacagcggcatgctccattctgaagctggtcaagaaataaatatagcacttgcaatattttccagtagtcaaacctctccattacttcaattctcgttctcatttttgactatgttcttcatgtcagttcaacataataattaagaggtcgcttgcccctgagacggcttcatgatccatcgaagatggcgcttaatctcgagagctagggagatgaaatgccttttgtacatgatggaaggaaacaaattacgtacatgtatatgtggatcgaattgactgttgcattctgcctgtatttaagcaacggtttccacccaaaacgtctataatttggtccttcctagatgtgtcaaatgtgtttactgcactgcgtttgcttttgtggcagcgccctaatagttgtttataaagtctgatgttaacaaactattgtcatgctatgtaatatatagtcttaacatgttggtttgttgagtgttcgaatatcagttttatattattatgtcaggtgttattagtgttcaattttttaagttcttgttgtacatcctatcattacatgagacaatgttgtgatgtttacaatattgtgttatgtatgttatatcattttggtattatagtataatttaatttgtatcagtttagttctgtattggttgttgccaaaaaaaattatgagatattaaggtcgataataatgttcgtttttatataatcgttttgcactaatattttgttaatttttttgtataccgttgcaacgcacgggcacctaactagtatgagactatgagtacatcaagtgcattcccttagaactcttgttgtgtaaaaaaatgtgtaacatgtcttggtacagagattaatttggtttgtgttttttagactgcaattatatctgggttctcagccttgccatggttagtcaagcccctctatgattttatcagttgattcaggtggttgattatatggtggttcagagagctcgaggtgaatcacagagtacatatagatctctccactccagtcactatgttgggaatcctcagcctttggaggaatcatgagtgcatacttcagtggttctccagtcacttatggcgtaagatttgtctttggtgttacagcacttttgccactgttccgagtagcagagaaggacaactctggcaaactgtgaagaaaataaaagattttcacaagcggaatcttcagaatctgaataaaggagttcgtgggaatcagttgtaccaaaaactggttcagttttcgtattccaagcatactactggaagttcacactgatcggcgacaaactctcgcccaaggagaagttgaaggaggatcagcgtgaacacccactgaaagagagatggagttgaatgagaaatctgaaaagaatacgcaagaggtagatgagaagttccaaaacacaaacttgtatctcaagaacttagagatggagcttcgggagttacaagtgcttcataagcaatcagatagatctgaaagttttactgtgccaacacatgcacacactggtggtgcctgcatctagctattcagatcaaagcctgacaggtaccatagggcaaagtgaagaagaaacagaagagttgagcaagatcacgctagagaataaggatattcagcttgatatcaatataagagtgtttgatggagccgaccctatggagctgcatgtttatgattttaaaggacctggtgtaaccttatcaatgtacaatagcgatgagtttattaggccttttgctaagtcctccatggatatggctctttcaaaaaagtcgtctcttcatctcagcaccaagaatacaatcatcaagaagtatgacgacaggcatggatcatctatgtttctacaagctcgcggtcacatttattaggccttttgctaagttcatggatatggctctttcaaaaaagtcgtctcttcatctcagcaccaagaatacaatcatcaagaagtatgacgacatgcatggatcatctatgtttctacaagctcgcgttacaatggaatgctaagagacaaatagttaaagaactgctttaacctaccttgatggagaggggagaatgcatcgtgttagcaagggagcaccagagcagatccttcatcttgcccacaacaagtcagatattgaaagaagggtcagagctgtgattgacaaatttgctgagcgtggtctgtgagcacttggtgtggcttaccaggtgatcaacttgctattgggaaagaaactgcacgtcgtttgggaatgggtactaatatgtacccttcctctgctttactcagacagaataaggatgagtcaattgcttccttgccaattgatgaattgatcgagaaggctgatggctttgctggtgtctttccagaacacaagtatgagatcgtgaaaggcttgcaagcaagaaaacatatatgtggcatgactggggatggtgtaaatgatgccccagctttgaagaaggctgatattggtattgcagtagcagactctactgatgcaactcgtagtgcttctgacattgtcctaactgaacctggccttagtgtgattattagtgctgtgctgacgagtcgggcaattttccaaaggatgaagaattacacgatctatgctgtatcgattaccatccgtattgtgcttggttttatgcttcttgcgctgatatggaagtttgacttcccaccatttatggtcctgatcattgccatcctcaatgacggtaccattatgactatctcgaaggacagagtaaaaccatctccacaaccagacagttggaagttagctgagatttttgcaactggagtagttcttggtggttatttggccatgatgactgtcattttcttctgggctgcatacaagactgactttttcccgcggctgttccacgtcgaaagcctcgagaagaccgcccaggatgactttcagaagttcgcctctgccgtgtaccttcaagtcagcacggtcagtcaggcccttatcttcgtgacacggtcgcgcagctggtcgtttgtggagcgtcctgggttcttgctggtcttcgctttcttggtggctaagctgattgccactctgatcgctgtatatgccaactgggcgttcactgcgatcaagggcattggatggggctgggccggtgtcatctggctctataacatcgtcttctacttcccgctggacatcatcaagttcctcatccgctatgcgctgagtgggagggcatggaacctcgtccttgagcagaggattgcgttcacgagcaagaagaatttcggcacggaagaaagggagcgcaagtgggcgcatgcgcagaggactctccatgggctccagccgccagaagcatccatcttcgagaacaagacgacattcaatgagctgaaccagctcgcggaagaggcccgcaggagagccgagatggcgaggttgcgagaagtgagcaccctgaaggggaggatggagtcagtggtgaagcagaagggtctggacatctagaccatccagcagtcctacactgtgtgactgactgactgacgacgacggggtttatagaggtttcttcttatactatacaatctgtactaggtagcaataaggatcaaggaaggaacccctatatattggctgcggttcgcaggaaatgaatgatggtaatatttatgatgtcggtgtggtgcttctgtcgccaactctcgaccatactaccctcaactcacccccggcaccaccggcaggcattgatattcagagatgagtactcatatgaccatgaatgcggatgagtcagataacgaaacaaaacaacgtggttctataaaggggcaccgagtacttcaatgagataggcaagcgggatatcagaggttgtatcaagattatttttcagacaatcctacgtatggacattattattttagacgatggttttgaatgagacgttcattatttgtacgtatttggaaagtcgtagaacaacatgatcaatactttgttcagaaaaggaacgcagctggcactctagccctttctagtctgcaaaaaattactgcagcatttcgaatgttatcttatggggtagttgctgatgctactattgattcacccctagaagtattcacaaacatgaaatgcagttctcttcttcaagtttgatgatgaagatgtttagtactacatcctgatgaagatgttctgcatgcacatgtact

SEQ ID NO: 2222 - DNA, 1765 bp, Zea Mays
ttttattccctgttgtttttcaggtcatagttttgtgctgctgatgatggtgttaagtgccggtgggctcggccttcttataagtctaaagcatgggtgagcagtgagctgctgccgtaactccaaagctgacaagttttctgtgctgtccaccaagattgtagcatgtagatgagatgtagaggagctagtagcggctaccattacggcaataaagagcccgtaggaaaagcggagggggcagcgagcgggtgctgcataacctgcattcagtctcagggtaccattgcatcccactcggctccacctcgcggcccatatttgatatttcggctatggcaggtcattgcgccgtcgtcgtcgtcgttcgcaagcagcaaccaggcagctccgggctccggccatggcatcaccaccaaggaatgtcggtaccaggactaccagcaacccggagatcccagagttcctggtgggcccggctggccggccggtgccggccgtggggctcggcacggcatcgttcccgttcgtggaggaaaacgtcaggaccgccgtcctcgcggcactggagctcggataccgccacctcgataccgcttcgctctaccgctccgaacgtgccgtcggcgacgccgtggccgaggcagcgcggcgcgggatcgtggcgtccagggaggaggtgttcgtgacgaccaagatgtggtgctcgcagtgccacccggatctcgtgctaccttccctcaaggagagcttgcagaaccttcaaatggattatgttgatttgtacctggttcattggccgatagctgcaaagcccggcaagccacagttcccgtttaaaagggaggacatcatgcccatggacctaataggtgtatggcgggcaatggaggaatgccaccggcttggccttgctaggatgattggtgtcagcaatttcacaacaaagaagctccaagagctactggccattgctaaaatccccccgtcagtaaatcaggttgaaatgaatccaatttggcagcagaaaaggttagctgagttctgcaaagacaaaggtattcatttgactgcctattctccgctagcaggccaaagcacgtctaaggtcaatccagtaatgcagtctgaggttctgcaagaggttgcaaaggctagaggaaagtcagtggctcagatttcgctgaggtggatctacgagcaaggcgctagcgtggttgtcaagagtttcggaagggataggctcaaggagaacgtggaaatcttcgattgggaactgaccaatgaagacaggcgtaagattagtcagatacctcagcacaagagggtcacagtgttggggatcctcagcccagacggcgtctccagcgtggatcttgctgagcttgatattgttgaaatgtagcagaaatctccatctatcaggttgcaaggacaaaaaatggtgattggagtagctttcatacggctacgttgaatcagttgcttagatacggccatattgaatcaagaattagaagtagaggacgatctctctacttgtcgtccggacctcattttcttaaaatgtattttcaggtgtctgaccttgtcctgaaatgccatccaggccattactttttagaatgccatttttagatctgtttgatctagcttaaataagttactaggcaaacaaacaatacacattattagatagattatataatatagatacctatattataataatccataatcaacttattaaatgcttatataattt

SEQ ID NO: 2223 - DNA, 2541 bp, Zea Mays
tttattccctgttgtttttcaggtcatagttttgtgctgctgatgatggtgttaagtgccggtgggctcggccttcttataagtctaaagcatgggtgagcagtgagctgctgccgtaactccaaagctgacaagttttctgtgctgtccaccaagattgtagcatgtagatgagatgtagaggagctagtagcggctaccattacggcaataaagagcccgtaggaaaagcggagggggcagcgagcgggtgctgcataacctgcattcagtctcagggtaccattgcatcccactcggctccacctcgcggcccatatttgatatttcggctatggcaggtcattgcgccgtcgtcgtcgtcgttcgcaagcagcaaccaggcagctccgggctccggccatggcatcaccaccaaggaatgtcggtaccaggactaccagcaacccggagatcccagagttcctggtgggcccggctggccggccggtgccggccgtggggctcggcacggcatcgttcccgttcgtggaggaaaacgtcaggaccgccgtcctcgcggcactggagctcggataccgccacctcgataccgcttcgctctaccgctccgaacgtgccgtcggcgacgccgtggccgaggcagcgcggcgcgggatcgtggcgtccagggaggaggtgttcgtgacgaccaagatgtggtgctcgcagtgccacccggatctcgtgctaccttccctcaaggagagcttgcagtaagcgcttgttgagcttaacttttttgctgcttctttttatttgctttcaaataggatggtaacgctctgcggttcaaatttcggttcttgaaaggactagcaacaacaattagatctgaatcttagaaactaaatgcttcgatttcagtctgccagttttgcatttgcagtagctccaagtaccaaatacactaaaatcagtgtttttttgtggcaatcaaggttcttatctcttcatctgtaggaaccttcaaatggattatgttgatttgtacctggttcattggccgatagctgcaaagcccggcaagccacagttcccgtttaaaagggaggacatcatgcccatggacctaataggtgtatggcgggcaatggaggaatgccaccggcttggccttgctaggatgattggtgtcagcaatttcacaacaaagaagctccaagagctactggccattgctaaaatccccccgtcagtaaatcaggtctgtgcagatcatatgagttaggtggtggcaatggcagtaagccagtaacctcagttagttgtgggtctttcaggttcttgtagtccttttcttaatgattgataagcatgatatactctatataaggccccctttggacattttcacgtttcatgcgtttttgttgtaaaaaacaaactgattcgtataaaatttctatacaaattaccgtgaaatttctactgcgcaaaagaccacaaaaggaagaacaggatgttttactgtatttatttttatcgaacatgcagaatagctgtgtgcctttcttttcatcaaagaagaaagagtgtcacatggatattaatattccatatgaatatagaacattagaacttgaaggttttttaatatgtaaatagtcatcattgaacgaaaagtgggtgttttaggggataattgtttcaaattaaaaataactttgtatattgtatatcctcaagtatacctacaccatacactgacatgtgagataaccttggcttgagcaggttgaaatgaatccaatttggcagcagaaaaggttagctgagttctgcaaagacaaaggtattcatttgactgcctattctccgctagcaggccaaagcacgtctaaggtcaatccagtaatgcagtctgaggttctgcaagaggttgcaaaggctagaggaaagtcagtggctcagatttcgctgaggtggatctacgagcaaggcgctagcgtggttgtcaagagtttcggaagggataggctcaaggagaacgtggaaatcttcgattgggaactgaccaatgaagacaggcgtaagattagtcagatacctcagcacaagagggtcacagtgttggggatcctcagcccagacggcgtctccagcgtggatcttgctgagcttgatattgttgaaatgtagcagaaatctccatctatcaggttgcaaggacaaaaaatggtgattggagtagctttcatacggctacgttgaatcagttgcttagatacggccatattgaatcaagaattagaagtagaggacgatctctctacttgtcgtccggacctcattttcttaaaatgtattttcaggtgtctgaccttgtcctgaaatgccatccaggccattactttttagaatgccatttttagatctgtttgatctagcttaaataagttactaggcaaacaaacaatacacattattagatagattatataatatagatacctatattataataatccataatcaacttattaaatgcttatataattt

SEQ ID NO: 2224 - DNA, 1034 bp, Zea Mays
gcaacgcgcgatcgccttggtgcattggacaagtggagtgctttcgaacctgaatttcctattatagcagcagcaaaagctttggggatgttgaaaaggcgacgacaatggttaagaataatccaggtaaccaagtggttgatgagcaaaggacagactcatacccgctcagtgcccaagaggttgttctctcggatgatcttgatctacgacattcaccagcgcccagataaagttttggagatattcgcggatatggaggagttaggtgtgcgtccggacgaggatacagcgagacggatcggaaaggcattcgtggcttctggccaagaagaaaaggagaagcatgtcctcgagaaatacttgaagaagtggaagtacatccatttcaacggcgagcgcgttcgcgtgcggagggacggaccattggcgtagtgcccgttttctgaaaaatgctcgaacctatcagagtatcgtgccggtaggcggtagggcaggggagatgctgttactgccgctgtgacagtcaggcacatggatatcggcactagtccctatcctatgtatgtggaatggaacggaaactggagattggttccatggctctagcctgtggaggagacgagcggatggggggtggctggctactaccggcgagatagtgatttaataggcactacataggcgtccagtgattgcgatggctttaacttgcgtatgtgtctgcggaatggtcccgtgctatttcggtgacttgtgcttgtggaattgtgaacacccactggaaagtgtatatcatgagagggacgatacctgacgtctgggcccatggcttgctgatttcacgcaacgaaccattttctgtttgttgcggtgccccggggttcacgtacttgttctgttcttgtgatctggcacagagctgttggcttatccatttctatgcccatccttcttcagcaaatgatcatgtgagttgcgttccgtttgttctgtctggcactcaacccacatggtgcgtgtcagtgtttggc

SEQ ID NO: 2225 - DNA, 2168 bp, Zea Mays
caaacgttatggacagactccaccggtggctctgctggtatgaatggagaattgaagtgatatgatatccttttaggtttgatgaaaagattgatcaaggaccgagcttcagatttaaaagttttaatcacctctgcgactcttgacggtttaaaagtttcaaagttcttctcaggatgccctgtgttaaacattcctggaactttattccctgtggagaaattttacagcactgatcgcccaacaaattatatagaatcttcactcagaacagctatagaaaatgattgttgtcagatatccatgccaaggaacctcctggagatgtcttaatatttatgacaggaaaggatgatattgacaagatggtatcaaaattggaggaaagaattcgaaatcttgaggagggctcctgcatcgatgctcttgtccttcctcttcatggttctttgccacctgagctgcaggttagagtatttgctccagcacctccaaactgccgacgcttcattgttgcaacaaatgttgctgaaacttcgctgactgtagatggtgtcgtgtaagaagcaaacacaatcagttcgtgattgattgtggttatgtaaagcagcgccaatacaatccatcaagtggaatgtattcacttgatgttgtccaaatcagcaggctgatcagcgagcagggcgagctggtagaactcggcccggcaagtgctataggctatacccaatttccatatatcagaatgagtttcttgaggcaacagtccctgaaattcaacgctcttctcttgctggaagtgttctgtatctgaaatcgttaaatcttccagacatcaacatactgaagtttgattttctagatccaccatcacgtaagataaaacttcagattctttattcttatagtttcaatcattcttgtggacctgtctgtatgcacctatttgttgcctagttacttattttgtttggagttcgatggctaatttctttttttctcgaacacgcaggagagctacgtatcattatattaaaagaagaaataaacaaggtctaaaatagaccggggtacaattgacgccttacggcagcctgaacgacactaacatagactgacttatctatataactctaggctacatgagagagggaagcaacaagggaggtcaaccccttggccccggcagtctcccacagacggcgctcatccccaacatggattaggaaattagcaatattaggggaaaggccatcaaagatgcatctgttccggtgattccacaaaatttcaactgactgttttctgaagcattgcaaaattatgttattactatgaagtccagtgaagaaactacttttgtgatgactactcatgtcacttttgaattgttacacgtggttaggggaggaaacctcttggaggttgtagttctgatgggtggtatggtagggtgatgggctttgttgctggcaactcgtgatggtttttccagccttggtgaacattggcagtggctacagcttgggcaggggctggtggcagcgcaaaggagagtgagagggaactttaaggcaaaaacacttttctggttaatccatatggatacatccaaaagatgttatatatatgatccacccttcttaattcaattcaagctttcgccacaaagctctcttattctctaatactgataactttttggcggccccgaattggaggggtatggaggttgcagcatgctagccgtaccctctggttgctgcaacatgtagatgtaggtggtggctactgcctcttgggttcagctgggctgcttggcccatgggcattatgccaaaaacataaatgtgtaaaagtgtacttacagaagacataaatggccaaaagggggagctatttggtgccttgaaataaataaaataaaaaatatgttctttggcttctgcctactatttaaaatttacaaatgatttgcaggtgagtcattagaagatgctttgaggcaattatacctcattgatgcaattgatgaaaacggacaaataacggatgttggacgagttatggcaggaatatgctacaagttcttatagcacaatggaatcgtgaatcgtagctgacacctgacagactatgacaatcgaagtgtttggtgggattttcac

SEQ ID NO: 2226 - DNA, 3930 bp, Zea Mays
atgtctattgtgccttgtgatgtgtgtgtctgtgaattctcaatggatcgtgacccatgggcaaaattccgacgcccaaacagtgagcacccagcccaatcagaggagacacgcacgcaccagcaccctggtgtggccggtgcccggcggccaaacgcgatgccatctccgtctccagccccgccgccagtgctgccgatctcggagcacgaggacgagatagtcgccgcggtggacgcgaacccagtggtggtggtcatcggcgagactggctccggcaagagcactcagctctcccagatcctccaccgccgcggatacacccgtcggggtgccatcgctgtcacccagccccgccgcgttgctgcggtttccgtttccagaagagtagctcaagagcttggtgttccacttggggatgaagttggttatgcaattcgatttgaggacagaacttcagaaagaacatgcataaaatacctcacagacggcattcttctccgtgaaagcctttcaaatcctgagttgaagcagtactcagtaatcatactggatgaagctcacgagcgtagcttaaacactgatatccttttaggtttgatgaaaagattgatcaaggaccgagcttcagatttaaaagttttaatcacctctgcgactcttgacggtttaaaagtttcaaagttcttctcaggatgccctgtgttaaacattcctggaactttattccctgtggagaaattttacagcactgatcgcccaacaaattatatagaatcttcactcagaacagctatagatatccatgccaaggaacctcctggagatgtcttaatatttatgacaggaaaggatgatattgacaagatggtatcaaaattggaggaaagaattcgaaatcttgaggagggctcctgcatcgatgctcttgtccttcctcttcatggttctttgccacctgagctgcaggttagagtatttgctccagcacctccaaactgccgacgcttcattgttgcaacaaatgttgctgaaacttcgctgactgtagatggtgtcgtgttcgtgattgattgtggttatgtaaagcagcgccaatacaatccatcaagtggaatgtattcacttgatgttgtccaaatcagcagagtgcaggctgatcagcgagcagggcgagctggtagaactcggcccggcaagtgctataggctatacccaatttccatatatcagaatgagtttcttgaggcaacagtccctgaaattcaacgctcttctcttgctggaagtgttctgtatctgaaatcgttaaatcttccagacatcaacatactgaagtttgattttctagatccaccatcacgtaagataaaacttcagattctttattcttatagtttcaatcattcttgtggacctgtctgtatgcacctatttgttgcctagttacttattttgtttggagttcgatggctaatttctttttttctcgaacacgcaggagagctacgtatcattatattaaaagaagaaataaacaaggtctaaaatagaccggggtacaattgacgccttacggcagcctgaacgacactaacatagactgacttatctatataactctaggctacatgagagagggaagcaacaagggaggtcaaccccttggccccggcagtctcccacagacggcgctcatccccaacatggattaggaaattagcaatattaggggaaaggccatcaaagatgcatctgttccggtgattccacaaaatttcaactgactgttttctgaagcattgcaaaattatgttattactatgaagtccagtgaagaaactacttttgtgatgactactcatgtcacttttgaattgttacacgtggttaggggaggaaacctcttggaggttgtagttctgatgggtggtatggtagggtgatgggctttgttgctggcaactcgtgatggtttttccagccttggtgaacattggcagtggctacagcttgggcaggggctggtggcagcgcaaaggagagtgagagggaactttaaggcaaaaacacttttctggttaatccatatggatacatccaaaagatgttatatatatgatccacccttcttaattcaattcaagctttcgccacaaagctctcttattctctaatactgataactttttggcggccccgaattggaggggtatggaggttgcagcatgctagccgtaccctctggttgctgcaacatgtagatgtaggtggtggctactgcctcttgggttcagctgggctgcttggcccatgggcattatgccaaaaacataaatgtgtaaaagtgtacttacagaagacataaatggccaaaagggggagctatttggtgccttgaaataaataaaataaaaaatatgttctttggcttctgcctactatttaaaatttacaaatgatttgcaggtgagtcattagaagatgctttgaggcaattatacctcattgatgcaattgatgaaaacggacaaataacggatgttggacgagttatggcagagcttcctcttgagccgtctctttcaaggactttgattgaagcaaatgaattgggatgcctatctcaggcgttaactgttgcatcgattttgtcagcagaaataacattgcgatcagttagcaaggacgtggtggatggaaagaggaaaaggcaggagctccctgatgggtctggctggggtgaccatatacaattgcttcagatatttgaaagctgggaccaaactggctatgacacaaaatggtgctctcatcatgatttgcaggtgcggggtatgaaattgagcaaagatgtgaggaaccaactatgtcagattattcaaaaaattgcaaaaggttcaactgatgtggatgcaaggaaaagccggaagaatgaccctgattatagaaagctgaggagagctctctgcgtaggatatggtaaccagctagctgagaggatgctgcatcacaatggctaccatactgttggctataggacccaacttgtacaggtgcatccatcttctgtactggaaggcgatgagtatggaaagtttccaatgtacgttatttatcatgagctgataagtacaactcgtccatacatgagaaatgtctgcgccgtcgagcaagcctgggttcagcctatattaaagaagctcgacaaattagacataaacagattaagtggtggttcgagtgcaccgggagattctgaacttctgggagacaataagcaagtgaactcgtcaaagaatgacgtgggtgtaaaacaatcagaggtggacagtaaaatccaggcagctcgagagcggtaccttgcacgaaaaggcaagaaatgacaatcgacacgtttaactgatcgctcagcatccttctggtcagcctgaagcttctctgaagatcataccgaggaaccattcgtgttattgtgggtggtgtatgcttcaacgtgcacaaacaagagaatttcttatgtaatcttttgtttgaggactctaaccttttcttttatttggcattactgtgatgtgaccttttccttgggccgaaatattttacaggcttttctgcatgggctagattcttttcccccatattcctatatggtgttgtctgttgaggtcttgtccctcctgcctagcatatgttgagtcccaagcaaggcaacaccgcaatatgatgcgatcttggaagtgatactgatatgcgctctgcttgggtttctctaacaaattttagagtcccgctctccctccctccgttccaaaatataatttgttttagattaattacacattcattaagtaacatatgaatataatttgtatgtatattcattatcatttgaatgaatgtggacaaaaaaaagtgggctagaaggaa

SEQ ID NO: 2227 - DNA, 4171 bp, Zea Mays
tggtctatccttagttggtccgaccttttaagaaacaaaaggtaactgtatgaccagcgcagaagaaaataggatctagatgatgattgagagagaaacgtttcagggggaaaaaatccaatcaattaaaaattagacctgggaacattggcagatcgatctagagggtggacaaggtgggctgattttgatcctgctaaattatatagatagttttgatttatttgctacttttgattctcatacgttgtagaacttaaaatgtgaactcatttgtttattgattctcataaggttggaccaccttaactttaaatcctagatttgccactgggaagtgaccgagagaaaactatctgtgccacttagtggtttgataaactatgttgtgataccaagttaccaacgttttgaaatcaataaatgttgtggcagccattcagggacatgattgaagggatgaggagtgatcttaggaagacaaggtataacaacttcgacgagctctacatgtactgctactatgttgctggaactgtcgggttaatgagcgtacctgtgatgggcatcgcaaccgagtctaaagcaacaactgaaagcgtatacagtgctgccttggctctgggaattgcgaaccaactcacgaacatactccgggatgttggagaggatgctagaagaggaaggatatatttaccacaagatgagcttgcacaggcagggctctctgatgaggacatcttcaaaggggtcgtcacgaaccggtggagaaacttcatgaagaggcagatcaagagggccaggatgttttttgaggaggcagagagaggggtaactgagctctcacaggctagcagatggccagtatgggcttccctgttgttgtacaggcagatcctggatgagatcgaagccaacgactacaacaacttcacgaagagggcgtatgttggtaaagggaagaagttgctagcacttcctgtggcatatggaaaatcgctactgctcccatgttcattgagaaatggccagacctagccaccagagaagctgcaatgcaaggttcaggttaggctagatagaaagttaaatggggcaacatcaggaggccttgatgaaaaacagacaacctggtgaattgttgttgggatcaggcacagaacagataagagccgcgcagccaacctagggcatgtttggtttcaattagttctaggactaaactttagtcctaggactaaactttagtccctatatgtttggttctagggactaaatagattctaaagtcattaaatacattgtccaaagactcaaatacccttagaatatactcatgatattagttatctataaaaaggtaagggcaacatgataattatgagcttttagtctcttttagcacctatgtgaaggactaaagactaaatcattttagtccatattttagtcctagtgtttggcaaaaaagggactaaaagggactaaaaactagagactaatctttagtccctctaaccaaacacccccctagatggatacggaacattcgcctcttattcggagcaatatatgtctctcaaggaaagagcccaacatgtatactgccttctttttctcatcccagatttgggggaaaaacaatgtaaatgccaatggtatcgtaggaagattactagaagtaaatgccaatgtaaaaacagatgagttggcatttacatgataggatggtgggatcatcagactgaaaatgataggggattgtgctcccctgcgactccaactattaaacaaggaatccgtcagcagtagctaactgtgtgtatgtgagaagaggcattcgagggggagggtccacgagatagggtaggaaactgacctcgattccataggtccgtccaacacggcgcgccccgtggaggagctggccaacgctaatggtacggccgtcactcgtcggcgaaagcaataagcgcgtggcggcgtggggcgtggcgaggccgatcgccgcactcgcctcactcgaatggcggcgattacggaggcggattggcttcgtgttcaactgttcgttcgtggtgggacgactccggtccggtggcggcagcgcggaggttccagccgcgctcccgcctgcacgccgcacgcacgtaaatagttagtctgggccttgaaaaggtcgtgaattgagttggttgggcctgctagcaggtggaggaaggtccggagtttgcgcgcggcctctccttggaaaatggaaatggacacggccggacatgggcatggacatggagatggaaatggatggtaatcaggtccgtgtaggtcgcatgcaagctgggcgacactgcgtgccgggcgtcctccttcctctgctccttccgatccccctcccggcgtggaggtatagcgtccgccatctcccccggccgaccggatccctcacccctctaggtacgtagctagctaggccaggttatcgtcgattcgatagattcaataagcaaaggcgatcaacaacacaattaatggggggcggcggcggcggcaactcgcgggagctggaccagacgccgacatgggcggtggcgtcggtgtgcggcgtgatcgtgctcatctccatcctgctggagaaagggctccaccacgtgggcgagttcttctcccaccgcaagaagaaggccatggtggaggccctggagaaggtgaaggcggagctcatggtgctgggcttcatctccctcctcctcgtgttcggccagaactacatcgtcaaggtgtgcatcagcaaccacgccgccaacactatgctcccctgcaagctcaaggaggccgccgtccctggcaagaagaaggccgccgcagcagcagagcatctcgggggcgtgctggactggccgccgccctactacgcgcacaacggcaggatgctggcggaggcgagcatggcgaccaagtgccccgaggggaaggtgtcgctcatctccatcaacgccttgcaccagctgcacatcttcatcttcttcctcgccgtcttccacgtctcctacagcgccatcaccatggcgctcggcagggccaagatacgcgcgtggaaggagtgggagaaggaagcagcagggcaggactacgagttctctaacgaccctacgcggttcaggttcacccacgagacttcgtttgtgaggcagcatatgaatgtgctcaacaagttcccagcatccttctacatcagcaacttcttccggcagttcttcaggtccgtcaggcgggcagactactgcgcgctgcgccacagctttgtcaacgtccatctggcccctggcaccaagtttgatttccaaaagtacatcaagcggtctctggaggacgacttcaaggtgatcgtggggatcagccctcctttgtgggcttctgctctcatcttcctattcctcaatgtcaatggatggcacaccatgctctggatctccatcatgccggtggtgatcatcctgtccgtggggacgaagctgcagggcatcatctgccgcatggcgatcgacatcacggagcggcacgccgtgatccagggcatcccgctggtgcaggtcagcgactcctacttctggttcgcacgcccaaccttcgtgctcttcctcatccacttcaccctcttccagaatggcttccagatcatctacttcctctggattctgtatgagtacgggatggactcgtgcttcaacgactccgaagaattcgtctttgcacgtctctgccttggggtggttgttcaggtgctgtgcagctacgtgacgctccctctgtacgcgctcgtctcccagatgggctccaccatgaagcagtccatcttcgacgagcagacctccaaggcgctcaagaactggcgcgccggcgccaagaagaaggcccccaccggctccaagcacggcggcggctccccaaccgccgccggcagccccaccaaggccgacggcgacgcgtaggcgtagctagcagagggtcatcgatcgattgatcgatcgatccagctgttcgttctacatataacctgttacttatttgtatgtaattgtaccaatagcaatcgacacgcgtgcgccgcatgcaatgtaccatgaaactgctgatagctagagagcgacatttttcttgtttggttcgtttc

SEQ ID NO: 2228 - DNA, 4444 bp, Zea Mays
gctccttgctgttctgctgactggtctcaccatctcatcccaccaccaccaccaccaccaccatctttaggataagatagcaaatatatggccatcatactcgtacgagcagcgtcgccggggctctccgccgccgacagcatcagccaccaggggactctccagtgctccaccctgctcaagacgaagaggccggcggcgcgccggtggatgccctgctcgctccttggcctccacccgtgggaggctggccgtccctcccccgccgtctactccagcctcgccgtcaacccggcgggagaggccgtcgtctcgtccgagcagaaggtctacgacgtcgtgctcaagcaggccgcattgctcaaacgccagctgcgcacgccggtcctcgacgccaggccccaggacatggacatgccacgcaacgggctcaaggaagcctacgaccgctgcggcgagatctgtgaggagtatgccaagacgttttacctcggaactatgttgatgacagaggagcggcgccgcgccatatgggccatctatgtgtggtgtaggaggacagatgagcttgtagatgggccaaacgccaactacattacaccaacagctttggaccggtgggagaagagacttgaggatctgttcacgggacgtccttacgacatgcttgatgccgctctctctgataccatctcaaggttccccatagacattcagccattcagggacatgattgaagggatgaggagtgatcttaggaagacaaggtataacaacttcgacgagctctacatgtactgctactatgttgctggaactgtcgggttaatgagcgtacctgtgatgggcatcgcaaccgagtctaaagcaacaactgaaagcgtatacagtgctgccttggctctgggaattgcgaaccaactcacgaacatactccgggatgttggagaggaaggaaggatatatttaccacaagatgagcttgcacaggcagggctctctgatgaggacatcttcaaaggggtcgtcacgaaccggtggagaaacttcatgaagaggcagatcaagagggccaggatgttttttgaggaggcagagagaggggtaactgagctctcacaggctagcagatggccagtatgggcttccctgttgttgtacaggcagatcctggatgagatcgaagccaacgactacaacaacttcacgaagagggcgtatgttggtaaagggaagaagttgctagcacttcctgtggcatatggaaaatcgctactgctcccatgttcattgagaaatggccagacctagccaccagagaagctgcaatgcaaggttcaggttaggctagatagaaagttaaatggggcaacatcaggaggccttgatgaaaaacagacaacctggtgaattgttgttgggatcaggcacagaacagataagagccgcgcagccaacctagggcatgtttggtttcaattagttctaggactaaactttagtcctaggactaaactttagtccctatatgtttggttctagggactaaatagattctaaagtcattaaatacattgtccaaagactcaaatacccttagaatatactcatgatattagttatctataaaaaggtaagggcaacatgataattatgagcttttagtctcttttagcacctatgtgaaggactaaagactaaatcattttagtccatattttagtcctagtgtttggcaaaaaagggactaaaagggactaaaaactagagactaatctttagtccctctaaccaaacacccccctagatggatacggaacattcgcctcttattcggagcaatatatgtctctcaaggaaagagcccaacatgtatactgccttctttttctcatcccagatttgggggaaaaacaatgtaaatgccaatggtatcgtaggaagattactagaagtaaatgccaatgtaaaaacagatgagttggcatttacatgataggatggtgggatcatcagactgaaaatgataggggattgtgctcccctgcgactccaactattaaacaaggaatccgtcagcagtagctaactgtgtgtatgtgagaagaggcattcgagggggagggtccacgagatagggtaggaaactgacctcgattccataggtccgtccaacacggcgcgccccgtggaggagctggccaacgctaatggtacggccgtcactcgtcggcgaaagcaataagcgcgtggcggcgtggggcgtggcgaggccgatcgccgcactcgcctcactcgaatggcggcgattacggaggcggattggcttcgtgttcaactgttcgttcgtggtgggacgactccggtccggtggcggcagcgcggaggttccagccgcgctcccgcctgcacgccgcacgcacgtaaatagttagtctgggccttgaaaaggtcgtgaattgagttggttgggcctgctagcaggtggaggaaggtccggagtttgcgcgcggcctctccttggaaaatggaaatggacacggccggacatgggcatggacatggagatggaaatggatggtaatcaggtccgtgtaggtcgcatgcaagctgggcgacactgcgtgccgggcgtcctccttcctctgctccttccgatccccctcccggcgtggaggtatagcgtccgccatctcccccggccgaccggatccctcacccctctaggtacgtagctagctaggccaggttatcgtcgattcgatagattcaataagcaaaggcgatcaacaacacaattaatggggggcggcggcggcggcaactcgcgggagctggaccagacgccgacatgggcggtggcgtcggtgtgcggcgtgatcgtgctcatctccatcctgctggagaaagggctccaccacgtgggcgagttcttctcccaccgcaagaagaaggccatggtggaggccctggagaaggtgaaggcggagctcatggtgctgggcttcatctccctcctcctcgtgttcggccagaactacatcgtcaaggtgtgcatcagcaaccacgccgccaacactatgctcccctgcaagctcaaggaggccgccgtccctggcaagaagaaggccgccgcagcagcagagcatctcgggggcgtgctggactggccgccgccctactacgcgcacaacggcaggatgctggcggaggcgagcatggcgaccaagtgccccgaggggaaggtgtcgctcatctccatcaacgccttgcaccagctgcacatcttcatcttcttcctcgccgtcttccacgtctcctacagcgccatcaccatggcgctcggcagggccaagatacgcgcgtggaaggagtgggagaaggaagcagcagggcaggactacgagttctctaacgaccctacgcggttcaggttcacccacgagacttcgtttgtgaggcagcatatgaatgtgctcaacaagttcccagcatccttctacatcagcaacttcttccggcagttcttcaggtccgtcaggcgggcagactactgcgcgctgcgccacagctttgtcaacgtccatctggcccctggcaccaagtttgatttccaaaagtacatcaagcggtctctggaggacgacttcaaggtgatcgtggggatcagccctcctttgtgggcttctgctctcatcttcctattcctcaatgtcaatggatggcacaccatgctctggatctccatcatgccggtggtgatcatcctgtccgtggggacgaagctgcagggcatcatctgccgcatggcgatcgacatcacggagcggcacgccgtgatccagggcatcccgctggtgcaggtcagcgactcctacttctggttcgcacgcccaaccttcgtgctcttcctcatccacttcaccctcttccagaatggcttccagatcatctacttcctctggattctgtatgagtacgggatggactcgtgcttcaacgactccgaagaattcgtctttgcacgtctctgccttggggtggttgttcaggtgctgtgcagctacgtgacgctccctctgtacgcgctcgtctcccagatgggctccaccatgaagcagtccatcttcgacgagcagacctccaaggcgctcaagaactggcgcgccggcgccaagaagaaggcccccaccggctccaagcacggcggcggctccccaaccgccgccggcagccccaccaaggccgacggcgacgcgtaggcgtagctagcagagggtcatcgatcgattgatcgatcgatccagctgttcgttctacatataacctgttacttatttgtatgtaattgtaccaatagcaatcgacacgcgtgcgccgcatgcaatgtaccatgaaactgctgatagctagagagcgacatttttcttgtttggttcgtttc

SEQ ID NO: 2229 - DNA, 1493 bp, Zea Mays
caaaactgtttgctagttttctggtagcaaatggtgatccaaaacatcccattaattggtattaatgaatgatttggtcagatcttcccatttcataaaacggctctgaatgataagttttaacaggtatgcaattgataatatgcaatctgctagcatggaggaagccaagaaaaatggtatccagcagctagctgaagaaacaactctggtgcagtttatatttgggggttatctgcgatctaagataaaatgtacgaagtgtcaggtcatttcaaaacacagtgagcgtattttggatttaactgttgaaatagatggggatatcagtacccttgatggtgcacttcgtcggtttacatcttcagaaattttagacggtgataataggtaccattgtagcagatgtaattcgtacgagcgtgcccaaaagaagttgactatattagaggccccaaatatattgacaattgcactgaaaagatatcaggtgaaacctgtgtctgtccaaaaagtcctgtcaagatgtgcatacatgctgctctatgcaagatgttcaccgcgtgccccaacctctgcacgcgctaagaaacccaagcagatggcacgttcaggatcattcccttcgggaggaggcaggtaccggagcaggcaccaaggtgggcaactgtctaaggacgatgcggtccacaaccttacatacacattgggtacatctgacacgtcatcgtacccggtagcaccctgctttagcggaagcaacagctcctcgctgttcagcagctctgatgcagggtcaagctgcactttcagcagcgacagcactgacagtgccgggaaatccagcatggagtatgaccgcatttttggaacctcgggctatatgtgcccggtggtaagctcagcggttgtgcccgagggagacaatcagagttacttgcggcaagggtctagctggaaccctagctcttcgggtcatgacatggatgaggcaggtaagtttgcgcggcagtaccagggagggtatcaggctggcggaggggctcccgtaggcggttgggagaccccatccttctcttacgccgatcaaggtgggctttatccaatctgggaggagcagatggagagttatgaagcaatgtactagctagagagctggagcctggaggcctaccgtacgtcgtcagggtcgaacggttggttgaagaagaaaacttgaagagaactgaatccctcgataaacatacttacatatatatataccaaaaaactcaggtgcagaataatgctcagactgatgagcgcgagacgttttgatgacatgcccgtggtgctttctttttctctttgtttctctctctctctctgatggtgcatggcaagatactggttgctgttgctggctgtaaaactttttttgtggaggaagcggaagttaacttttgaccgtgacagcagctgaggtctgtgattctatgtcgtgaatgattcgt

SEQ ID NO: 2230 - DNA, 2376 bp, Zea Mays
ctattttatactgttcgtagagtgaaatttggtaaaattagtacaggagaggagtgagggagaaaaagaaaagaaacctaacatctgatgtggagacaaacccctcgccaaacctccattcacggaccacattaacgttagttattattagcctattatagaggaggattacagctcatcattggtgagtggaaaaacgattaggaaagcaggagaaggggagtggcggagtgcatagcaattagcaacatcatccagcggacagcattcctaaccctcctttctatctcacccgtttcttctctgcaagtagtactatttctccgtcatactgaagctctgctgtgtgtgcgcgcgcgcgttggaggaaggaggaagtaagcctaggaaagccatcgcccaccttctcgctacccaccaaacgccgcttggtaggagaagaattgcccgaaaagcttcccgttggccgggatctcttcttctttaattacccctggggattgcctggctcattagaccagacagggggagagagggagcgagctggccggctaggccaggagaggagaggggagacacagacaacgagcgctcgctgggaagaggaagaggttcgtggggacgcagggatccagaggaagatgaggcggtgggtcttagccatcgccattcccattctcgccgctgcttcggcggcggcgctgttccttggggctgaggcccaggcggtccagcagggccaccagacagagaggatctcaggaagtgctggtgacgtgttggaagataaccctgttgggaggctcaaggtttacgtgtatgatctccccagtaaatacaacaagaagctggtgaagaaggatcctaggtgcctgaaccacatgtttgctgctgagatcttcatgcaccggttcctgttgtcaagtgctgtccgaacatttaatcctgaagaagcagattggttctacactcccgtatacgccacatgtgatctgactccttcgggtcttccccttcccttcaaatctccacgcatgatgcgcagcgcaattgagctgattgccacgaactggccttactggaacagatcagagggtgcagatcatttctttgtcacgccacatgactttggtgcttgcttccattatcaggaagagaaagcaatcgggcggggaatccttcccttgcttcagcgtgctacactggttcagacctttggacagaagaaccatgtctgcctgaagggcgggtccatcacaatcccaccatttgcacctccccagaaaatgcaggctcaccttatccccttggacacccctcggtctatcttcgtgtacttccgtggtctgttctacgacaccagcaacgatcctgagggtggttactatgcgagaggtgctcgtgcatcagtctgggagaacttcaagaacaacccgctcttcgacatctcgactgatcacccaccgacttactacgaagacatgcagcgttcagtgttctgcctgtgccccttgggctgggctccatggagccccaggctggtggaagctgtggttttcggctgcatcccggtgatcatcgccgacgacattgtcctgccctttgcggacgccatcccgtgggaggagattggtgtgtttgtcgccgaggaggatgtcccgaagctggacagcatcctgacgtccatcccaacagatgttatactgaggaagcagcgtctcctcgcgaacccggccatgaagcaggccatgctgttcccccagcctgctcaggcgggagatgcattccaccagatcctaaacgggctcgcgcgcaagctcccacatggtgacaacgtcttcttgaagcccggggagagggtcctgaactggaccgccggaccgccaggcgacctgaagccttggtagcatctgcctgcctagaacctttttgtgaaaaaaagcaagaacgagaacatggtgatatacatacatgcgcctttaagttaccatggttgtgtacttgtatagtgctgcattttgccctcctgatcgagctgacaattgccatatatacagcacatggaccgccatctttcatcatctaatgcaaagtctttgtctgaatgttgctgagttctcaaggaactgacgcgagcacataatcaacatcagcacgttcctttttttattttgtggcccaggaggtgtacgagctaacaatttgaaatggccaggttgtaggagctgtatttttttatatgttctgtctttaaaaaaaatctcagtttttttgggtataaaacttaggatcggagcatgatggtggcagtgtggaggtgtggcagactgaccaaaaactggaacttgcaaaacagtattttctgaaataaaattg

SEQ ID NO: 2231 - DNA, 1629 bp, Zea Mays
agcagccactttgctaagatcacattccaaggcaatgccagagtatacttgtactgcatgttataagtaacagcaggattatttggggatggactactttgatgcaaggcggaagcctcataatgttggtaaaatcattgcagccctggtcctcacaacactctgtatatttgttctgaagcaatctcctggttttggtggcaatagtgtgttttctcgccatgaacatggggttacccacgtcttagtaacaggaggagctggttatattggttcacatgctgctttaaggctcttaaaggataactatcgagttactatcgtggataatctatctagaggaaacatgggagcagtaaaggttctgcagggcttatttccgcagcctgggagactacaattcatctttgctgatctggggaaccagaaatctgtcaacaagatatttgctgaaaatgcatttgatgctgtgatgcactttgcagctgttgcttatgtgggagagagcacattggaaccccttaggtactatcacaatattacatcgaacacactactgattttggaggctatggcatctcatggagtccaaacccttatttactccagtacatgtgctacctacggagaaccagataagatgcctattacagaagccacacctcagttccctatcaatccatatggaaaagctaagaaaatggcagaggatatcataatagatttctcaaactcaaagggagctgacatggctgtcatgattttaaggttagaaccttttcttcagttgcatagatatttcaatgttattggatctgaccctgagggaagattaggtgaggctcctaggccagaacttcgagagcatggtcggatatctggggcttgctttgatgcagcattaggagtcattccaggattaaaggttaaaggaacagattatcccacagctgatggaacctgcataagagattatattgatgtcacagatttagttgatgctcatgtgaaagcactcaacaaggcagagcctagaaaagtcggcatttacaatgttggaacaggaagaggtcgctcagttaatgagtttgttgatgcctgcaagaaggcaactggggtcaacatcaaaattgagtacctcaacagaaggccaggagattatgcagaagtatacagcgacccaacaaagataaacaaggagctcaactggacagctcattataccgatctcaaagagagcctatcagtcgcatggaggtggcaaaagtcgcatccgcgtggctacgggccaaactaaatatagcctgctgatctataattcacttaatcgtcaatacatattagttctttagttagagatacaagatcttgctgcgatactcctcaaaatcagtccttcgtattcttctttctctcgtcctttttatttcaaaagtttgcatttttggctagcagaaacatgaatggtgatttggatgaaaaaaaggacctgtgatgacaatttcattgtttctgacacattgttggtaaaaaaaatgtaaattgcttcagccaatgagctgcaagattgattgaattgagttaagaaaaaaacttgtgttgcgatccttgatctccagcagtttttcc

SEQ ID NO: 2232 - DNA, 3353 bp, Zea Mays
ggagtatgataagatacaggtcacaaccggctacgggcctctttgcctggaagagccctgacgatccatcaaccggggacatctcttctggcatggatccggcctcctcaaacgttcaggtgttcatttggaatgggacattgccgtactatcgttcttctttttttaatgatgtcccagcatccggcggcacgtaccaggccaacaatacctcagtcacataccaatggatgatggtcgacacaggggatgagatctactatacgttcacagtcttagccggttctccctacatgcacttctcacttcaccacacaggcaagatgaggctcctggtctgggaaaatagcacatcatcctgggtgctgatttctgaggaacctagtgttggatgtgatctctacgcctcttgtggcccgttcggctactgcgatctcactaaggcaatgccgacatgccagtgccctgatcattttgagctggtcgacagtctcaacttctctagaggatgccagagaaaggaagagctgaaatgcggaacagagagctatttcatgaccatgcctaacatgaagattcctgacaagttcttgcacattagaaatagaaccttcgaccagtgtgcagctgagtgcgccagaaactgcacctgtatggcatacacctatgccactctaagcactgctagcactacgggcgatgcatcgaggtgtttggtctggactcaggatctcattgacatggagaaagcaagtgtttttttagagaacttgtacatccggcttggcgaatctcctgatcagaagaagagaaattttcagaaaattttactctcagctatagcatgtctgctgctacttacaattggtgctcttggttgggcatgtaaaatcagaggcaaatggcacaagaagaaaatccagacgagaatgatgctagaatacttgagttctacggatgaagctgggggaaagaatatagagttcccatttattacctttgaaaacattgtcacagcaacagacaatttctctgactgtaatatacttgggaaagggggttttggcaaagtatacaagggaatgttggaaggaaccaaagaagtagccatcaagagactgagcaagagttctgggcaaggtgccgaagagttcaggaatgaagtaatcttgattgcaaagttgcagcacaagaacctagttaagcttcttggttgctgtgttcatgaagatgagaagctgttagtttatgagtacttgccgaacaaaagcttagattacttcctctttgattctgcaagaaagtcaacgcttcagtggccaacaaggttcaagataatccacggggtagctagaggaattatgtatcttcatcaagactcgagattaacaataatccatagggatctcaaagcaagcaacatcttgttagataaggacatgagcccaaaaatatcagattttggcatggctagaatattcagtagcgaccagctccatgcaaatactaaccgagttgtaggcacatatggttacatgtctcctgaatatgcaatggaaggtgccttttcagtcaagtctgacacttacagctttggtgttttaatgctggagattgtaagtggtttgaagatcagctcaccacatcttcacatggattttcctaatcttagagcatatgcatggaacatgtggaaagaagggaaaatagaagatttggtggactcatcagtcatggagaattgctcccttgatgaagtttcacaatgtgtacatataggactcttgtgtgttcaagacagtccgagcttcaggccactcatgtcggcggttgtgtccatgctggagaacaaaacgacgacacttccaactccaagtcaacctgtatattttgcagttagggacccctaccaacctggaaaggcagttggcaacaaggagttgtctatatatgatatgagtctcactgtgccagaaggtcgttaaatgctttatttttataactgattgggatgattaattaaaccccactggcatattcattgcataactaaaactgatcgttcagcccatgtgaaggttatgtgaatggtcggtaatttgcattttgcaacagtttggtaagcctgcttatataattgtataaagacaggtgatttccttctctcagctcatgtggttgtactgtttatgtgcttattatgtggatccaatttgaccggacagattaatttctgaatgataatgttttcaaaaaaaaatgaatgacggagtagggaccttagatgcttataggttttaatttgtgcaagataaattaaagaaacataattcaccttcttttttgaacatatttatcctttcaaccttcttacatccaatttggactggatctctttacatatatgctcaagttgcagggatgctgattgtagttgtagcttgacttactgattaggaggtccttatcccgccttatatagtcaggggatgaatgtactgatcagtttatagatattatatgaaaagtacatcagatattaaatcatatctcctaatcatatctctataggacttggtcctaatggggtgtttgaatgcactagaggtctagagctaatagttagttggctaaaaaattagtagtgaaattagctagataacaaataactagctaactattagctaatttactaaaaatagctaatatttgaactattatctagactatttggatgacttcaaataattttagcaccagtgcattcaaacatggccaaaatcctctgcatcatgtccggtcatacaccgtggtttagtgagcttctcctggtcatagtgcacaggccacttcatccaagggggtgtttaaatgaactagatctaatagttatttagctaaaaatgactagtagatttagctagctaacaaatagctagctaaatattagttaatttgttaaaaatagataatagctgaactattaggtagactgtttgaatattttcagctaattttagtagctaactattaactctagcgcatttaaacatggcctaaggcaaataaaagagcagcaactaacgttccagatcgaccacttcatctaagacaaagaaacagacacaggccaaaggccgtccgccgcggctcagaatgcgttttgcctagttaaggaaacactgaaatccaagaacggcgccttggcagcgcagccaaacaaagcagcaaaacagggaggagcagaagaagatagaacctggccaagatgcagcaggggcttgaaacttgagaaagccagtggggtgagccagcgcccagcggcgaaatgggggaggcgaccaagaaggccg

SEQ ID NO: 2233 - DNA, 2200 bp, Zea Mays
gacccttttcagttttctccgtgcctcttgctccctcctggctccgcgcctgggccaccgagcccgcgatcggattcgctccctcttcgccgcgccccaccacccatcgccgctggggatccctagggtttagtgcagtcgctcggctccgcgccgtcctcgccgctgctgccaccatgccgctcaggttggagatcaagcggaagttcgctcaacggtcggagagagtcaagtccgtggacttgcaccccacggagccatggatcctgtcgagcctgtactcggggagtgtctgcatctgggattatcaggcacaggcaatggtgaaatcatttgaagtttcagaactgccagtgaggtcggcaaagtttatttcaaggaaacaatgggttgtagctggtgcagacgacatgttcattcgtgtctacaactacaataccatggacaaagttaaagtttttgaggctcatactgattacatcagatgtgttgcggtccatccaactctaccatatgtgctgtcatcatctgatgacatgctaataaaactgtgggactgggataaagggtgggtgtgcactcaaatatttgagggacattcacactatgtgatgcaggttactttcaatccaaaggatattaacacctttgcaagtgcatcccttgaccgcactacaaagatatggagtttgggttctccagatccaaacttcacacttgatgggcatcaaaagggtgtcaactgtgttgactacttcactggtggtgacaggccctatttgattactggttctgatgactccaccgcaaaggtctgggattaccagacgaagagctgtgttcagacacttgaagggcatacacataatatttctgctgtttgtttccatcctgagctccctataatcattactggatctgaagatggtacagttcgtatatggcattcgacaacttacagacttgagaacacactaaactatggccttgagagagtctgggctgttggatacatgaaggggtctagaaggatggtgattggttatgatgaggggaccattatgataaaaatgggccgtgaagtacccatagcaagtatggataccggtgggaaaatcatttgggcgaaacataatgaaatacaaactgtaaatatcaagacagtcggtgcaggttttgaagccacagatggagaaagattacccttggctgtaaaagagttaggaagctgtgatttgtacccacagatggcgagtacataatttatactgccctggcctggaggaatagatcatttgggtctgcactggaatttgtttggtcatcagaaggagaatatgcaattagggaaagtacatcaagaataaagattttcaataaatcgtttcaggagaagaaaactatccgcccttcattttcagcagagcgtatttatggtggggtattgttggcaatgtgttctagtgacttcatctgcttttatgactgggctgattgtagactaatacgccgaatcgatgtgaatgttaagaatgtttactgggctgatagtggtgacctagttgcaatagcaagtgatacatcattctacatcctcaagtacaatagagatattgttgcttcttatctagaaggtggaaagcctgtggacgaagaaggcgttgaagatgcttttgagctgcttcatgagatcaatgagcgagtgagaactggaatttgggttggagactgctttatctataacaactcatcgtggcgcctaaattattgtgttggtggtgaggtcactacaatgtatcatttggatcgccctatgtacttgttgggatatattgcgaaccaaagtcgagtttatcttattgacaaggagttgaatgtcattgggtacacattacttctgagtttgattgagtacaagacccttgtgatgcgtggggatttggatcatgcaaacaaaattttatcatccatacctaaggcgcaatataatagtgttgctcattttttggaatcgagaggtatgttggaagaggctcttgagatagccactgatgctgactacaagtttgacctagctgtgcagcttggaaaattagaagtcgcgaaggctatcgccatagaagcacaaagtgaatctaaatggaagcagttgggcgaacttgccatgtccacaggcaagctcgtgaatgataaccttttg

SEQ ID NO: 2234 - DNA, 3188 bp, Zea Mays
cttttcagttttctccgtgcctcttgctccctcctggctccgcgcctgggccaccgagcccgcgatcggattcgctccctcttcgccgcgccccaccacccatcgccgctggggatccctagggtttagtgcagtcgctcggctccgcgccgtcctcgccgctgctgccaccatgccgctcaggttggagatcaagcggaagttcgctcaacggtcggagagagtcaagtccgtggacttgcaccccacggagccatggatcctgtcgagcctgtactcggggagtgtctgcatctgggattatcaggcacaggcaatggtgaaatcatttgaagtttcagaactgccagtgaggtcggcaaagtttatttcaaggaaacaatgggttgtagctggtgcagacgacatgttcattcgtgtctacaactacaataccatggacaaagttaaagtttttgaggctcatactgattacatcagatgtgttgcggtccatccaactctaccatatgtgctgtcatcatctgatgacatgctaataaaactgtgggactgggataaagggtgggtgtgcactcaaatatttgagggacattcacactatgtgatgcaggttactttcaatccaaaggatattaacacctttgcaagtgcatcccttgaccgcactacaaagatatggagtttgggttctccagatccaaacttcacacttgatgggcatcaaaagggtgtcaactgtgttgactacttcactggtggtgacaggccctatttgattactggttctgatgactccaccgcaaaggtctgggattaccagacgaagagctgtgttcagacacttgaagggcatacacataatatttctgctgtttgtttccatcctgagctccctataatcattactggatctgaagatggtacagttcgtatatggcattcgacaacttacagacttgagaacacactaaactatggccttgagagagtctgggctgttggatacatgaaggggtctagaaggatggtgattggttatgatgaggggaccattatgataaaaatgggccgtgaagtacccatagcaagtatggataccggtgggaaaatcatttgggcgaaacataatgaaatacaaactgtaaatatcaagacagtcggtgcaggttttgaagccacagatggagaaagattacccttggctgtaaaagagttaggaagctgtgatttgtacccacagagcttgaagcataaccctaatggacggttcgttgttgtatgtggagatggcgagtacataatttatactgccctggcctggaggaatagatcatttgggtctgcactggaatttgtttggtcatcagaaggagaatatgcaattagggaaagtacatcaagaataaagattttcaataaatcgtttcaggagaagaaaactatccgcccttcattttcagcagagcgtatttatggtggggtattgttggcaatgtgttctagtgacttcatctgcttttatgactgggctgattgtagactaatacgccgaatcgatgtgaatgttaagaatgtttactgggctgatagtggtgacctagttgcaatagcaagtgatacatcattctacatcctcaagtacaatagagatattgttgcttcttatctagaaggtggaaagcctgtggacgaagaaggcgttgaagatgcttttgagctgcttcatgagatcaatgagcgagtgagaactggaatttgggttggagactgctttatctataacaactcatcgtggcgcctaaattattgtgttggtggtgaggtcactacaatgtatcatttggatcgccctatgtacttgttgggatatattgcgaaccaaagtcgagtttatcttattgacaaggagttgaatgtcattgggtacacattacttctgagtttgattgagtacaagacccttgtgatgcgtggggatttggatcatgcaaacaaaattttatcatccatacctaaggcgcaatataatagtgttgctcattttttggaatcgagaggtatgttggaagaggctcttgagatagccactgatgctgactacaagtttgacctagctgtgcagcttggaaaattagaagtcgcgaaggctatcgccatagaagcacaaagtgaatctaaatggaagcagttgggcgaacttgccatgtccacaggcaagctagagatggcagaggaatgccttcttcaagcaaaggacttaagtggcttgttgctactgtactcatctcttggagatgctgaaggaattgaaaagcttgcttctttggcaaaagaacacggaaaaaacaatgttgctttcctctgcctttttatgcttggtaaagttgaagattgcatacagttgcttgtagacagtaaccgtatacctgaagctgcattactggcgcgttcatatcttcctagcaaagtaccagagatagtggcaatttggagagacgacctgagtaaaattaatccaaaagctgcagagtctctagcagatccttctgaatatccaaatctatttgaagactggcaggttgctctaactgtagaaaaaagtgttgcgtctcagaggggcaattatcttcctgctgaccagtacttgaatcatgctgagaagtcagacatgactattgtggaagctttcaaaaggatgcaggttgttcagcatgaggaacctgaagatgtggctgaggaaaatggagaacttgatcaacaggcatttgaagagactgaaatgcagaatacagatgatgatgctgatgaacctgaagagacagttttagtaaatgggaacaagggtgaggaacatcagggtacggacaatgaaggagctttatctgcctagaattcttggcaaatatgggaaccccaagttttgcctacgtgctaactcaacatgaataggggctgaaagaagcacagctcattggctgcaaatttttttttctgagggtaacaaatgtgggccccctgttttactctgaagcaccggaactggtgatgctggaccgcctgatgcttgtcatatagaagacccaatttccatgccgtgaaatcaatggatcgggtgtggggccagctgcaatgaatagtgtttgaataattggtatagagatgtcacagactccacaggaatcggc

SEQ ID NO: 2235 - DNA, 1734 bp, Zea Mays
agagataggaaagggcccaacagctcaacagaaaagccaagcaaaggctgctgcatactggaaggccctctgtctgtgtgcgagcgcaagagaaagggagtcagagagagagagagagggaggagaccttgcagaggagcgaagcaagcaaggtgggaaagaggcagcagcaagggcggcgggctgccggaaggggaacatgctccctcctcatctcacagtacgaactgaaaaacaagagtaaagaatttccgtgagatgagacgtacagaatggcgcggtgatgattcagtttggccatcagatgcctgattacgactccccggctacccagtcaaccagtgagacgagccatcaagaagcgtctggaatgagcgaagggagcctcaacgagcataataatgaccattcaggcaaccttgatgggtactcgaagagtgacgaaaacaagatgatgtcagcgttatccctgggcaatccggaaacagcttacgcacataatccgaagcctgaccgtactcagtccttcgccatatcatacccatatgccgatccatactacggtggcgcggtggcagcagcttatggcccgcatgctatcgtaagtgatctccatgcgtccagcctgttgtttcactacttgctgccggtgctagatgatgccctttgtccactttgaagacactttgctaggcaatgcggtcagtactggtgctttctttttgtttttcctgtgcgttattgcgtttagtggtgttcttcatttgctagcacagcatgcctatcggctgagacagcacccagcagcattgccatcgatttaccccttcaactcattcgtctcgtcagatcttactcctgctatgttattgaagcataggcgttttttacgtttcacgcctgcatcattgccattctcctggtcctgggtaaagcggcttgttttttttcttcttctgataattacaaattaatcagagtctcgtattttgcctggtaaacaaatcgagcagatgcaccctcagctggttggcatggttccgtcctctcgagtgccactgccgatcgagccagccgctgaagagcccatctatgtcaacgcgaagcagtaccacgctattctccggaggagacagctccgtgcaaagctagaggcggaaaacaagctcgtgaaaagccgcaagccgtacctccacgagtctcggcacctgcacgcgatgaagagagctcggggaacaggcgggcggttcctgaacacgaagcagcagccggagtcccccggcagcggcggctcctcggacgcgcaacgcgtgcccgcgaccgcgagcggcggcctgttcacgaagcatgagcacagcctgccgcccggcggtcgccaccactatcacgcgagagggggcggtgagtagggagccccgacactggcaactcatccttggcttatcagcgattcgactcggctctccctcgtctgaaactgaactctctgcaactactgtaactgtaactaaactgggtgtgcccggattggcggtcgttctgttctactactagtacctgctacgcgtcgttgggttgggtctggactagagagcgtgctggttctttgatgaacttggctggacttgagggtgttgactagcgcgaagctgagttccatgtaaaacttttgcttcaagaccgatgactggcggcataataagtagcagtaataaccattcttctgtgtctgtg

SEQ ID NO: 2236 - DNA, 1976 bp, Zea Mays
agagataggaaagggcccaacagctcaacagaaaagccaagcaaaggctgctgcatactggaaggccctctgtctgtgtgcgagcgcaagagaaagggagtcagagagagagagagagggaggagaccttgcagaggagcgaagcaagcaaggtgggaaagaggcagcagcaagggcggcgggctgccggaaggggaacatgctccctcctcatctcacagtacgaactgaaaaacaagagtaaagaatttccgtgagatgagacgtacgtaaggataatccccaagacattgctcaatctgtttctctctctctctctctcttttcggcgagcagtttgtcctttttctttcaatttcttttactactacacccgttatcgaatatttgtcatccgctggctcatttataaactaaaacacgataaataaagaaggaaagaacggagagagtagtagtggtttagtttcatgcagctagaattctaacgccctcctggatccttgtgcagagaatggcgcggtgatgattcagtttggccatcagatgcctgattacgactccccggctacccagtcaaccagtgagacgagccatcaagaagcgtctggaatgagcgaagggagcctcaacgagcataataatgaccattcaggcaaccttgatgggtactcgaagagtgacgaaaacaagatgatgtcagcgttatccctgggcaatccggaaacagcttacgcacataatccgaagcctgaccgtactcagtccttcgccatatcatacccatatgccgatccatactacggtggcgcggtggcagcagcttatggcccgcatgctatcgtaagtgatctccatgcgtccagcctgttgtttcactacttgctgccggtgctagatgatgccctttgtccactttgaagacactttgctaggcaatgcggtcagtactggtgctttctttttgtttttcctgtgcgttattgcgtttagtggtgttcttcatttgctagcacagcatgcctatcggctgagacagcacccagcagcattgccatcgatttaccccttcaactcattcgtctcgtcagatcttactcctgctatgttattgaagcataggcgttttttacgtttcacgcctgcatcattgccattctcctggtcctgggtaaagcggcttgttttttttcttcttctgataattacaaattaatcagagtctcgtattttgcctggtaaacaaatcgagcagatgcaccctcagctggttggcatggttccgtcctctcgagtgccactgccgatcgagccagccgctgaagagcccatctatgtcaacgcgaagcagtaccacgctattctccggaggagacagctccgtgcaaagctagaggcggaaaacaagctcgtgaaaagccgcaagccgtacctccacgagtctcggcacctgcacgcgatgaagagagctcggggaacaggcgggcggttcctgaacacgaagcagcagccggagtcccccggcagcggcggctcctcggacgcgcaacgcgtgcccgcgaccgcgagcggcggcctgttcacgaagcatgagcacagcctgccgcccggcggtcgccaccactatcacgcgagagggggcggtgagtagggagccccgacactggcaactcatccttggcttatcagcgattcgactcggctctccctcgtctgaaactgaactctctgcaactactgtaactgtaactaaactgggtgtgcccggattggcggtcgttctgttctactactagtacctgctacgcgtcgttgggttgggtctggactagagagcgtgctggttctttgatgaacttggctggacttgagggtgttgactagcgcgaagctgagttccatgtaaaacttttgcttcaagaccgatgactggcggcataataagtagcagtaataaccattcttctgtgtctgtg

SEQ ID NO: 2237 - DNA, 2602 bp, Zea Mays
agagataggaaagggcccaacagctcaacagaaaagccaagcaaaggctgctgcatactggaaggccctctgtctgtgtgcgagcgcaagagaaagggagtcagagagagagagagagggaggagaccttgcagaggagcgaagcaagcaaggtgggaaagaggcagcagcaagggcggcgggctgccggaaggggaacatgctccctcctcatctcacaggtcttccttcctgctcgctgacttgcctctctccaccctctctgatctgagctctacggctcttcctttccctgcggtgataccggagctctctgctcccacctcccagtaccagccgacctgtttttttttcgtttgtttgggggtgggtggatgtgggggagggatcgtttctcggttcttctggacgatttgtggtggatctggctggttccttggttgctcggctggtcttttgagttgatacggtgctgggatttgtaggcgcatttctgggtggaggtggccggtggggtaatggctccagcatgtgatccttgctaaggccttacagttacagcacactgcatgccggatttgtgttgctttatttatgttcctgcccgtgtaatcgttttgaactcaaggggagaactagtgacctactgatgagattaagatgcagcactgtttttgctagcgggaggcctatctgcagaactaactagtcatgtctgaggccctcagcacatatactctggttgcatgaaggattcttagaattcagagggcgctaccgagttgatgcatggtactgatacagcgctagcgctagcgctagctagcttactactagtacctttagagcatgtgcatgcccaagttacacatctcacctcgcgtgatcaattgagggcctactagcttactactgctgccttagtttcctttttcatgaatacagttacggtgggaaggtcaaattctgttgtgtattcatgcatcagctgtgctccttaaggcttgcagaccttaatacccagtacgtgtttcgaatctcgtatgtttatttctgggaactgacctgtgtttatatatgtttggacagtacgaactgaaaaacaagagtaaagaatttccgtgagatgagacgtacagaatggcgcggtgatgattcagtttggccatcagatgcctgattacgactccccggctacccagtcaaccagtgagacgagccatcaagaagcgtctggaatgagcgaagggagcctcaacgagcataataatgaccattcaggcaaccttgatgggtactcgaagagtgacgaaaacaagatgatgtcagcgttatccctgggcaatccggaaacagcttacgcacataatccgaagcctgaccgtactcagtccttcgccatatcatacccatatgccgatccatactacggtggcgcggtggcagcagcttatggcccgcatgctatcgtaagtgatctccatgcgtccagcctgttgtttcactacttgctgccggtgctagatgatgccctttgtccactttgaagacactttgctaggcaatgcggtcagtactggtgctttctttttgtttttcctgtgcgttattgcgtttagtggtgttcttcatttgctagcacagcatgcctatcggctgagacagcacccagcagcattgccatcgatttaccccttcaactcattcgtctcgtcagatcttactcctgctatgttattgaagcataggcgttttttacgtttcacgcctgcatcattgccattctcctggtcctgggtaaagcggcttgttttttttcttcttctgataattacaaattaatcagagtctcgtattttgcctggtaaacaaatcgagcagatgcaccctcagctggttggcatggttccgtcctctcgagtgccactgccgatcgagccagccgctgaagagcccatctatgtcaacgcgaagcagtaccacgctattctccggaggagacagctccgtgcaaagctagaggcggaaaacaagctcgtgaaaagccgcaagccgtacctccacgagtctcggcacctgcacgcgatgaagagagctcggggaacaggcgggcggttcctgaacacgaagcagcagccggagtcccccggcagcggcggctcctcggacgcgcaacgcgtgcccgcgaccgcgagcggcggcctgttcacgaagcatgagcacagcctgccgcccggcggtcgccaccactatcacgcgagagggggcggtgagtagggagccccgacactggcaactcatccttggcttatcagcgattcgactcggctctccctcgtctgaaactgaactctctgcaactactgtaactgtaactaaactgggtgtgcccggattggcggtcgttctgttctactactagtacctgctacgcgtcgttgggttgggtctggactagagagcgtgctggttctttgatgaacttggctggacttgagggtgttgactagcgcgaagctgagttccatgtaaaacttttgcttcaagaccgatgactggcggcataataagtagcagtaataaccattcttctgtgtctgtg

SEQ ID NO: 2238 - DNA, 1457 bp, Zea Mays
agcaacgtctcgccctcccagctcctcccaccaaacaaactgaaccactgtccgctgcgtgctttccttcctctcaacgccagccttgccgagagcccgagaccaatcgccgccatctcccggaatgacggggtgacgaaaccgcgccgcaccagacaagacagaggagccgccgccgcgacccacaggccaccgggtcgccgaggaggggatccagcgagccatgtcgaccgacgtgcccatgagccccgagctcgagcaggtggacggcgagatccaggacatcttccgcgcgctccagaatgggttccagaagatggacaagatcaaggactccagcaggcagtccaagcagctggaggatctcacggccaagatgagagagtgcaagcgcttgatcaaagagtttgaccgtatactcaaggatgaggagaaaaagaacacccctgatgtcaacaagcagctcaatgacaagaagcagttcatgatcaaagaactcaactcctatgtgaccttaaggaaaacgtaccagagcagccttggtaataagaggatcgaactattcgatacgggtaatgaccaggtggctgagggaactccagttcaaatggcatcagaaatgtcaaatcaagaactcattagcaccggaaggaaacaaatggaccaaactgatcaagctattgagcgctcaaaaatggttgtagcacaaactgttgaagttggagctcagactgctgcaactctgacacagcaaacggaacaaatgaagaggataggcaatgagctagattctgtccacttttcactgaagaaggctagtcaaatggtgaaagagattggccgtcagattgtcaacccgcataacaagaacatcagagacattccgggcctagcacctcccgccatgaacaggaagctgctgtccatcgacgctgcaggactctgagcgttgtgaatggctgcctcccgcagcacagcgcaacgcagcgcgtcagagttctcttatgagccacgatacatggcttcgcgattcttttgtgcttgtagtttacgtccgcccattctttccctattgcattggtgagtagtagcctcaggtttgtagcgggactcttgttgtttattgcttgcgagcccatagctttctggttgtttgtgtatatgcggtagtgatgtgaatgtgagagtcgagtggagattcttcatggttcgttcttatgagttgtgactggtttgtgagcttgtggtgaaaggttcgcagcttgcttggcatgcgtctcctctgttcctgccgtgctgctctgcagtcgatacaagaaaagataaaactggtaggttgcatcggggtttctgatggcaacgaacccagacacgccaggaccaacgttgatcaattatagacgctagcaatctgcaaaaggcgccccggcaacagtcacaggtgaatttcagcttct

SEQ ID NO: 2239 - DNA, 2732 bp, Zea Mays
tgccgccgacgcgtcgccacctgtgacctgtgtccgtagagcccgtgcggacagctgggaccggaggcagactcccactcgaacttgcccacctcgacggttgttctacggtttggttcattgaacctggcctggcccttcaacactccccaaggccagccaagccaaggccgccaaggggcgtccggactccggcgtctcctccttgcttctgcccagccacagcaagccctgcctcccgtcccgccctccgctctccgcctacaccttctcccgtccaagaccacacgcgcacagaaaaaagtacagctggtcagtggtcctggtcagctgctcccgtacaaaaagcgcaccacaagcggcggccaagccgtccgctgccccccgcatcgccatggctctcgccgtgcgcacgccccgcttccagcctcgaccggcctccatttctgcgcccgcaacacccgcctcgaattccctcgccgccgccgccgccgcgaacgcgaggccccgcacctgcgccggcgccgccggcggcggcggcggcggccgcggacccgggagggtggcactggtgggtacagggcccggggaccccgagctgctcacgctcaaggcggtccgggctatcgaggcggcggacctggtgctctacgacaggctggtgtctaacgacgtgttggacttggtcggggagggctccaggcttctctatgtcggcaagaccgcgggataccacagccgcacccaggtgtgggagcactgttccttcgtttcaatttggaagtttacacgcgattggaaatgctagttgggcgggcattctgcaataacgatttcaagtaggtactttttcttgagcacgtgtgagacaacatccatgaagaacagagaattgaggcgacctcagcttaggacgttgtacctttccttccgctttcttggtcatttgtatgtttgatgactggttgatgcaatgtaggaggagattcacgagctgctgctgagctttgcggaggctggtgccaatgttgtgcgcttgaaaggtggcgatcctctggtttttggaaggggtggagaagagatggatttcttacagcaacagggaatcaaagttgaaattatcccaggaattacctctgcttcaggaattgcagcagaactaggcattccgctaacccatcgaggtgttgctaccaggtaagattagccttctgtaattttattctacctaactagtaactacgcaaaaaagatttcccctttaatatgcaatgcattttctaaatggattttccacaagattcaccatttcctatcaggtttttgtttaggatctgcaatactctctcgaatgcagcaattagcatgcctgcttgtggattttgtgagtatttgctgtagagttgaggctttaaatgtactagttacttgctgtaactcttaatggttcctgtttttgaccatacatgtctcattgcgtagtgaaagttcttggtattattttctgatgtcctgatgtgctatggctaatggagtagcaaatgtttttaataataaaacgctcttgcattgttaaatgagcagaaaggcgctagtttgtctctgataccttagtgtagagagataatcattcttgatgcttactagaataaatagttgagatataatcttctcttcagtgtcagatttttaactggacactccagaaatggtgggacagacccactatatgtagctggaaatgcagccgatcctgacactactttggttgtgtacatgggtttgtcaacacttgcatcacttgcaccaaagttaatgaagcacggcctgccaccagatacccctgctgttgcagtagagcgcgggactacacctcaacaacgaatggtgtttgcgttgttaaaggatcttgtggatgaagtcaagtcagctgatcttgtttctccaactctaataattatcgggaaagtggtatccttgtcaccattttgggttgagtcatctgaacatgatgccctgaaaattgagagctcgtatgcaagtgaagccagatgataatacgttttcatgattttagtgattggacaatacatacttgagtaacgcaatatcccagatatgagcagttccagttgggatccatttaggacatgcgagcacaggttcgacctggtgtacacaacatttcaggaagcatggattctgaatgacggatgatagcttaagcccataacagcctttggggtttgggcagaagcgcacttgggagttgatgagggcatgtctggaggcttcagcttcagtaaatttacggctttcaattcggtgtcttcttcgtcaaagaagactcggtagatgtatggttttcaattcaatagcacctgcaaactcctttctgactggaggtccattcggagtgcagggattttacagaaattagacaaaaaaagttctgttttttggggggaattagaaaaatctctgcttcccaagcgtagataactgtaagatttttgttgtcatctttaaaataattgtattgtttttatgtgttatattcatctttaaaaactcttggtaaaacagagcctgaagaatgaacctttaagctgaattagtgtttggtgtttggttctagagtctatgaacggcgcaactctattccagattctggggatagaatgacttcataactatttttttttgtttcatagtgaggcataacggaacgg

SEQ ID NO: 2240 - DNA, 757 bp, Zea Mays
gttgttaatatgtagtctatatactttgattattttttattgattacaaaatattgggaggaccataataattttgaaaaaaatgcttggattgtttctgaggatttgggcttggaaaggcgtaagaaatctgaaagtttcttgtgttgggagaggactaatgggttacattagggataaggttaatcaggggcaagttttacttgataatgtggacatcaagacgttgcaattaaagcgacttagagaccagatcggattggtgaatcaggaacctactctttttgcaactacaattcttgagaatattctttttggcaaacctgaggcgacaaaggcagaggttgggtctacgactacttccgcagaatccttcatttcttgttttgtagttttctcctaaacacatttgctctgatgttgtttgtcaccataactgtagattaaaggagccctagctttcggaggacaacccagatgccttcaaagttcaaaatgacggtgatgaaggtggacaagaaacaaaattttggatggttcaaaattttgctataggtcctagcaacgcttatgtgttgctataggggggttattttgtagtgaactcccaggccatatgctagcttactttgaggagtgcccactatttgtgcatgctacaggcgctatcattacatttccatgacctgtaaagtggtgacatctttaaatacagaatggccacattagcgaaccagaggtttcacacgagtattcc

SEQ ID NO: 2241 - DNA, 975 bp, Zea Mays
tcctaatatactactgtgaatgcttgttctttgtttattttcgtatattgttaattcctaatatacataatttccccaaataacatgataataaatatcggaaaagtggagaactgaacgacaatgtttagcgcaatggtgaacagtgctttatagttggcattaatcttagttcctacatgttgttaatatgtagtctatatactttgattattttttattgattacaaaatattgggaggaccataataattttgaaaaaaatgcttggattgtttctgaggatttgggcttggaaaggcgtaagaaatctgaaagtttcttgtgttgggagaggactaatgggttacattagggataaggttaatcaggggcaagttttacttgataatgtggacatcaagacgttgcaattaaagcgacttagagaccagatcggattggtgaatcaggaacctactctttttgcaactacaattcttgagaatattctttttggcaaacctgaggcgacaaaggcagaggttgggtctacgactacttccgcagttttctcctaaacacatttgctctgatgttgtttgtcaccataactggcgctgaaccgcgctggtggcaaggctggaaacaagggtgctgaagctgctcttacttccattgagatggcctctctgttccggcatcacttaggctgacactttgcatattctggtttctatacacgagctcacaagacatgtttctaaacctggcacaatgaataattgtcaccatgaggtcatgaataagcacaactgtcacggcgtgtgctagggcagtggggctgtcgccaaggacatgcagcttgtgaagcagtgctggagccgtccccatcgccgagcagctcgtgagggtaattcaagcacgctaatgcagtctggtcctacaatagcgatccttggtcttcacctacatcttcacctaccgaacatcagg

SEQ ID NO: 2242 - DNA, 1660 bp, Zea Mays
tgcacgccgtccaccagccggtcctgcgctctcgagtcgagactccaccttccattcatttcatctgctccatctccctctctgttcgccggcgtataataagcttcccctttctgcaactgatctgatccgggctgccgtgagctctgctcgtcctgatggagttcaagagggatgtatggagcctgctcctcgtgctgctcctcgggcagctcgtcgccttctccatggccgcctcaagcttcgcctcctccctcattgctaatcttggagtcgatgccccactgacacagtctttcttagcctacctgttgctgaccttagtctatgtaccaatcgtcctgcgtcgacggcagaagctgcaaatagcttggtactggtacctagctctggccttctttgatgtacaggggaactatcttgttgtgaaggcgtaccagtactcatacattaccagtgtgactttgttggattgctggactgttgtatgggtcgtcatgctcacctggtacgcactgggcacaagatactcactctggcagttcgtgggggcagggacctgtgtggcagggctcgcccttgtgctgctttcagatgcaaaatctcaagatgagcaagatccgaaaaaaataccacttctgggggatgcccttgttattgctgggacagttggttttgcatttagcaatgttggggaggaatactgtgtcaagaaaaaggatagagttgaagttgttgcaatgcttggtctctttgggttgctgatcagcacagcgcagatacttgtatttgaaaggaagggcctagaagcagttacatggtctccaacaatgataagtctgtttgcaggatttgcagtggcaattttcgtattctacacagttgctcctttcgttcttaagatgagtggagctacattgttcaacctttcactgctaacatctgacatgtgggcagtcgccattcgagttttattctatcagcaagagataaacaggttgtactacctagcattcgcagttgtggccattggattaatcatctattcgttgaatgatagatcttcagatgatgaaacagctggaagtacagaagcaccggcccaatatcagcaacttccaattgaagacaattcaacaagaattggttctagttcaggaaaacgtttaattggcccaagaagctaagcaagatgaggaagagaatcagaattaattttctttacaagtcagtccagcagattattcacaagagcagacccattgctgaaggctcccgcatcagtgagatctaaggaagggataatacatcgggtcaaaatgatctttgactagggattgtgaacaatcacagctggtctgcaaagcataatagcaacagtatgaacatgtaaagggagttactagtcactaaagctctttcaagaattgtctatgaaggaaaaaaaattctagatagtgtatggatagcttacatgctttactggaatgcagaattatgatttaatgatattttctatattactcattgttaaattctatgagaagtatcatgccccgtgaattggaagctaaaaggggtaacgccccgtttggatcattggaattgaattccattctaataatagtaatttaggtatatatcaattaagctaattcgg

SEQ ID NO: 2243 - DNA, 1959 bp, Zea Mays
cctagctacctattcctcctcggccctcacttctctatagcccgtggaaaacagaaagagaagctgcctcatagggcgtgttctaaaggacacaagatcttctctggggcacactagtgtatgaaaaaccacaaggctgatccctgctgctcactcccatggcgcaaggtgaggagagctcgtggtgcatggcgagcagcgatcatggtagagctgcaccattcgtccaagcagtcgcgtgtggaacccaaaggcgcgcttctgccgcacaacctgccaatttcttggagttgcaacctgcagcagctgctccttattactttggtgagttggaggaggccctttatccatggcacccgtacatctgttgatcacggcatgatcggaagtgatgtggacacagagcgtaagacagctggataccttgcagctaggccccccacactggagatcttcccttcatggccaatgagtcatctacagcagccatacagtggtaactcgcactcagtagggagcaccactgagtcgagctcaggtcagaacagtatgccacagaccgagctggtgtccccagggagcatgagggccgactctggacagcgtcaggagcttttgatggtgactgttgatgattacaactacgagcaaggactcggagccgcagcaaccacagctccaatctttcagcagcatgcagcaggccaagacaagggaaagcatggatccacaaggaaagacggcaggctgttagacgccaagaccgagaggcgattggcccagaacagagaagctgcgaggaagagcaggctgagaaaaaaggcctacgtacagcagctagagacgagtcggatcaggcttcagcaaatcgagcaggagctgcatggagcacgctcacagggtctgttcccgggaggaggtggtgcggctggagacttgagttcaggcgctgtgattttcgacatggagtacgcccggtggctagaagacgacaccaagcacatgacggagctccaggccgtgctgcagccccagatcatcgacgcgaacctgggggccatcgtcgaggactgcatgcggcactacgacgagctgttccacctgagggccatgctcgcaagatccgacgtgttccacctgatgaccggcctgtgggcgaccacggccgagcgatgcttcctctggatgggagggttccgtccttctgaaatcctcaagcagatgctgataccgcagctcgaccctctcgcggagccgcagctgatagggatgtacaatctgcaacggtcgtcggagcagaccgaggaggcgctcgtgcaggggcttcagcagctgcaccagtcgctggcggacgccgtgggcgctagtcctctcagcgacggcgcgaatgtcgccaactacaccgctctcatggccctggcacttgacaggctcgacaccctcgagagcttttaccgccaggcggacagcctgaggcagcagaccttgcaccagatgcggcggatcctgacgacccgccagacggctcggtgcttcgtctccatcagcgagtaccaccgccgcctccgcgccctcagctccgtctgggcatcgtcccgccctccaactcctccaagcgagggcgtcgttgcggccgcagagaatgttagccctacagggacgacgaccgagcaagctctccctccgtaccaccatagccagccgttccctggcttctgatcgaaggttcgatgcatgcatgcatgctggttgtcgcggctagctagggtacagattccgtcgtcagtggtggcgagcggacgacgaggcccggccgagggggacagattgtagtgtataacgttcttctatatatcattcgtcgagaacggaaacatgcatcatcagtcggtattcagtcagtgcatcatcactatgaaaaaaaaagaggacacacaaagggtctctgctctctttctc

SEQ ID NO: 2244 - DNA, 1983 bp, Zea Mays
cctagctacctattcctcctcggccctcacttctctatagcccgtggaaaacagaaagagaagctgcctcatagggcgtgttctaaaggacacaagatcttctctggggcacactagtgtatgaaaaaccacaagggtgattcagcttaccactgtcggctccttctatctgatccctgctgctcactcccatggcgcaaggtgaggagagctcgtggtgcatggcgagcagcgatcatggtagagctgcaccattcgtccaagcagtcgcgtgtggaacccaaaggcgcgcttctgccgcacaacctgccaatttcttggagttgcaacctgcagcagctgctccttattactttggtgagttggaggaggccctttatccatggcacccgtacatctgttgatcacggcatgatcggaagtgatgtggacacagagccagctggataccttgcagctaggccccccacactggagatcttcccttcatggccaatgagtcatctacagcagccatacagtggtaactcgcactcagtagggagcaccactgagtcgagctcaggtcagaacagtatgccacagaccgagctggtgtccccagggagcatgagggccgactctggacagcgtcaggagcttttgatggtgactgttgatgattacaactacgagcaaggactcggagccgcagcaaccacagctccaatctttcagcagcatgcagcaggccaagacaagggaaagcatggatccacaaggaaagacggcaggctgttagacgccaagaccgagaggcgattggcccagaacagagaagctgcgaggaagagcaggctgagaaaaaaggcctacgtacagcagctagagacgagtcggatcaggcttcagcaaatcgagcaggagctgcatggagcacgctcacagggtctgttcccgggaggaggtggtgcggctggagacttgagttcaggcgctgtgattttcgacatggagtacgcccggtggctagaagacgacaccaagcacatgacggagctccaggccgtgctgcagccccagatcatcgacgcgaacctgggggccatcgtcgaggactgcatgcggcactacgacgagctgttccacctgagggccatgctcgcaagatccgacgtgttccacctgatgaccggcctgtgggcgaccacggccgagcgatgcttcctctggatgggagggttccgtccttctgaaatcctcaagatgctgataccgcagctcgaccctctcgcggagccgcagctgatagggatgtacaatctgcaacggtcgtcggagcagaccgaggaggcgctcgtgcaggggcttcagcagctgcaccagtcgctggcggacgccgtgggcgctagtcctctcagcgacggcgcgaatgtcgccaactacaccgctctcatggccctggcacttgacaggctcgacaccctcgagagcttttaccgccaggcggacagcctgaggcagcagaccttgcaccagatgcggcggatcctgacgacccgccagacggctcggtgcttcgtctccatcagcgagtaccaccgccgcctccgcgccctcagctccgtctgggcatcgtcccgccctccaactcctccaagcgagggcgtcgttgcggccgcagagaatgttagccctacagggacgacgaccgagcaagctctccctccgtaccaccatagccagccgttccctggcttctgatcgaaggttcgatgcatgcatgcatgctggttgtcgcggctagctagggtacagattccgtcgtcagtggtggcgagcggacgacgaggcccggccgagggggacagattgtagtgtataacgttcttctatatatcattcgtcgagaacggaaacatgcatcatcagtcggtattcagtcagtgcatcatcactatgaaaaaaaaagaggacacacaaagggtctctgctctctttctc

SEQ ID NO: 2245 - DNA, 962 bp, Zea Mays
cccacacccgcgcctagctcggatccgccccactacgcccccaaatcatcccaagcgctccaaccgctcgcagccctaaatctaatccgtcgtcttccgggtcgccatccgccctcatcccctcacgctcaaaccaaaccctagcaaaccctagcagatgtcagcccacgacgaggacggcggccgccgccgcaggacccttgccaaggtttcactctcgttggtctcgagcaccatggcggaggcctccacctactccttagacgcagttaagacgcgccacctctagctccaccacagccccggcggcgcgggcgtgcgcggcgtaatccgggtcgcggccgagctcgtccgagatagcggggtttaacggggcttaaccccctccgttctccgccacctgatgtacacccgctttgcatcgtggggttccagcatcttcggtccaccctcgctagcaactgggggaggatggcctttttgggaaggcgctcgccggtggactttcaggtgttgctgcacaggtgcaatgggctggcttttgataaactcgaatgtggaggtggcttgctactgcaagccttgttactggcttataaatctggcttccaagtgtgggatgtggaacatgtttatgatgtaagatagctagatacagacatgatggctctatttcatttattcaagtgctaaaggatccaattttcacaaccgaatctcgagacagatttgtagatgtacggccatcgctagctcttgcatgtgatcgtgtatgattgcaacaatcctgacaaaatatggtggtactttatattttggcatattgtgcacaaaaacaagtgtcttctatgaccaccgtgatttatgtattttcaaacgaaattttatggcacttcttgttgtgttttacgcttctactaaaaaacagtcttactgcgttttacaccaaatttatgacactt

SEQ ID NO: 2246 - DNA, 1807 bp, Zea Mays
gctccaaccgctcgcagccctaaatctaatccgtcgtcttccgggtcgccatccgccctcatcccctcacgctcaaaccaaaccctagcaaaccctagcagatgtcagcccacgacgaggacggcggccgccgccgcaggacccttgccaaggtttcactctcgttggtctcgagcaccatggcggaggcctccacctactccttagacgcagttaagacgcgccacctctagctccaccacagccccggcggcgcgggcgtgcgcggcgtaatccgggtcgcggccgagctcgtccgagatagcggggtttaacggggcttaaccccctccgttctccgccacctgatgtacacccgctttgcatcgtggggttccagcatcttcggtccaccctcgctagcaactgggggaggatggcctttttgggaaggcgctcgccggtggactttcaggtgttgctgcacagtcactgatagggcagccgttctgggtttcctatgagaaactgcaccaaacatcaggtttattatgaaaaagacagcatattcttgacgatattgctatatgaagtgtcatactaagagactactgatcggatggacgagtgtattattttagtagttagtggtgcttgtttagaactaagattgcaaatacactgagatgatttgggtattataatacaagccaagctgcaaatatggaaccatgcaacttccacaattagtcaagttatctttgggtcctgcttttaattcttgggattccaaactcatgtttggtcaagacaaggacattacgacattgtatattctacatacttttattctctctaataatatgttattatgtaaatgttataatttcaagctgaggactgattatgctctggtttactgagttatgaattcccactttgtcatgaaaattacttcggttttaccatggtcagaactgtatgtaaggttgactccaatgttgagcaaaaagttggttatatactctgacttcataattagagttccatattgaaaaatgcatatagtaaaataaaaatgttgtccacattttaattctccagtctctcaaccatgcaaaattgaatgtaatcttttacaactctttgtttgtacacatcattctttatgcatgttttgagttatgttgaaattgaccactatctttggctttttgcatagtgagaataaaacaaatagtagtgtctatatgtctgttctttactatcatgtaagctgtatatacaccaaaccaatgtatgatgcacctaaggcttgggtttttactttttgagtattaatccatgtaaacaatgaactaaaacccttcttacctgtcatgttttgcaggtgcaatgggctggcttttgataaactcgaatgtggaggtggcttgctactgcaagccttgttactggcttataaatctggcttccaagtgtgggatgtggaacatgtttatgatgtaagatagctagatacagacatgatggctctatttcatttattcaagtgctaaaggatccaattttcacaaccgaatctcgagacagatttgtagatgtacggccatcgctagctcttgcatgtgatcgtgtatgattgcaacaatcctgacaaaatatggtggtactttatattttggcatattgtgcacaaaaacaagtgtcttctatgaccaccgtgatttatgtattttcaaacgaaattttatggcacttcttgttgtgttttacgcttctactaaaaaacagtcttactgcgttttacaccaaatttatgacactt

SEQ ID NO: 2247 - DNA, 2344 bp, Zea Mays
tcagttttggttgtctgttattatgtcatcccgtatctataactagttgaagcgcacatcgttccaatcgtcgccgccggctccctcctccacccgctgccgcctccctccaaaacttgtcgtcgtatccctccaacacccgcatctggcgcagacgaccatacacccgctctgatgctttaaatcaatgtgtatggggttccaagcgtctgacctgacaaagaccgccccaagcaacgatgattcttgaagcgattgcagagataaaattgaaagggctgatttccttgatgtgcgcttcaacgagttggagaggtgggacgccagtttttttttttttttttttttgaaaaaaaacagggcaacgaaggggaggtgggaactgggaagacctgtttgataaattacagaggatacttcgccaaccgaacaagcctaagtgggggtgatgatgagccaccggaggcgttctcgcgctgccggctcgccgcctggcgacgccagtacgggtacgccccctactcctgagaagtcgggacgggtccggccgtgggcggcgacagcgtcgaaccggaaggtgctggtgttcgcgctggcgttccgcgcggccaacgcgctgctcgtgcgcacgtacttcaaccctgatgagcactggcagtgtctcgaggtcgcccaccgcgtcgccttcgggtatggtcatctcacgtgggagtggaagcggggcctgcgcagttatctccacccattgctctttgctgctttgtacaagaccctggcgctactccatatggacactccgtgggttatggtgatggctccacgtctcgtgcaatctttgtttgcagcttttggagatctatacctatataaactttccaaacttattttcaatggtcaagttgctaagtggacgttattttctcagttggttaactggttcatgtttttctgtatcacacggactctatcaaacagcttggagactgttttgaccgtggctggactctattattggtttgctgcaatagagtcttccaaggcaacctcaatcgtttcaaagcagcacgcggcctgtgaacaaagtatcccatcaagaaaagtggctcttctgatagcagccttgtcatgtgccattcggccaacaagtgctgtaacatggctatatgttggccttttggattttattcagatgaaatcaaaatgtcgctttatccttcttgatgtcattccagtgggggccattgtccttgcagtaacaacactccttgattggtggatgtatggttcctgggtcatagtgccgcttaattttttgaaattcaacttattgtcttccggaggagactactatggaacacatgtcttccattggtactttacacagggttttccatccatgatttggacattcttaccatttgcattgtgcggtattgtaaagtctcaggaatggaggctttcaggtctaattgcttgggtgttaggggtttacagcattcttggacataaagaattcaggtttgttcttccagtgctacctttagcattgatgttctcaggttactgcttagcttccatgtcacagtccaagggcaaaaatcagcataggaaaggaagtctttcaaggctgcagctttctgttattcttctcgtcataaccaatgttcccatggctttatatatgtccttattccatcaaaggggaacagaagacgttatgtattatttgtcaaaagaagcctatgatggaagagtgaggagtgttctctttctcatgccttgtcattcaacaccttactactcaaccttacattacaatctacctatgcgttttttggactgcactcctagtgatagcaaagggaccttggatgagtcagatcgtttccttacaagtccatctgagtttgtcggcgatgtttttggaaatttatctgcattcagtcacattgtattattcgagtcagaagaaagacatgttctccagttgcttctgcacaattcctttcttgagatgaggaggtttttccactcacatttcaagattgacagagaccttcagtcggctgttgtggtttattcatggagggatgtgctatgatttagtactgatgtggcagaaaatgcctgttagctcgtgtaacaatccccacatgtttaatgttgtttcagcttttcatttgagaaatgagttgtggcattgctggatacttctgatatcttaatcctcttggaatgagatgttatgttacttttacccaagtgctttacgacggcataacaattcacagttcgctttcttgcatcgagtctctatgtccatgatatctgcttctaagataaa

SEQ ID NO: 2248 - DNA, 1155 bp, Zea Mays
ctttaaggccatttttgttgtgagtttcacaaattcaaccctattggctttatctggttctgactagagaacgtgcatctcagagttaaatttgataccttttgaatgcccagtagcacagtaataacttccgttcatatagatagaccgactactgtcttgtggtagggcatgaatgcattggagatatgaatttcatggattattctttgtcggtagagattaaaagacacataattgatcttgtcaaaattctgcacatgatgagattggtgttactacgaggatttaaaaccttggcatgaaaaaggagcactagcgggaaggaaacaggtgatcaggttggttcattgccccacaaatctcaagacgcacaggtcggttatctagtcaacctgctgagaaacgcccgcccgctgcgaaatcctagcaatccatcacaaacaccaagggctcagtccaccagagtaacctcagcaagctcggtcaccacatctgacgcgctggaggtgctccagtccttcaaagagacaagggagcgactgctgtcccggagcagcgcaaaacatcaagagccaccgggaaagccataggcccattctttgctttgtttctcttaacgtgatcgctggtagacccccaaccaaccgcgaaacgggatgcacaatgagctaagcggactatagctgctgtgttcatgtacatatgactgccgaagttgatgcctttggttggagagaaggcaccggtttccatttattccagcggaaggatcactcgtcgttcttaagagtgatgccgctgttgataccccctttttttgtatatgggaagtgaaaccgatacacgtaggtgggagcgagggagcctgtgaactgtgatagatgaaagcagggcgtgtgtgtgtgctgtgtgtgtaaattatgtaactgctgggaatcaaatgtttcattggacatcaagctttgatctgggaagttgtggattggcgaactgcaggctgtagttggaaaaggaactctcggttgaattgagagttccaaattataattgaaacatagtatatgtacatcatgtattttgttttgttgttgttttaaacgatctgttgtgcaatacggattagagtctctcgccggttcgattgttgctgct

SEQ ID NO: 2249 - DNA, 3430 bp, Zea Mays
cgaaacccctaattctccattgatcttttcccttcagaaaacagagcgagtccaattcgagacggctctccccacatcaccacagcgcagccgcaaccatggcttccgccgaaaccctagcccgctccccctcacgcgagccctcttccgacctgacccgcgccgactcttccgagccccaccacaacatcgatggctccggcgcgggcgccggagactcatcccgccgccgccgccgctcccgctgggagcagtctaacgacgactccgccgccaacaactccggcggcgagggcgggaccgggggccggaagcgcaagacgcggtgggccgaggaggagccgcgcccggcgatcgcgctcccggacttcatgaaggacttcgccgccgagatggaccccgaggtgcacgccctaaacgcgcgcctcctcgagatctcgcgtctgctgcaatcgggcctcccgctcgacgatcgccccgagggggcgcgctcgccctcccctgagcctgtctacgacaacctcggcatccgcatcaacacccgcgaataccgcgctagggagcgcctcaaccgcgagaggcaggagatcatctcgcagcttatccgccgcaaccccgccttcaagcccccctccgactaccgcccacccaagctccagaagaagctctacatccccatgaaggagtacccaggctacaactttatcggcctcatcattggccctcgtggcaacacgcagaagcgcatggagaaggagactggtgccaagattgtcatcagggggaagggtagtgtcaaggaagggaagctgctccagaagagggacctcaagccagatcccagcgagaacgaagacctccacgtgcttgttgaggcagatacacaggaggcactggatgcagctgctggtatggtggagaagctgctcaccccggtggatgaggtgctcaatgagcacaagcggcagcagctccgggagcttgccgcgcttaatggaacaattagggacgatgaattttgtaggacatgtggtgaggctggtcacaggcagtatgcttgccccaacaagatgaacacatttaagagtgatgttcagtgcaagatctgcggggacggtgggcacccaactattgattgtccggtcaagggcacttctgggaagaagatggatgatgaataccagaacttcctggctgagcttggtggtgggagtgcacctgagtccatgaacaaatctggtggtccgatgttggctcttacaggaagtggtggtagcggtggtgcttctactggaactgggagtaacccgccttggtcggccggtggtggtgccgcttccactgggctcaatggtatcaagaaagattatgacgagacaaatctttatattggatacctgccacctacaatggacgatgcaggtttagtcagtctgttttcgcagtttggggagattgtcatggctaaggtgatcaaggatcgaaacactggacagagcaaaggatatggatttgtcaagtattcagatgtgtcacaggccaatgcagcgattgctgcaatgaatggtcaccatcttgaagggcgagttattgcggttagagttgcaggaaagccgccacagacagcaccagcagtgtcagcacccccatcatatcctcctccggatcctacttcaggtggctattcctcccagtcctacatgggggcaccaccacctcctcctccagggagttatgctccagttccttgggggcagccgccaccatatgcttcatatcctccgccaccaccaggctctggtgtctacagtcctgcaccccctgcaccaggtcaagctgccccacctccgtatgggatgcaatatccaccaccaccaccacccccagcagctccaatccctccaccaggcactgctccatcaagtgatggagctcagaactatccacctggtgtaacaccaccaagttctggctcatccactcaccctgttgcaacatcagtatatgcatcatctggtgcaccaaatgcaccatcgatataccctccaccaccttatagttattcctcatactaccctccaccatttcagccaccacctccaccaccaccaccaccggctagtgttgatccctctcagagtattgcaactgcaccttggctaacccacagtgtggtggtgccaccaccacccacgagtgttgatccttctcagagtatttcaactgcaccttggttaacccacagcgcagtgccgccaccaccaccacctttgtcctccacaaccgaccagtctactgcttcctatggtgccgatgcagagtatgacaagtttatgtcagagatgaagtgatacgagcgaagctggatgattcttccaatgaagggcaaaaggcttgatctttcttggagcttataccaacctgatttatttcttgttggaagtttcggactcacatcttaaccttgctgtgtgctgttgtgaccgttgcagaggttgcatgcttaagaaggcatcaagtattactggctcagctggcatcagaatatttgctcatcttcttggaactattttaaggaatcttttactaatgcttttgttgtgatgtctattcttgttattatttgagattactctgtgttttcactttaatgctctgttctttgtgacatgtgttaatctcactttattattcatatatattattcttcatcttgatttggtagtgctagcactcctctccatctggagcagaaaagcctgctgctccgtgctggttggtataacttcaaaaatttaaatgcttgtttggtatcttctgataatctgtcatgcatttctttcttacgtcttcacctaagttgtttggcagttgtcgtgacagcttggcacaggcagccagagtttttagcacgtgatgaatgaatatcaggtataatggaggtgctgtgaattgttctgtgaacccaatgttttcatttggtttctgcacaattttctactgacaaacagtaacgagtttcccatttggtagttgatgtgtgtgcattagggtaaccaagcatgcacgcatgctggaaaaaaatctttgatgaagagcttacatatatattttgcattgctaatgctcttttaacatcattggaatttttgtttgcggttcaagtaggacatgctggcgtgcagatctagtctggagtcctatgctcaaggtgcatactgtcacaatgatatttgtgagatgaactgaaggggtgtattgagaaagaagaaattggaatctgctgatgtttaggaggaagtggatgtctgaaatttgtgacctaaacaagcacaaagaagttacaaaatgagacatgaattttgtaccattgtcactgtgaattgctttgaagtcatcctttggaatcttattttacaaccaaaaaaaa

SEQ ID NO: 2250 - DNA, 3676 bp, Zea Mays
cgaaacccctaattctccattgatcttttcccttcagaaaacagagcgagtccaattcgagacggctctccccacatcaccacagcgcagccgcaaccatggcttccgccgaaaccctagcccgctccccctcacgcgagccctcttccgacctgacccgcgccgactcttccgagccccaccacaacatcgatggctccggcgcgggcgccggagactcatcccgccgccgccgccgctcccgctgggagcagtctaacgacgactccgccgccaacaactccggcggcgagggcgggaccgggggccggaagcgcaagacgcggtgggccgaggaggagccgcgcccggcgatcgcgctcccggacttcatgaaggacttcgccgccgagatggaccccgaggtgcacgccctaaacgcgcgcctcctcgagatctcgcgtctgctgcaatcgggcctcccgctcgacgatcgccccgagggggcgcgctcgccctcccctgagcctgtctacgacaacctcggcatccgcatcaacacccgcgaataccgcgctagggagcgcctcaaccgcgagaggcaggagatcatctcgcagcttatccgccgcaaccccgccttcaagcccccctccgactaccgcccacccaagctccagaagaagctctacatccccatgaaggagtacccaggctacaactttatcggcctcatcattggccctcgtggcaacacgcagaagcgcatggagaaggagactggtgccaagattgtcatcagggggaagggtagtgtcaaggaagggaagctgctccagaagagggacctcaagccagatcccagcgagaacgaagacctccacgtgcttgttgaggcagatacacaggaggcactggatgcagctgctggtatggtggagaagctgctcaccccggtggatgaggtgctcaatgagcacaagcggcagcagctccgggagcttgccgcgcttaatggaacaattagggacgatgaattttgtaggacatgtggtgaggctggtcacaggcagtatgcttgccccaacaagatgaacacatttaagagtgatgttcagtgcaagatctgcggggacggtgggcacccaactattgattgtccggtcaagggcacttctgggaagaagatggatgatgaataccagaacttcctggctgagcttggtggtgggagtgcacctgagtccatgaacaaatctggtggtccgatgttggctcttacaggaagtggtggtagcggtggtgcttctactggaactgggagtaacccgccttggtcggccggtggtggtgccgcttccactgggctcaatggtatcaagaaagattatgacgagacaaatctttatattggatacctgccacctacaatggacgatgcaggtttagtcagtctgttttcgcagtttggggagattgtcatggctaaggtgatcaaggatcgaaacactggacagagcaaaggatatggatttgtcaagtattcagatgtgtcacaggccaatgcagcgattgctgcaatgaatggtcaccatcttgaagggcgagttattgcggttagagttgcaggaaagccgccacagacagcaccagcagtgtcagcacccccatcatatcctcctccggatcctacttcaggtggctattcctcccagtcctacatgggggcaccaccacctcctcctccagggagttatgctccagttccttgggggcagccgccaccatatgcttcatatcctccgccaccaccaggctctggtgtctacagtcctgcaccccctgcaccaggtcaagctgccccacctccgtatgggatgcaatatccaccaccaccaccacccccagcagctccaatccctccaccaggcactgctccatcaagtgatggagctcagaactatccacctggtgtaacaccaccaagttctggctcatccactcaccctgttgcaacatcagtatatgcatcatctggtgcaccaaatgcaccatcgatataccctccaccaccttatagttattcctcatactaccctccaccatttcagccaccacctccaccaccaccaccaccggctagtgttgatccctctcagagtattgcaactgcaccttggctaacccacagtgtggtggtgccaccaccacccacgagtgttgatccttctcagagtatttcaactgcaccttggttaacccacagcgcagtgccgccaccaccaccacctttgtcctccacaaccgaccagtctactgcttcctatggtgccgatgcagagtatgacaagtttatgtcagagatgaagtgatacgagcgaagctggatgattcttccaatgaagggcaaaaggcttgatctttcttggagcttataccaacctgatttatttcttgttggaagtttcggactcacatcttaaccttgctgtgtgctgttgtgaccgttgcagaggttgcatgcttaagaaggcatcaagtattactggctcagctggcatcagaatatttgctcatcttcttggaactattttaaggaatcttttactaatgcttttgttgtgatgtctattcttgttattatttgagattactctgtgttttcactttaatgctctgttctttgtgacatgtgttaatctcactttattattcatatatattattcttcatcttgatttggtagtgctagcactcctctccatctggagcagaaaagcctgctgctccgtgctggttggtataacttcaaaaatttaaatgcttgtttggtatcttctgataatctgtcatgcatttctttcttacgtcttcacctaagttgtttggcagttgtcgtgacagcttggcacaggcagccagagtttttagcacgtgatgaatgaatatcagtaggacatgctggcgtgcagatctagtctggagtcctatgctcaaggtgcatactgtcacaatgatatttgtgagatgaactgaaggtttggaggttggctcagattagtttttgctaagtaaagtaggatattaccataatcttgtcctagtgaaataatgcgatagtcagtccacaaccagcattaagtacctttatcacgttgcatatatatcagtttgatgtgacctcgtatctagcattagccacctcaatttgcactacaaattttattaagccttcgatttcttgtatgaaaaatgcttgagccaacctggattactggttgcagcaatgaggaatcctaaatcaagtttgtcagctgagtgcacacaattattatggattaatatactttattctgggcttgtttcactgttttcaattcatccaattaatcgtgattaatcgtccaagtcagtttggacaaatcgcgattaattgcccaagtcatctgactaatcgtgattaaacgttcaagtcggtcagctagaatgaccagctagtggtccgacttgaaaacaatggcttgtttttataggagttctagtttgtagctatttaaaaatcatagttaacagaaaatacaatggaataaacagtttgtgtgccactaatttaaaatggggaaggtaatttcacagtaagaaatgatctaggtgttctttgtttttttcttgcttgtttgcaactagtgagaacatt

SEQ ID NO: 2251 - DNA, 4140 bp, Zea Mays
tttcccttcagaaaacagagcgagtccaattcgagacggctctccccacatcaccacagcgcagccgcaaccatggcttccgccgaaaccctagcccgctccccctcacgcgagccctcttccgacctgacccgcgccgactcttccgagccccaccacaacatcgatggctccggcgcgggcgccggagactcatcccgccgccgccgccgctcccgctgggagcagtctaacgacgactccgccgccaacaactccggcggcgagggcgggaccgggggccggaagcgcaagacgcggtgggccgaggaggagccgcgcccggcgatcgcgctcccggacttcatgaaggacttcgccgccgagatggaccccgaggtgcacgccctaaacgcgcgcctcctcgagatctcgcgtctgctgcaatcgggcctcccgctcgacgatcgccccgagggggcgcgctcgccctcccctgagcctgtctacgacaacctcggcatccgcatcaacacccgcgaataccgcgctagggagcgcctcaaccgcgagaggcaggagatcatctcgcagcttatccgccgcaaccccgccttcaagcccccctccgactaccgcccacccaagctccagaagaagctctacatccccatgaaggagtacccaggctacaactttatcggcctcatcattggccctcgtggcaacacgcagaagcgcatggagaaggagactggtgccaagattgtcatcagggggaagggtagtgtcaaggaagggaagctgctccagaagagggacctcaagccagatcccagcgagaacgaagacctccacgtgcttgttgaggcagatacacaggaggcactggatgcagctgctggtatggtggagaagctgctcaccccggtggatgaggtgctcaatgagcacaagcggcagcagctccgggagcttgccgcgcttaatggaacaattagggacgatgaattttgtaggacatgtggtgaggctggtcacaggcagtatgcttgccccaacaagatgaacacatttaagagtgatgttcagtgcaagatctgcggggacggtgggcacccaactattgattgtccggtcaagggcacttctgggaagaagatggatgatgaataccagaacttcctggctgagcttggtggtgggagtgcacctgagtccatgaacaaatctggtggtccgatgttggctcttacaggaagtggtggtagcggtggtgcttctactggaactgggagtaacccgccttggtcggccggtggtggtgccgcttccactgggctcaatggtatcaagaaagattatgacgagacaaatctttatattggatacctgccacctacaatggacgatgcaggtttagtcagtctgttttcgcagtttggggagattgtcatggctaaggtgatcaaggatcgaaacactggacagagcaaaggatatggatttgtcaagtattcagatgtgtcacaggccaatgcagcgattgctgcaatgaatggtcaccatcttgaagggcgagttattgcggttagagttgcaggaaagccgccacagacagcaccagcagtgtcagcacccccatcatatcctcctccggatcctacttcaggtggctattcctcccagtcctacatgggggcaccaccacctcctcctccagggagttatgctccagttccttgggggcagccgccaccatatgcttcatatcctccgccaccaccaggctctggtgtctacagtcctgcaccccctgcaccaggtcaagctgccccacctccgtatgggatgcaatatccaccaccaccaccacccccagcagctccaatccctccaccaggcactgctccatcaagtgatggagctcagaactatccacctggtgtaacaccaccaagttctggctcatccactcaccctgttgcaacatcagtatatgcatcatctggtgcaccaaatgcaccatcgatataccctccaccaccttatagttattcctcatactaccctccaccatttcagccaccacctccaccaccaccaccaccggctagtgttgatccctctcagagtattgcaactgcaccttggctaacccacagtgtggtggtgccaccaccacccacgagtgttgatccttctcagagtatttcaactgcaccttggttaacccacagcgcagtgccgccaccaccaccacctttgtcctccacaaccgaccagtctactgcttcctatggtgccgatgcagagtatgacaagtttatgtcagagatgaagtgatacgagcgaagctggatgattcttccaatgaagggcaaaagatggtaaggaagtcagtagaactcgaagacaacatttcttttgatagcatatgatattatcagattatttttattgagaatgcctggattttttgggggatctgatatatgatgcactttctcaggcactgcggtttatacagaattgttttttagactatgtgctttatgctcccaccccctctcttttccatacaaaatgcttggtatacttattatacctcaccttttctatgttgtcttgacttcttgacaggcttgatctttcttggagcttataccaacctgatttatttcttgttggaagtttcggactcacatcttaaccttgctgtgtgctgttgtgaccgttgcagaggttgcatgcttaagaaggcatcaagtattactggctcagctggcatcagaatatttgctcatcttcttggaactattttaaggaatcttttactaatgcttttgttgtgatgtctattcttgttattatttgagattactctgtgttttcactttaatgctctgttctttgtgacatgtgttaatctcactttattattcatatatattattcttcatcttgatttggtagtgctagcactcctctccatctggagcagaaaagcctgctgctccgtgctggttggtataacttcaaaaatttaaatgcttgtttggtatcttctgataatctgtcatgcatttctttcttacgtcttcacctaagttgtttggcagttgtcgtgacagcttggcacaggcagccagagtttttagcacgtgatgaatgaatatcaggtataatggaggtgctgtgaattgttctgtgaacccaatgttttcatttggtttctgcacaattttctactgacaaacagtaacgagtttcccatttggtagttgatgtgtgtgcattagggtaaccaagcatgcacgcatgctggaaaaaaatctttgatgaagagcttacatatatattttgcattgctaatgctcttttaacatcattggaatttttgtttgcggttcaagtaggacatgctggcgtgcagatctagtctggagtcctatgctcaaggtgcatactgtcacaatgatatttgtgagatgaactgaaggtttggaggttggctcagattagtttttgctaagtaaagtaggatattaccataatcttgtcctagtgaaataatgcgatagtcagtccacaaccagcattaagtacctttatcacgttgcatatatatcagtttgatgtgacctcgtatctagcattagccacctcaatttgcactacaaattttattaagccttcgatttcttgtatgaaaaatgcttgagccaacctggattactggttgcagcaatgaggaatcctaaatcaagtttgtcagctgagtgcacacaattattatggattaatatactttattctgggcttgtttcactgttttcaattcatccaattaatcgtgattaatcgtccaagtcagtttggacaaatcgcgattaattgcccaagtcatctgactaatcgtgattaaacgttcaagtcggtcagctagaatgaccagctagtggtccgacttgaaaacaatggcttgtttttataggagttctagtttgtagctatttaaaaatcatagttaacagaaaatacaatggaataaacagtttgtgtgccactaatttaaaatggggaaggtaatttcacagtaagaaatgatctaggtgttctttgtttttttcttgcttgtttgcaactagtgagaacatt

SEQ ID NO: 2252 - DNA, 1938 bp, Zea Mays
cccaccttcctctcttctcccctcacccctttctggctttctcctccgccgaggccccgagtcctgccggaattctagatcccggaggcaacttgccacgggctcctccgctccggtcgctgaatcgtactatcgtgctctcgacagaaagcccggccgaaacccagccggaccaagccctgttcgccgtgcgcgcggtgccccgggccagatctgcgagatctgcaccgacaccgctacgcctatcacgaggtggatgctctcgtgatctctcggagtcccctggactgagcggcatctcggcggaggcgtagcctgcttagctggtggcctgccgagatgcagcggaatggggtggtggaatgcagcgtgtgccactcccgggtggtggtgccgagtccccggagcgtgtccagggcatacgacaagcaccgcagcaagatgtcgtccaagttccgcgcgctcaacgtcttcctcgttgtcggcgactgcatccttgttggtctccagcccatcctagtgttcatgtcaaaggttgatgggaagttccagttcagtcccatcagtgttaactttctgaccgaggttatgaaagtcatctttgctattgtgatgcttataattcagtctagaaagcaaaaggttggagaaaagccactcttggcacgttcaaccttcatacaggcagcccgtaacaatgtacttctagctgttcctgctcttctgtatgccatcaacaattacttaaaattcatcatgcagttgtacttcaatcctgcgactgtgaaaatgttaagtaatctaaaggtactggttatagctgttcttctgaaatttataatgagaaggagattctcagttattcagtgggaagctcttgctttattgcttattggaatcagcatcaatcaacttcgaactgtacctgcgggcaatacagcatttggtcttcctgtcactgctattgcatacatatatacattgatttttgtaactgttccttcaatggcttctgtctacaatgaatatgccttgaaaagccaatatgacactagcatttatcttcagaacttgtttctgtatggatatggagcaatattcaacttccttggcattctaacgaatgtcattttgcagggccagagagttttaatattcttcgaggacattcgagggccacgatgtttctcatatgtaataatgcagcacaaggcattctatcttcattcttcttcaagtatgcagacacaattttgaagaagtattcgtcaactgttgccacgatatttactggcctagcttctgctgcatttttggggcataccttgaccattaattttctcctgggcatatcagtggtgtttatttcaatgcaccagttcttctctccacttgctaaagtcaaagatgacaaaccagctgacttaatagagttggaagacacacaaaatcaccggtcatccgaatcttcttttgtaaatatgactgctggtgctgctgttgatgcgagccataggattggaactgatgagaggcaacccctgttgcctacatgaactagtttcttgaggtagggatagatgactctttttttgcggtgtgagcagcaggtttggtgtagcattgtaagttgaataaactattgtacactgtaaaggcaaaggaaggaaagaactaccaacatcttctccaatttctttcatttttgggacgaggccggtcggtggcctgccatctgtggccgtgggagtgacagagcagcatacattttgataggcgtataattcaatagggattttccagatacggcacttgtaacaaaattttcttggaggtgtatatgaacaacggcgatatgacaatcttttctgtacggaacatttatactattgagtgattgatttactattactatgttgttacttaattgtatttcca

SEQ ID NO: 2253 - DNA, 3517 bp, Zea Mays
ctgttacacgcgggcaaagacaagaaagagaaaaagcccatgttgggagggggtaacgtgcgacccactccaccgatgcagcgcaatagcgcaagctctcgccgccttcctcctctccttatcctcctgacctcctctgacctctgcccccccctccattcccatttcccacgcggcaggcagctagccctacctctggtctcctctgccacctcctcccctgccacctcctcccctgcctagggtgcgccttcctcgccggacgccggcgcagggtcgggacgcttccgctgccgcgcgttccacgacccctctctgggagacgaaactcggcgccggcttggtagatacagacctgggattgccttttcctagttcagcatggagggcactctagttcagtctgcggttgttccaaccgtttacagaagcagctcaggtcggttccgtgtgcgtgcaagggccagaaccaatgctacaatggtgcgaaatatgccaacaaggactcttactcttggtggtttccaaggattgcgtcagacaaactttttagacacgaggtccgtgatcaagcgtgactttggatcgatcgtggcaagtcagattgcaagaccgcgtggatcagcctcaagaggggtggttcgtgccatgtttgagcgcttcactgagaaagcaatcaaggtgattatgcttgcacaggaggaggcaaggcgcctgggacataactttgttgggacagagcagattttgctggggcttattggtgagggcacgggtattgcggcgaaggttctgaagtctatgggaatcaatcttaaggatgcccgagttgaagtcgagaagataattggacgtggcagtgggtttgtggctgttgaaatcccattcacacctcgtgcaaaacgtgtattggaattgtcccttgaagaagctcgtcaacttgggcataactatgtaggatctgaacacttgctccttgggctacttcgtgagggtgaaggaactgatgttcgatatgatgttcaggtcataagaatggttggggaaagcacagaagctgttggggctggagttggtggaggaagcagtggccagaagatgcccacacttgaagaatacggtactaatttgacaaaattagcagaagagtcgtttggtagacaagatcagattgagcgtgttactcagattttgggcaggcggacaaagaaacaacccctgcctaattggagagcctggtgttggaaaagactgctattgctgaggggcttgctcagcgtattgccaatggggatgttcctgaaacaatttgaaggaaagaaggttattactcttgacatggggctccttgttgctggaactaaataccgaggagagtttgaagagagactaaagaaacttatggaggaaattaagcaaaatgaagacattattctctttattgatgaagtgcacacactgattggagcaggtgcagcagaaggtgcgattgatgctgctaatattttgaagccagctcttgctagaggtgaacttcagtgcattggtgccacaacactggatgagtataggaagcatatagagaaagatcctgccttggaaagaaggtttcaaccagttaaggttccagagcctactgtggatgaaacaatacagatcttaagaggacttcgtgagagatatgaacttcatcacaaactgagatacacagatgatgctttaattgctgctgcacagctgtcttatcagtatatcagcgatcgtttcctgcctgacaaagccattgacttgattgatgaagctggatctcgtgttaggctgaggcatgcgcagctccctgatgaagccaaagagctggacaaagagctgcggcagataaccaagcagaaaaatgaggctgtacgtggccaagatttcgagaaggctggcgaattaagggaccgagaaatggagcttaaggctcaaattacagccattattgacaagagcaaggaaatgattaaagcagagactgaatctggtgaagtcggtccgcttgttactgaggcagacattcaacatattgtctcctcttggactggaattcctgtggagaaagtgtcatcggatgagtctgaccgcctcctaaagatggaagagacgctgcatacacgtatcattggacaggatgaggctgtcaaagctattagccgtgctatccgccgtgctcgtgttggcctcaagaatccaaataggccaattgccagcttcatattctctggaccgactggagttggcaaatcagagcttgcaaaggccctggcggcctactactttggctcggaggaggctatgatcaggcttgacatgagtgagttcatggagcggcatactgtctccaaactcattggatcacctccaggttatgttgggtacactgagggaggccaactaactgaagcagtccgtcgccgcccgtacacagttgttctctttgatgagattgagaaggcacatccagatgttttcaacatgatgcttcagatcttagaagatgggcggttaactgatagcaaggggcgcactgttgatttcaagaacacactattgatcatgacatctaatgtcgggagcagtgtcattgagaagggaggtcgcaagattgggttcgaccttgattatgatgagaaagacacaagctataacaggatcaagagccttgtgactgaggagttgaagcagtacttccggccagagttcttgaacagattggatgagatgattgtattccggcagctgactaaattggaggtgaaagagattgcagacattatgctgaaagaagtgtttgacaggctgaaggccaaggacattaatctccaggtgacggagaagttccgagatagagttgttgacgaaggttataacccgagctatggtgccagacctttgcggcgtgctatcatgaggcttctggaggatagtctggcagagaagatgctggctggtgaggtgaaagaaggtgactctgccatcgttgatgtggattcagatggcaaggtaatagtcctgaatggtggtagcggtgttgctgagccactggaacctgctctcagtacctaaccgaggttaaaatctttgggccgaaatggccttctttacaagtcagctgggctcttcgtgatggtaaagtagactgttattacttggccgctccattagttgctttatctttcattgatttttttttgttggaagtgaggcagtagggtcactatggaaacgaatagacggagaggcattagccgaaatgaatgtttttcagtttgatgcacttgtattattaggccttgctagcaacaaggtgcagatgcctctccgtttgctgttgtactttagtgtaacttaccttccgaatgtattattaggcgttgctagcaacaagatacggaggttatacatttgattttcagtaaaaaggtagactctttgttgcgccgcagctgttttattgtctgcgcactgcagtgttcgttca

SEQ ID NO: 2254 - DNA, 1220 bp, Zea Mays
cgccactacgccggccccaacggcccaagccaagcggtccaggccacgggctcgtcggtcgtcgcctcgcgggtctcaactgcgctgcctccggccctccgggtgatcacgtcgcgacgccgcaaccaagcttccgagtcccgacgacgacctgccttgtccagtgatttcattggacagagttatgagtgcagtggaggaagatggatgtagtttacggtgtgatctatgcgacactgagattgtacacagcatggcagaactcctgcttcgtggattggccacagcttcagtggacagcaccacgggcgatatattcaagagcgcatcttctgtagctgctgctgtgaagactgagctagaaaattatatgcttgtgagaactgaatcgcttatccgtgagtttgtcgatggagcccaggatcattcagatcaattgatgaaagcctccacaaggccaaccgagttcctatcagacttgattggcgacttcgtggcatccaaaaggaacttgctgagccatgtgtctgggtttttgtccagtgaaagccgcttgaacagaattaaagattttatgcagaagatggagatggagaatgtgtggacactggacgtaaggcaggctacctcagagactattcttgaaagcatagacatgaagtgcattttccactgccccgaaaaatttgttgagcaagacaagctggtagaccatagaagtcggtgcaaatttagagtcgtgggctgcgaaaatgatggatgctcagtttcactttctgccattcatagtgaggagcatgactccatctgtccatttaaggccctgccatgtgagcagctgtgcgagcaacatgttatgcgcagcgagatggataaacattgtgcaacagtttgtgctatgaagcttattaactgtcctttctaccatgttggatgtgaaacagcctttccacaaggtaatcttgagaaccactgttcgaagctacttcaaacgcatatgttgtatgttctccaagcaagtacaagacaaaatgctgctgttaatgatatgaatcaacgattacaacttcttgagaaggctcagtcacttaacgaaatctctggggctttagatgttaggtcgctcactctgataataaaggagcaagaagcaaagatcaaggatcttgagagcggtatcaaagcacaagaagcaaaggttctgggcttgtacatagcaa

SEQ ID NO: 2255 - DNA, 1021 bp, Zea Mays
ataacgcatgatgcgatgtgtcttatctaacttgggtatccgatgcagggctatctgcaatcgcggaaaactgccctctgcataggctaaacttgtgcgggtgccacctaatcaccgataccgggctgacggcagttgccagaggatgccctgatctagtcttcctggatatgagcgtccttcggatcgtaggtgacatagcgcttgcggagataggcgacggctgtccgaagctgagagagatcgcgctctcccactgccctgaggtcaccaacgtcggcctgggccaccttgtgcgagggtgcctgcagctggagtcctgccagatggtctactgccggcggatcaccagctccggggtggcgaccgtcgtctcgggctgcgggaggctgaagaaggtcctcgtggaggagtggaagatcgaaaatgttgtaccagatgttgtatcagaagtgatgaccaaataaagacgagacgaaggaagtggcaagagcttcatcaaatgctgtaccaaattgctgttactcgtcttgtacctcgagtgcttcttcgatttctatgccacgtgttcacgtcctcaagtcaggcatgtgagatataggaaagaattgtattatcatcaaactttaaaatgttgtgtggactgttttaatttactcacaatgtgttgcacagatcgaaaatgttgtaccagatgttgtatcagaagtgatgaccaaataaagacgagacgaagtggcaagagcttcatcaaatgttgtaccaaattgctgttactcgtcttgtaccttgagtgcctcttatgtcacgtgttcacgtcctcgagtcaggcatgtgagatataggaaagaactgtattatcatcaacttaacgtcagaaagttgttagtgctgttcagcagaacatcgctacgtagttcacgagccgttacaaacactcctccgaatatcattacacaacgaatggcaagcactatctcttcacttttttttattttggtggtgtattttctccagaatc

SEQ ID NO: 2256 - DNA, 1251 bp, Zea Mays
tgtccgcccgccgccagccccgcctctgcggctgcgcttgtcccgcactcctgctgtccgctcgccggcctgtcccgcattcccgctgctgaaggaagaaggattgagccattaactcgagcaagggtcccaatagtgaagcttatggatccaaaaacagggctttcctgtgatatatgcgtcaataatcttttagcagttgttaacacaaaacttttgcgagattatggacaaatagataaaaggttacagcagttggcattcattgtgaagcattgggctaaaactcgacgtgtaaatgaaacttatcaaggaacactttctagttatgcctatgtgattatgtgcattcacctcctacagctgcgaagaatactcccatgtctacaggaaatggaggccacttattatgtcaaggtggaagaaatcaactgtgcatactttgaccaagtggacaagctaaataattatggtgctcacaacagagatacagtatcaaggctgctctggtcctttttccattactgggcatatgagcacgattacacaagagatgtcatatcaattcgtactggaaggattatcagtaaggaacggaaggactggactagacgagttggaaatgacaggcatctcatatgcatcgaagatccgtttgagatctcccatgatctcggtcgcgtagttgacaagttcaccatcaaaatactcagggaggaattcgagcgagcagctaatatattacagttcgatccaaaccccagcgtaacactctttgagccctacgtgccccctccatcgccgagcctgttgcaagaagaaactgcgaatgctgcagaaattgaactatgatagcgtttggttcgtccccaggtattgtaataggaaatagaatcaactcaaggattttgatccttgcatcactggttgcagcctttggttggatgtgtaaatggtattgtttaccgttacagctgtttggtttctatctcagggatcacaagtcagttcccgaacttaaaaatcattcgtggtatgttctatttcaactcaagggatcacaagtcagctaccatatcacatgtcctattttatttctatttcaaacttcattcggcaaatagtggtgcgaattctctatttggacagccaaaagtcagcaccatacgtataattttggttcacatatgaaagaggtcaaccaattattgtatgtcgtacaacaaatgggatgaataggatgacatcaag

SEQ ID NO: 2257 - DNA, 2215 bp, Zea Mays
agaggtgcctccttccgagcatcctaatcctgaataaaaggcaggctcatctttgcacagagtcattggaggaagtttgatgtttcagcagtactgtgacctttattagatgtctttccgcagcattgtgcgtgatgtaagagatggctttgggagcttgtctcgaagagggtttgaggtgaagtttctgggccaccgccgaggcagatctcacggtgctgtccatgagctgcgtgatccagccccagtgatccagagcagttgctgggctaatttgccccctgaattgcttcgagatgtgattgagaggttggaggccagtgaagccacatggcctaacaggaagagtgtagtctcttgtgcagctgtttgtcggacctggagagaaatctgcaaagagatcgttaagaatccagagttctctggaaaaatcacttttcctgtgtccttaaagcagcctgggcctcgagatgtaaccatccaatgcttcatcaaaagggataaatctactcaaacctactacttgtatctgtgccttagcacagctgtgcttgttgaaagtggcaagttcctcctatgtgcgaaacggacctcccgcccaacctgtacagaatatacaatatttatgaattctgaaaatttatctaggtcaagcaaaatgtacattggaaagctgagtggtgagaactatctcactgagtcaccaggtcgtgagttcgaagcaacctcttcgcatttgcggggagaaggcttgccttggtttattccttccccagactccactcatgtgggagcttccggcactgggtctgtccctttttatgtatcactaatatatctatggcattgaacatctataggtcgaatctcctcggcacaaagtttgcaatatatgatacccagcccccatgcaatgcagcagaacccgggaaaacaagccgtcggttctactcccggaaggtgtcgccaaaggtctcctccagcacctacaacatagcgcaggtttcatatgagctgaatgtcttgggtactcggggccctaggcggatgaactgtgttatgcactccatccctacctcgtgccttgaggctggtggcactgttcccagccagctggacagcatccttgctcgctctactgatgagtcatttggcagcatttccttctccaagtcatctgttgtggaccggtctatgcgtttcagcagctcaagattctccgacatctcaatgagcagcagccgcaggattggagacacggcatcgggagacaatgatgagtgcaaggagaggccattgattctccggaacaaggccccaaggtggcacgagcagctgcagtgctggtgcctcaatttcaggggcagggtgacagtcgcatctgtgaagaacttccagctcgttgctgccacgcagcccgctgctggagcaccaaccccatcacaggctaccccagtgccgcccgagcacgagaaggtgatcctgcaatttgggaaggtggctaaggacatgttcaccatggactaccgttacccactgtcagccttccaggccttcgcgatctgcctgagcagcttcgacaccaagctggcctgcgaatgaagccaccagtcatggctcaaagtcaaggacgatctgtctgtttcacgaagacggtggccccaaattttgctgggccaccattctgttgtatgttgttgatgccttcttaacttacctaggaagctgcgtttagacattttgcacctgatctacagctgctgctgtgtttctgtcctgatcgcattgttttccatagctttgctctgtggagcggcaacttgatctgccctgcccttaactagccggcaggtttattaatttggttttccatactatggttgtattaactgagaagagactccgacactttcgttgtgcctacctaagttctgtctgcctttgccctctgggatatgcaaatgtgcatcttgtaaaatttctgaattgcttttgtggcaagtcatagtaataaaagaactagcttccattcgattgcctgtttgggtacgtgttcctccaagtgaccactggccactgcaagcggcaacgccggcgaggtttttttcttgtttaaagtgcatgttttttttttgaattattatgtgcatgcttgtgctcgtaaaggcaagtgcttgcgaccttgcgtgtttgtgttctacaaaagaaaaaaaaa

SEQ ID NO: 2258 - DNA, 1063 bp, Zea Mays
ggagagctgctggcggctgcaactaggagagcattggaaatttcttttttgctggggcacgcatattcttccagtcgttggatgctgcaatttttttgttttcacgcgtatcacagatcccagcagaaagtcttgtgcttcctgttatatccacaaatgacagacttactctgggatgtgaactatgggatgggactatcattcgtggccaaaatgaaatatcacatccaagcaatggacgccgagaaattgtcaacaaggattgtaattcatgtagcacacttccttcaaggatcaagcgtgtgttttacatgtcaagtgaaggcagcaacctattgcatgaggttttccctgaagttaaccatacagttttggagcagctaagtaaggtggactgcattgtctatgctatgggatcactctttacatcagtctgtccatcactggtattacgtggcattggtgagactatagcatcaagatccatccccaagagagactgctgggctgtctgcctctggttttgtcactgcaattaccgattctctaaatcggacttatggcgaccctcacaaaagcttaaagaatcatgtaagtttgttatatgttccgctaacaatttactggtagaatctgaagctatggaggagtcagacattgcgatttcgagaatgcaggaggccaagttcctttagatattgaaaatttggcagctcagggaatttttcatgtggtaaccgtgaagtctattcatgaccctaaagttggcgtcatatttgatgcacggtcattgatccaagccctaaccattctcatatctgaacatatggatatgtgtgtatcaaaagttcagaacgtggtcatgtaactgaaaatgtaaaagttgtaagctgatctttcaagtacaaaaatgaatgtaaagtccctcttaacaatttattgttttactaatcgatccatagtgcgaatactcatgtttttatttcagctagcactagtgttgcaattctgcctgacttgacatgattaatgaaaaatgagacatgtatttttcaatttctgt

SEQ ID NO: 2259 - DNA, 3090 bp, Zea Mays
ccacgggaagacagactgagtctgagagagagagagagaagagagagagagagagcacacgcaagacgagcgtcgccttctccgaatcccctccttgccaaacacgagctgcctaaccaaatccgtccacgctgtctcgtcccctcggcatcgcagtctcctacccaaatcgtcctcgtttcctcctccccgaactgacccgctgttgccgacggctagtaggatgacgaagctgacctcggagctactgcggccggtggttccggcggcggcgctggacgaggcggcgctgctgcgctacctggtggccaacgtcccgggcttcccgggccccgcgcccgcgctatcgctgacccagttcgggcacggccagtccaaccccacctactgcatccacgcctccgcgcccggcggggggcagcccaggcgctacgtgctcaggaagaagccgcccggggccatcctccagtccgcgcacgccgtcgagcgcgagtaccagtcatttcctatcgggaagcaggttctcaaagctctgggggatcacacagatgttcctgtcccgaaggtttattgtctctgcacagatgcaagtgtaattggaactcctttctatataatggagtatctggaaggaataatatatcctgatagcgcgttgccgggggtaactccatctaaaaggcgggctatatatttgtctactgccaaaactttggctgctatacacaaagttgatattaatgccattggattacaaaagtatgggagaagagacaattattgcaaaagacaggtagaaagatgggagaggcaatatcttgcatccactggcgaagggaagcctgcacgttaccagaggatgcttgatctagctcgttggttgaaagaacatgtaccagaagaagattcctcaccaggaccaggaacaggccttgtgcatggaccgagtaattggcgttattgattgggaactatctactttggggaatcagatgtgtgatgttgcttatagctgcttgccatatattatcgatgcagcacccagtgcaaggacttcttatggagggtttcaagatactggcattccagatggaattcctcaactggaagagtacctttctatatactgctcttttgctgcaagaccctggcctgctgcaaattggaagttctacattgctttttctttgtttcgtggggcatctatctatgcaggagtatatcacagatggactatgggtaatgcatcaggtggtgagcgcgctaaatttgctggcagggttgctaacgctatgattgactgtgcctgggacttcataaatagagtaaatgtcctgcaagaactgccttctaagggttctcaagtcttaggagcatcgtggcaagaatttcacagagaggaagaaagttcaacttctgaaaagaatcaaggaaaatttgttcctagtgaaaaggttatgcagcttcgaaagaaactaataaagtttatcgaagatcacatatacccaatggaggctgagttctacaaacatgcacaatcaacctcaagatggacaattcatccagaagaagaaaatcttaaagcattggcaaagaaggagggcctatggaacttgtttattccgctagacagtgcagcgagagctagaaagctattgtttgaagaccattctcaaatttcccttggaagttcgaataatcttttgctgggcgcgggtcttacaaatcttgaatatggatatctgtgtgagattatgggacgttcagtttgggctccacaaatatttaactgtggtgcacctgatacaggtaacatggaggtcctgttgaggtatggcactaaggagcaacagaagcaatggttagttcctttattggaagggacaattcgttctggatttgcaatgacagaaccacaagttgcatcttcagacgcgacaaatatagaatgctcaatatccaggcaaggagatttttatgtgataaatggaaggaagtggtggaccagtggagctatggatcctaggtgcaaaatcctgatattaatgggaaagacagatttttctgcacctaagcataagcagcagtccatgattttagtggacatcaacactcctggggtgcagataaagagaccattgttagtctttggttttgatgatgcacctcatggacacgcagagattacatttgaaaacgtgcgtgttccagtaacaaatatcctgcttggagaagggcgtggttttgagattgctcaaggaagacttggtcctggaaggttacatcattgcatgaggctagtaggagcagcagaacgtggcatgaatctgatggtagagagggccttaaacaggaccgcatttggaaagaggattgcacagcatggttcctttttatcagatcttgcaaagtgtcggattgaactggagcaggcaaggcttttagtccttgaagctgccgatcaactcgatcgacatgggaacaagaaagcacgtggtatcctcgcgatggccaaggttgcagctccaaatatggccctgaaggtgcttgacatggcgatgcaagttcacggcgcagctggtgtctcgtctgacacggtcttgtcgcacctatgggcaacggctaggacactgcggattgcagacggccccgacgaggtccatctcgggacaatcgccaagctggaactgcggagggctaggttgtaactcgagggcgatgtacagctcgcccgtcttgcgaatgaataaagaaggaacatcacccgtcgtcatttaacgtccatgtgaatacttagatgaataaataaatcctactttcagtagcagttactcttattttcaataaaccatatataatatcaatctttaataaatcatatcatttactcatcttcattaaatttatccatcttcaataaaccatattatatatgtgtacatatttacctacacacacacacttattctaagatactctaaatcttgttgagtgatttttttcttccaaaaaaggactcatgtttgtaatatgttattgtaatactattatacatataataagtatcagcgtatgcgaaggtcacgattg

SEQ ID NO: 2260 - DNA, 3106 bp, Zea Mays
ccacgggaagacagactgagtctgagagagagagagagaagagagagagagagagcacacgcaagacgagcgtcgccttctccgaatcccctccttgccaaacacgagctgcctaaccaaatccgtccacgctgtctcgtcccctcggcatcgcagtctcctacccaaatcgtcctcgtttcctcctccccgaactgacccgctgttgccgacggctagtaggatgacgaagctgacctcggagctactgcggccggtggttccggcggcggcgctggacgaggcggcgctgctgcgctacctggtggccaacgtcccgggcttcccgggccccgcgcccgcgctatcgctgacccagttcgggcacggccagtccaaccccacctactgcatccacgcctccgcgcccggcggggggcagcccaggcgctacgtgctcaggaagaagccgcccggggccatcctccagtccgcgcacgccgtcgagcgcgagtaccaggttctcaaagctctgggggatcacacagatgttcctgtcccgaaggtttattgtctctgcacagatgcaagtgtaattggaactcctttctatataatggagtatctggaaggaataatatatcctgatagcgcgttgccgggggtaactccatctaaaaggcgggctatatatttgtctactgccaaaactttggctgctatacacaaagttgatattaatgccattggattacaaaagtatgggagaagagacaattattgcaaaagacaggtagaaagatgggagaggcaatatcttgcatccactggcgaagggaagcctgcacgttaccagaggatgcttgatctagctcgttggttgaaagaacatgtaccagaagaagattcctcaccaggaccaggaacaggccttgtgcatggtgattaccgccctgataatctagtttttcatccaacagaggaccgagtaattggcgttattgattgggaactatctactttggggaatcagatgtgtgatgttgcttatagctgcttgccatatattatcgatgcagcacccagtgcaaggacttcttatggagggtttcaagatactggcattccagatggaattcctcaactggaagagtacctttctatatactgctcttttgctgcaagaccctggcctgctgcaaattggaagttctacattgctttttctttgtttcgtggggcatctatctatgcaggagtatatcacagatggactatgggtaatgcatcaggtggtgagcgcgctaaatttgctggcagggttgctaacgctatgattgactgtgcctgggacttcataaatagagtaaatgtcctgcaagaactgccttctaagggttctcaagtcttaggagcatcgtggcaagaatttcacagagaggaagaaagttcaacttctgaaaagaatcaaggaaaatttgttcctagtgaaaaggttatgcagcttcgaaagaaactaataaagtttatcgaagatcacatatacccaatggaggctgagttctacaaacatgcacaatcaacctcaagatggacaattcatccagaagaagaaaatcttaaagcattggcaaagaaggagggcctatggaacttgtttattccgacagtgcagcgagagctagaaagctattgtttgaagaccattctcaaatttcccttggaagttcgaataatcttttgctgggcgcgggtcttacaaatcttgaatatggatatctgtgtgagattatgggacgttcagtttgggctccacaaatatttaactgtggtgcacctgatacaggtaacatggaggtcctgttgaggtatggcactaaggagcaacagaagcaatggttagttcctttattggaagggacaattcgttctggatttgcaatgacagaaccacaagttgcatcttcagacgcgacaaatatagaatgctcaatatccaggcaaggagatttttatgtgataaatggaaggaagtggtggaccagtggagctatggatcctaggtgcaaaatcctgatattaatgggaaagacagatttttctgcacctaagcataagcagcagtccatgattttagtggacatcaacactcctggggtgcagataaagagaccattgttagtctttggttttgatgatgcacctcatggacacgcagagattacatttgaaaacgtgcgtgttccagtaacaaatatcctgcttggagaagggcgtggttttgagattgctcaaggaagacttggtcctggaaggttacatcattgcatgaggctagtaggagcagcagaacgtggcatgaatctgatggtagagagggccttaaacaggaccgcatttggaaagaggattgcacagcatggttcctttttatcagatcttgcaaagtgtcggattgaactggagcaggcaaggcttttagtccttgaagctgccgatcaactcgatcgacatgggaacaagaaagcacgtggtatcctcgcgatggccaaggttgcagctccaaatatggccctgaaggtgcttgacatggcgatgcaagttcacggcgcagctggtgtctcgtctgacacggtcttgtcgcacctatgggcaacggctaggacactgcggattgcagacggccccgacgaggtccatctcgggacaatcgccaagctggaactgcggagggctaggttgtaactcgagggcgatgtacagctcgcccgtcttgcgaatgaataaagaaggaacatcacccgtcgtcatttaacgtccatgtgaatacttagatgaataaataaatcctactttcagtagcagttactcttattttcaataaaccatatataatatcaatctttaataaatcatatcatttactcatcttcattaaatttatccatcttcaataaaccatattatatatgtgtacatatttacctacacacacacacttattctaagatactctaaatcttgttgagtgatttttttcttccaaaaaaggactcatgtttgtaatatgttattgtaatactattatacatataataagtatcagcgtatgcgaaggtcacgattg

SEQ ID NO: 2261 - DNA, 2773 bp, Zea Mays
catgcgaatactgctggagttggcctaacccaacgaccagacgcaacacgacggcgacggccatggcttcgccggacctcgccgccggcgacggcagctacgactttcaccttcgctctctctccgcggcctcacgggactccgctgcggcctccgaccccgcctctgaccccaacctcctccaatctgagggtgtgcgagatgtgccgaacggcgaaggaagcgaaggacgagatggtggcgcgggcgttccccgtgatgggcaagctatttcagcgatgcgccgccgctcccacgcaggccgttgcctccaccggcgtgctgctcctcaccattttgcaattcttcttggattttggggaggctgttttgcatgatgctgatggtagcttgaaaaccttcttccgctcttgcttaagtagggagtttgcagatcctattgttgcagagcgcacagttgaattccttgtaacaaacaagacaaagatccttagctcctttcccaatttgattccacaggtgccaacacttgaaatatttacttacttggaattgacaattcccacatgtagctcctattattcatgctgttgcagatcattgctttgaaaaactgaaagatataaatccagcttccttctttgttttatagcatatttgtcaattttttatgtgaatggtgggggaggcccctacatgtatttcttcactaacagaagcaaagaaatatttacaatacaggaggctgtaggccaaaaaggtagagaaaaaacagaaaaaaccatatttgtatgataagctactcaaccaatcttttgtaagattctttatagaatatctctcttctcttcctattttccatattcgacttaatcttgttaacacatgccaatgcttgtgtatccttgtttatacacagttctatccattgttgttaaagcttattgcatcaaacggtgagagactggagaataagttttcggaagtacttccattaatgatgtcagcaggatcttttcttcccctcttcctatcccttatggatttgccaatgttggtggtggcactggaaaaggtggaaagaagttctggaactcttattggtagtagtatagctacaatccagaagagcgctgctcctgagatgcttcttgcactgatggacgaggcatatactggttctgccgtagaagaacctagtggtaattcaggttctgatgatagtggtcccctagaccttactgacccaatgttcttagaccttctaaaagatgagaatgatggcattgccgcaaaacattggatatcccctacgatatcttcaacgttacaagcagcatttaacagcccacagtcggacagattgaaacagtcactggaaatggcacctcgctttcttactttatattttgcaacagcattgcgagacgttaatgactcactgctgtgtgctcttattccagtagttatgtcaagatatgctgcaatgttcccagacaaagttttctctttcaaggtgagggaaaggctttcagacttcattttggctgcattccagcggtctcccaacatcattgcagtactgaagaaacctattactgacagacttggtgaggctcatgataatcttgccaagacagagttagcattgcacttgtgctgggccattggtgagcatggagctggaggggtgggtcacaaggatgtagctcgtgaactatttgaaaatttggagttattattgtatgaaaacctggcaactagccgtttgggattaagccaagagccaggatctgattccatgggtgcatcatctagaaagtcatcccaagccaggcttctctgctttgtggtgactgctattgcaaaattagcaacatgccacagtgagttgcttccgagggcacgcgtgtcattgggtaaggtcgctcgttcccgaacctcagacaggagggtctggcaacgggcctgtgactatttagggctcatgaatgaaccagccatctgtttatctgtactgggaccgtccaccgcccaaggaaatggtcctggtattgtgaattggagtgaaggaggaacaaagatggtagctcatgttcctttttaccttttagcccagcaaaaaggtccaccgtctcataatttttcatttgccgacctcctcccaacagaatgaagaaaatatctgcatgagtgcattggtgcaggcatgatttctctagcagaaggccatataacgattttgttttgaagatccaagttcctttttaaaaaaggggctggtctgaacattcaggcttatttctctagcataatactcataaagagtcctgtacttttaggtcttgttcggttattcctataatacatggattgatggaattaaaaaaaatttagaagaactttgacttgcttaggaattcaacacatctaatcccactcaatccatatggattgagagctaatcgaacaagtcttacatggttgactatgcactcgagttatggaatgtatggtattacatttctaagtggtggatcgtagtgtaaaaaatgtacacgtctgaatttgttcgaaatgacaagtatctgttttgtttgaaatgacacgtctgaacttggcatagaagtgcatgaaaaatagaaggtcgaaaggttacattctttcgaaaacagcaggaatattaggccatggctctataagtaaactaactgagaatttaaaagctgcaaaatagcagtgaagacactcagcaataacgcaagtatgcaag

SEQ ID NO: 2262 - DNA, 2873 bp, Zea Mays
catgcgaatactgctggagttggcctaacccaacgaccagacgcaacacgacggcgacggccatggcttcgccggacctcgccgccggcgacggcagctacgactttcaccttcgctctctctccgcggcctcacgggactccgctgcggcctccgaccccgcctctgaccccaacctcctccaatctgttaggagggtgtgcgagatgtgccgaacggcgaaggaagcgaaggacgagatggtggcgcgggcgttccccgtgatgggcaagctatttcagcgatgcgccgccgctcccacgcaggccgttgcctccaccggcgtgctgctcctcaccattttgcaattcttcttggattttggggaggctgttttgcatgatgctgatggtagcttgaaaaccttcttccgctcttgcttaaggagtttgcagatcctattgttgcagagcgcacagttgaattccttgtaacaaacaagacaaagatccttagctcctttcccaatttgattccacaggtgccaacacttgaaatatttacttacttggaattgacaattcccacatgtagctcctattattcatgctgttgcagatcattgctttgaaaaactgaaagatataaatccagcttccttctttgttttatagcatatttgtcaattttttatgtgaatggtgggggaggcccctacatgtatttcttcactaacagaagcaaagaaatatttacaatacaggaggctgtaggccaaaaaggtagagaaaaaacagaaaaaaccatatttgtatgataagctactcaaccaatcttttgtaagattctttatagaatatctctcttctcttcctattttccatattcgacttaatcttgttaacacatgccaatgcttgtgtatccttgtttatacacagttctatccattgttgttaaagcttattgcatcaaacggtgagagactggagaataagttttcggaagtacttccattaatgatgtcagcaggatcttttcttcccctcttcctatcccttatggatttgccaatgttggtggtggcactggaaaaggtggaaagaagttctggaactcttattggtagtagtatagctacaatccagaagagcgctgctcctgagatgcttcttgcactgatggacgaggcatatactggttctgccgtagaagaacctagtggtaattcaggttctgatgatagtggtcccctagaccttactgacccaatgttcttagaccttctaaaagatgagaatgatggcattgccgcaaaacattggatatcccctacgatatcttcaacgttacaagcagcatttaacagcccacagtcggacagattgaaacagtcactggaaatggcacctcgctttcttactttatattttgcaacagcattgcgagacgttaatgactgtaggttgcatacttttttttgcatgcttttttttgctacacatgttaagtgaccaacatattgttgatttgacaatctaagtttcttggttcagcactgctgtgtgctcttattccagtagttatgtcaagatatgctgcaatgttcccagacaaagttttctctttcaaggtgagggaaaggctttcagacttcattttggctgcattccagcggtctcccaacatcattgcagtactgaagattatctttctcactgtaactgaaatttactgatggactgtggccagtgcagacagagttagcattgcacttgtgctgggccattggtgagcatggagctggaggggtgggtcacaaggatgtagctcgtgaactatttgaaaatttggagttattattgtatgaaaacctggcaactagccgtttgggattaagccaagagccaggatctgattccatgggtgcatcatctagaaagtcatcccaagccaggcttctctgctttgtggtgactgctattgcaaaattagcaacatgccacagtgagttgcttccgagggcacgcgtgtcattgggtaaggtcgctcgttcccgaacctcagacaggagggtctggcaacgggcctgtgactatttagggctcatgaatgaaccagccatctgtttatctgtactgggaccgtccaccgcccaaggaaatggtcctggtattgtgaattggagtgaaggaggaacaaagatggtagctcatgttcctttttaccttttagcccagcaaaaaggtccaccgtctcataatttttcatttgccgacctcctcccaacagaatgaagaaaatatctgcatgagtgcattggtgcaggcatgatttctctagcagaaggccatataacgattttgttttgaagatccaagttcctttttaaaaaaggggctggtctgaacattcaggcttatttctctagcataatactcataaagagtcctgtacttttaggtcttgttcggttattcctataatacatggattgatggaattaaaaaaaatttagaagaactttgacttgcttaggaattcaacacatctaatcccactcaatccatatggattgagagctaatcgaacaagtcttacatggttgactatgcactcgagttatggaatgtatggtattacatttctaagtggtggatcgtagtgtaaaaaatgtacacgtctgaatttgttcgaaatgacaagtatctgttttgtttgaaatgacacgtctgaacttggcatagaagtgcatgaaaaatagaaggtcgaaaggttacattctttcgaaaacagcaggaatattaggccatggctctataagtaaactaactgagaatttaaaagctgcaaaatagcagtgaagacactcagcaataacgcaagtatgcaag

SEQ ID NO: 2263 - DNA, 3815 bp, Zea Mays
gagaatacagggtattactagaaaggaagaaacgggccccactgatgatcccgatggagatattatataactgcttctctcggtcttgagctaagcagcgcgcacgtcgtggtcattggcctccaccagatccgatgccttctttttcgctcttgctctgctctcatgggcagggcagggcatgcccatctacttgaattgcgatgcgtacatacatcgctgtctccatctagctgcacacatatatacatacatgcatacagagtgagagagaaacagatcgatctcacttagctgctgctgctgctgctgcttgctggtggcctgggcctggctgctgtgtctgtatcgatgtgtccgtattttctccatctcgtctgcatacgctgcaattggtaaggagctagctggcctttcatgtcttccatgctgccatagccatacggccggccggcaggcaggaggataccccatcgctcgctgcacatgcatgtatgcatggggatacatgttcatcatcagcagcacagtggctctgtatcccccatcccaatctgatcctatataggaggagaaggaggagcagcagcagcagccaggcgcggccggcggccggagtagtatccgaatccgctcaacacccaccggctggtctctagctttcctatcgatcaatggctttcaaaggactcccgcgtgattcccgagggtccctcgaagtcttcaatccagacgcccctgtttcagatcgagcaaccacctccccgtttctcctccctcctgcggccgcgtcccatcccagcctcctcgccgccggagatggcggcgatgctgacgtgggtcgggcgacacagagggccgccgagtggggcctcgtcctccagaccgacgagcacaccggccgcccccagggtgtcgtcgcccgtccctccggttccaaccgcaccagcgagagtggcaactccatcgacgagagggccgccgccgccggtgctggtagagctctcccccgggtgtcggaggagcttcgcgccgcgctctcagcgttccagcagaccttcgtcgtgtccgatgccacccgccctgaccaccccatcctctacgccagcgctggattcttcaacatgacgggctactcctccaatgaggtcgtcggaaggaactgccgcttccttcaaggttctgggaccgaccccgtagagatttccaagatcagacaggctctcgcagctgggtcaaattactgtggccgtatcctcaactacaagaaggatggtacaccattctggaacctcctaaccgttgcccccataaaggatgaggatggcagggtcctcaagttcattgggatgcaagtggaagtaagtaagtacacggaaggtaacaaagatactgctcttcgtccaaatggattgccagagtcactcatcaaatatgatgcaaggcagaaggatcatgctcgtagctcagtctcggagctcctacttgccctgaaggatccacggtcattgtcagaatcaagaaacaataccttaaaaaggaaatcacaggaatcagcaggttcagctctagttcccggcaagagaagctccgaaactggatcccgtcgtaactcacatagtggaatgagaaactctctacaaaaaatcagtgaggtgcctgaaggagggaataagaccaggaaatctggtttgcgttcttttatgggccttattggtatgggacatgggaatgtagagaagaacattctaaaaccaagggaagatcccctacttgatagcgatgatgagagaccagatagcttcgatgacgatttcaggaagaaagaaatgagaaagggcatagatttggctaccacacttgaacgtattgaaaagaattttgtcatcaccgacccgaggttaccagataatccaattatatttgcatcggatagctttttgcgtttgacagagtattgccgcgaagaaatattgggaagaaactgcaggtttcttcaaggacctgaaactgaccgtgggacagtaaagaagataagagatgccatagataaccaaacagaagttactgttcagctgataaattatacaaagagcggtaagaaattctggaacctctttcacttgcagcctatgcgtgatcagaagggtgatgttcaatacttcattggggttcaattggatggaactgagcgtgttcgagaggctgctgcaaaagatggtgccatactggttaagaaaactgcagacaatattgatgaggctgcaaaggagcttccggatgctaatttgagacctgaggatctatgggctaatcactcaaaaccagtcttgccaaagccacatatgaaggatactgcatcgtggagagccatccaaaaggttcttgagaacggtgaaagcattgatttgaaacatttcagaccagtaaggcctttaggatctggtgatactggcagtgtccacttggtggagttgcttggcacaggtgaatactttgccatgaaagctatggataaaagtgtcatgcttaaccgaaacaaggtccatagagctaccgctgaacgacaaatccttgatatgttggaccacccattccttccgacattgtatgcatcatttcagacaaagacacatatatgtcttattgttgactattgtgctggtggggaactctttatgctccttgataggcaacctatgaaggttctgaaggaggatgcggtcaggttctatgctgcagaagtggtcacagcacttgaatacctacattgccaaggtataatctacagagacttaaagccagagaacattttacttcatagagatgggcacatttcattgacagactttgatttgtcttgcttgacatcctgccgaccacaagtgtttcttccacacgatattgataagaagaaaaagaggaggaagagcaggagtaatcccatattttttgctgaaccaatgcgagcatcaaattcttttgttggtacagaggagtacattgcaccggagattattaccggagctggccatacgagtgctgtagattggtgggcgctaggaattcttctatatgagatgttatatggttatacaccgttcagagggaaaacaagacaaaggacatttgctaatattctgcacaaggatatcagatttcctgcgagcatacaggtgagcctggcggcaaggcagctgatataccggttgttacaccgagaccctgcaaataggctaggttcctatgagggcgctatggagatcaaacaacaccccttctttcgtggcataaactgggctctagttcgtgccgccacgcccccagagctggaggctcccctccaggatacattggaggccacactgcctcctcctgcagctgatggggctcacaccgatatgttctgatcatacattggtccatgatgctacatgttaatttgcttaaaggaagaaaaaatattagatgatgaagatgcatgactttggcatagatgagaacaataatgtatgttaaggactaattatcttgatccatctatgcatgctcacaattagaataagattggatgtgtatattgtttctgtggttgcaatatacgcacgagtctatgaaaggacctatggatagcttgaggggatgacagacactaggcatgttgattagtactccctccgtttcgttttacaagtcgtttccaacagcttcgtgctgattaaggaatctatgaatcaatgattctgccctcccacaagcctcggcttaggccttggcatttcgtccaaccttatccggtaaacacctgctgtaag

SEQ ID NO: 2264 - DNA, 2345 bp, Zea Mays
aagggagggcggccccagcacaagcgccgcccattgatcgctttcctctccttccctctcccctcccagtcgctcgcctaaacctcaccagcgaccagtcgccatcaccatggatggacccgcctccccctccgccgccgccgagactgatacgcggggaggagaagctccatccaaagccaagcgaggcaatgccgaggagaaatatcaacatggacaaccggtttactttcctgaggaactaatggacaattgggtttctttttctcttcgtggcttgtattattgctacaacatctcgttgcaagggtcttgcaacacaactgctgatccaacggacataattttagctgtcaaatgtgacatggggcctgacttctttcggtactcttttaacttgggtggtactgatattaccattaagtacctgtacaagattcatctgaatcaggaacaggtactttttgctagaagattccagatcacggttctttctttgctcattaacagtaacagttcggaggtcagcaatgctataaaatacttccgtgaatggcaggtagatttgggggttgtctatctacttctgcccacagcgtcaggcaaaattgattggtgcggtatcaagttctcaacatcatcagcatatgatgtgactgataaaaatatgagacattgccattcttgtaaagatgctgatatactgcagacaatggatgacccttgctgcaggtgcatacttcagaattctgttgtatatgcccctcgtgaacgaaaattttatattattacaggacttgacttaaatgcaaaccaacctctggatttgaacaataggagtgctgttagctgcaaaagtaaaccactgttggtcgccagtggattattcacagtgcaaaacttcctctacaaatgctacggaaaaaggaaagaacctacgagtgttaagttgccacctgaactctgcaaaatagtcatggcaccggtgtcagcaaatactttgttcagcttctcatttgtgccttccataatgtaccgtatccagtgtctgcttctttctgcaaagttgaaaatccagttgggcccaagaatgcaacagttcaacataacagctatgaagggatacattcgaggtgaactatttaacccccaaaaatggaccattccagggttcggttatgactcacgcggtaacaacaaggttttcttccgagcaaccaataatatgtacagtctgaagaaaatatccataaaaagcaagagaattgctgatacagtggaagccttgactggggcctacctcagtacttgtggtgaactggctgcagttcattttatcaaagcactaggaatggatgttgaactgcatagtaaaatgcaagttgaaaggactattacaacaaaatctgaagaattaattgacgcggaaagcttgcagacaatgctcaaatatgtgttctatgatacttcactgttagtagaagcattgacacatagttcttacaatattactggtattacagcttgcaatgagaaaataccccaattgtacaccagcactgttgacaaatctacgaaaagcttctgtgaacaactgttgctatgcacatgcagctgttaaagcagggttacacaagcacattcttcattcatcgtcaaaacagatggttaacgatcttgagaattcagggcggtcattttcaggcccatcacatggttgggaagctggcattagtctcccggaggatctcgcagatttgtttgaagcaatagctggcgcaatttacgtggacagcgggaacgacaaagaggttgtctggagtgccatcaggcggctactggaacctcttgccacccccgggaccatggagcctgaccccgtgtcggaactgaaggaattatgcgagcacaaacactaccctaagccatcgtactctccaactcgtgacagtgtagctggagtgacaagggtggttgcacaggtgacggctgcgcggactgtgtactccgggactggaacaggccgcaaccaggatgtggcagaggttctcgctgcaaaggctctgctcaaaaagataaaggccgcagcaagaggatgaagcttggacttggcttggaccgggcgggcatttgatatttgggaatttgcgcacatgatagctgttctcgcagaggtaacaaaacaaactactgtagtatataaatgttgtgtatatgaatcaaggacagttgaactacccttggtttcgatagctgcaaaatacaaaacaaaaaaaaactcgaatctactatgcacagtggcttcatgtggtggacccttaatgaaatgatgaattctacgtggc

SEQ ID NO: 2265 - DNA, 2712 bp, Zea Mays
cgagacttcacaaggatggccttcgcttccgtccgaagtctcctcgctgccggggtgtcaagggagggcggccccagcacaagcgccgcccattgatcgctttcctctccttccctctcccctcccagtcgctcgcctaaacctcaccagcgaccagtcgccatcaccatggatggacccgcctccccctccgccgccgccgagactgatacgcggggaggagaagctccatccaaagccaagcgaggcaatgccgaggagaaatatcaacatggacaaccggtttactttcctgaggaactaatggacaattgggtttctttttctcttcgtggcttgtattattgctacaacatctcgttgcaagggtcttgcaacacaactgctgatccaacggacataattttagctgtcaaatgtgacatggggcctgacttctttcggtactcttttaacttgggtggtactgatattaccattaagtacctgtacaagattcatctgaatcaggaacaggtactttttgctagaagattccagatcacggttctttctttgctcattaacagtaacagttcggaggtcagcaatgctataaaatacttccgtgaatggcaggtagatttgggggttgtctatctacttctgcccacagcgtcaggcaaaattgattggtgcggtatcaagttctcaacatcatcagcatatgatgtgactgataaaaatatgagacattgccattcttgtaaagatgctgatatactgcagacaatggatgacccttgctgcaggtgcatacttcagaattctgttgtatatgcccctcgtgaacgaaaattttatattattacaggacttgacttaaatgcaaaccaacctctggatttgaacaataggagtgctgttagctgcaaaagtcggtattctttttgtatgctctggatgtggccttcgtttgacctctgaaagtaaaccactgttggtcgccagtggattattcacagtgcaaaacttcctctacaaatgctacggaaaaaggaaagaacctacgagtgttaagttgccacctgaactctgcaaaatagtcatggcaccggtgtcagcaaatactttgttcagcttctcatttgtgccttccataatgtaccgtatccagtgtctgcttctttctgcaaagttgaaaatccagttgggcccaagaatgcaacagttcaacataacagctatgaagattctggaagcacttacaacaaaggaatgccaggagaaattttcaatggaatcattagaaacacttggagattctttcattaagtatgttacaggccaaaatctttttaacaaatacaaacatcgagaggacatgctaacctctatgagagaagaaaaggtctccaacccagctctatgccagctagcttgcaaaagcgaaattgtgggatacattcgaggtgaactatttaacccccaaaaatggaccattccagggttcggttatgactcacgcggtaacaacaaggttttcttccgagcaaccaataatatgtacagtctgaagaaaatatccataaaaagcaagagaattgctgatacagtggaagccttgactggggcctacctcagtacttgtggtgaactggctgcagttcattttatcaaagcactaggaatggatgttgaactgcatagtaaaatgcaagttgaaaggactattacaacaaaatctgaagaattaattgacgcggaaagcttgcagacaatgctcaaatatgtgttctatgatacttcactgttagtagaagcattgacacatagttcttacaatattactggtattacagcttgcaatgagaggcttgaatttctcggagatgctgtattggactacatcttaacttattacttttacagaaaataccccaattgtacaccagcactgttgacaaatctacgaaaagcttctgtgaacaactgttgctatgcacatgcagctgttaaagcagggttacacaagcacattcttcattcatcgtcaaaacagatggttaacgatcttgagaattcagggcggtcattttcaggcccatcacatggttgggaagctggcattagtctcccggagatttgtttgaagcaatagctggcgcaatttacgtggacagcgggaacgacaaagaggttgtctggagtgccatcaggcggctactggaacctcttgccacccccgggaccatggagcctgaccccgtgtcggaactgaaggaattatgcgagcacaaacactaccctaagccatcgtactctccaactcgtgacagtgtagctggagtgacaagggtggttgcacaggtgacggctgcgcggactgtgtactccgggactggaacaggccgcaaccaggatgtggcagaggttctcgctgcaaaggctctgctcaaaaagataaaggccgcagcaagaggatgaagcttggacttggcttggaccgggcgggcatttgatatttgggaatttgcgcacatgatagctgttctcgcagaggtaacaaaacaaactactgtagtatataaatgttgtgtatatgaatcaaggacagttgaactacccttggtttcgatagctgcaaaatacaaaacaaaaaaaaactcgaatctactatgcacagtggcttcatgtggtggacccttaatgaaatgatgaattctacgtggc

SEQ ID NO: 2266 - DNA, 2768 bp, Zea Mays
ttccctggtgctttacaccgcagagaatcccgtcaacccatggccaccacaccgctgcttgcactagatactaggcttgctctcatcctttccactcgtcgtcttccacggcttccacgccttgccttgctgctgatgctactccatttcctcccccggtacagcctgacccaacaaacgcacccccaagctaccaacgcacgcaaagcacggacgggcgcatacagctttccctttcgcgagtgcgtgccccttctcttctctagttctcttctccgtcgcgtcagagatcagggagagaccagagcaaacaacaaccaccgcttgtttcatcaagaatcgtggaggagaaccgaaaggtgtagtagccttttccggtagggcatctgctagagccggccggttgaagcaggggagcgagaggaggagggcagccgagcaggagcatcgcagtggtggttaagcagcagcaacgacgacgacgacgacgctgagaggtttccccgttcccgacggcacgtccaccgaggcggcgccatcgcgatgggtcctctggcgccgctgaggtgtaacccgccgccgccgttctccaagtcgccggggtccctgctgctgctgtccaagtcgctcaccctctactgctgagccgagccccctcctcgatcggttccatgggcgccgtggcctcgtcggcgggtggggcccggggaggcgatggcacggtgctgggcgacctgccggagaactgcgtcgcggaggtgctgctcaggctggacccgctggagatctgccggatggcgcggctcagccgcacgttccgtggcgccgcgtccggggacggtgtctgggagtccaagctaccgaggaactacgcgcgcctcctcgccgttgctgcggccggcgatggggaaggtgggcaggccgccgcgtcggcgccgggggcagagctgctgcccaagaaggaactgtacgcgcggctttgccgtcggaaccgtttcgacggcggcaaaaaggagttctggctggacaagggcggtggaggtctatgtatgtcaatttcttcaagggcgctttcaataacaggcattgatgataggaggtattggaacttcattcccagtgatgaatcaaggtacttcaatctactagcaatcaaaatctccttggcaattttctactgatcatgctttattatatataaataaaaaccccagaatcttgaagcatatatttggttaccggattgcatgtattattatttggcggtgttgggattgcatatatcaatcacatcttgtttgcttcaaccatgtttagtgacctggtgtatatgacgatcaacatagtgagtgtgttgaatcgagtacttggagaaaataggacatatgctagctttaatgcctatccagttattgcttcaactgtacgtacttgttattttacctgcaccgcttgtgcagattccgcacggttgcgtacctctcgcaaatctggtggtttgaagtgagaggggaggttgaattcttcttcccagaaggcacgtacagcctattctaccgcattcatctcggccgaccattcaagcgtcttggccggcgagtctacagctcggagcacgtccacggctgggacatgaagccggtgcgtttccagatgtcgacctccgacggacagcatgttcagtccaagtgctacttgagcgatcccggtatctggatcaaccaccatgtcggggacttcgtcgtgaaggactcgagcaggccagtgaacatcaggttcgcgatgattcagatagactgcacgcacacgaaaggcggcctctgcgtggattcggtcgtggtgaaacctcagcacctctcgcagaaaaaagcgccctggacttacgtgtagactcgtcgaacaagttgctgctgctgtctagggaggagggatatgatccatagtttccttttggattgttctactaccagatgtgcgttttgtttacagaagtgcggttttttacatttgcacttatacgcgtattttgcagtcatgtaatgtaattgaaggggtaagtgatttttttagttcctcttgtcccccctaggaacatgttggacctctgtaaattgttcgtttgaactttgaaatgtacatcggctgtgttctgcctatcaacttgcactaccaaaccatttgtcggcctaaatttccactaacattccgaattaacaggatttgtcatgcacatgcacctatattagtatcgtccattaggataggaactacacataatgtcttgttcttgattgcgctgttgttgccagaggacgagagctggaatatgccacacaatgcaaacatgcttctgcagctctgtcactgttcaattcaggcgtgacattgttattaaactcaatgaaagattgtgcccgggttcaattcaggcgtgacattgttattaaactcaatgaaagattgtgcccggggctgacgaatgtacggctagggcaacaacttgagagaggacaccgactgtccagccaccatcctaaaatcatccttccgcctcaagaatcaagaaattattatgcatcatctccattccgtcggtatggcatgcaccgatgatctttggaagcattcttcctcctccgcttttctatgaaggcatcaagctttcctgcctcttgcgagcaatgaacacaaatgttaagaaccgggacaaataccccccattgttcaaaaagaactcccagaaaaccttgtaaactttacctgagctc

SEQ ID NO: 2267 - DNA, 1388 bp, Zea Mays
gacagtgagtatcacttgttgtgtgtctctctctgtctgagtctctgccaccaaacgtttcttttttagctcaccatacaattgtgaccccgcttgctatataaacagtcaatcatgcattcttggcagcaaagccaaaaacacaaagcccggaccggacgggaagggaggcccaaccatccatctgtccagccgcacctcccagcagcagccatataagctactccctactagctacgaggggatacgagaggcgaggagagacgccgccggactgccgtgcccagcgcccgtgaccatcccatcccatccggtcggtcgtacatgaaggaccgccgtggcagctcctccgtcggcggcggcgagcgcttcgccgtcttccccttctccatgggctgcatgtcgcagtccgccgtgtccgtcgccgaccccggcgacaagaaggcgcagggggacccgtcctccactgccgccgccacggtggctcggggagcaggttcatcggaagaaggcgccggcgaggccatgacgaaggagaaggccgtggcgtcgtcggcggcggcggcgacggctacggcgccgggtctcgtggcggccggggtgtcgaggctgatgaaggggatccggagcctgtcgcagatgttcgcgggggaggacggcggcgaagatgaggacgacgaggaggaggagcgggagatggtgatcgggtaccccacggacgtgcagcacgtggggcacatcggctgggacggccacaacagcaaggcgggcgccgccgccgcggccatggctggcatggtgaacgccttctccctgccctcctccctctccctccgccacctcgacatggccatggaccgcgccgtcgcgcacgcctccgcctgaacccggcctgatgaccgcgcgcagctccgacggccggtatcgtacgtagctactagattccgcggttccgccatttgattgcttcacacgttcgtacgcggagaaggaaggatatgatcgattcccatgcctccagtttgctgctgcttgttaatgccgccggccggtccctgttcttgccagtccagtgccatacgtgcgtgaaagtctctcgctttctgtgtcatatcatatccggtgtgagctactatagcgtagagcatgagacgacaagcgtatttgtgtacatacgtgcatgccaacttgtatagtttgtgaggcttcgccatcacacaccccacggtgcctgctggagctcatgtcagtatgtgtgtgtgtgtgcctgccactgccagtgacctatataactctgcgtgtgatttgtaattaactcccacgtttcaatttttgcaaaaaaaaaaatgatcatcttattactggccataataaacaaaaagaaaaaa

SEQ ID NO: 2268 - DNA, 2332 bp, Zea Mays
ccggcctcatccgccccgccccgcccgcctcccggcctcgtcgtctcctcgtccccccactcccgtctcgtccgctttctttaatcaatcctccgcgccccacaaccccaagcaactcccactaatcgtcccctttccttccctttcccggcgggggcaacaatggtcggtgacggcgatcggtttgctgcatcggcggttcctgcggcgccgtgcaggtttctcggtcacctgtgagctcgatttgaccgcccccacctggcgtcgtgctggttccgttctgggtattcttggcgctggtctgggctctggggcgatcgggacacacctccgctctgcttatcgagggtcgaggcacccgacgatcttctccggaaaagcgccctactcttcataccatcaggaatggagtttgagtctgaagatgctgcaagggatttctacagcacatatgcaagaagtgcaggttttcggattcggatcagcagattgtgtgttctaaggaaggcttccgtgaagttcggaccaagaaagtgttgacagatgaaggaaaaacaaagcgcccaagaatgataactagagttggttgcaaagctatgattgtagtgaaaaagatgaactctggaaagtggatggtttcgaaatttgagaaggagcataatcattcgctgtcatattctaaaatggtccctagtacctcaaacattacttctggagaaattgtcgatttagctgcaaagggtgcacatcctagtgaagtaaaaaatgaaggatacagtgcaggaacccaatgtaatcctgcagattccctcactatactttataacaacttatgccaggaggccataaaatttgcaaaagaaggttcagtcacagaagaaatttaccatgtggcagtttctgccttaaaagaggctgcagaaaaggttgctgaagtcaaaaggagtcgtccaacattgtcacattgtggtttcgttagagaaagcaaacatgatgtcttacaggagaaaagtatgagtgctttgcaatgttcaaatcaggttgaactgacaagaacatctcctgggtccaggcctcttcaagattctgcatcaaatcttctgctgataccaaccgacattttgactgattcaaggttatatagcggtgtcgatactgctcctctaacaggaggtttccccacaaatggtaaatatgctatggtaatgatcaattaatcaaatgcctttatacaactattgttttcttcatgacttgcttattccatcaaacagagagtgaaagtacacatgcatcagaaagttcttttatgcattttaagaacacaaagaaaacctcttcagaaaaatctcagaacacttgttttaatcaactcatccatggaaaggagcaaggtatccatggatcttctaaagataccatggttgctattcctgcgatacctcttgcactgtgcatgcctgtgacgcagagcttacctggatcttctacagaaggaccatatagattgttggctgcacctattgaagcagttccaatttcatactgccctgcagaacccataagacagacacaaaaaggtatttgtgctttaggtccatttggaggtgttctgtctgaactgaagaaccaaggaacagtccccaaatctatagttcatgctacagctcttgcttgtggtgctcgtgctgttcctcttgaagatgcagcttcgcttattagtgccattgaatccaaaatcagatctggaggggccataatagcgaaacttccttcaaacaacctagcacctctagttcctccagccattgctatgtcatcttctagtgaagatgacgaggagcatgaccacagtgagccctcgcaatgatcgatgtcgatcgcaacgttaatcatcagagctccaacgcgatgaagcttcagagggagctatcggagttcgaaactgaagctggcaactgacctggtctgaagacgaaagaaaatgatcatactgattgctaacatacgcgaagtgaaggactgaagttgttctaaagatcaaagcttccctgaaaggtggcagatctattctatgatttgagacattttttaaaagattggattaggattgtagtcacttgtttctgttgagtttatattgtaatcagattaactcaagttaatacctccagtggagaattgtagaaaggagtaaccatgctatgtacatgtcttctgcataaaagaaaggcgatagagtttaaaatccagctgtgctaaacatgatgttcataacctgaggcacccgtgtaaaactactagcgcctaccacattgggattggggtacag

SEQ ID NO: 2269 - DNA, 1739 bp, Zea Mays
tccaaagacagaaaaaaaagaaagggaaaaaagggggtctgctgtggactgtgtggtcccgcagggcgcaccattcacccgtcttccgccgagacaccctgcacggctcgccgagacttcagtttactggagcacgcaccgcagcgtctcccccttctgctcatcctccgtccctccgtcggaagggctggcgctaagggacgatccctccgtccgcccgtccgttcgacgggacctcggttggtttcgtcggtcgctgggaggacaggtgacggaacggtgatatgaggcggtggttatgttgtaactgccactatgacgtcgaggaagatgaccacgccaaggaacaggccaaagctcagagcaataagaccgactccaagcagaagtcttcaaagcctcctgtgctctgattggtgaaggttcttatggacgagtatatcatgccactttggacgatgggagacaagcagcagttaaaaaacttgatgcatctgaaaatgagcctaatgatgagtttctcaaacaggtctcactggcatcaaagctaaaacatgaaaatcttgttgagatgttgggttactgtgtcgatgggaattaccgtatactcgcatatgaatttgcaaccatgggttcgcttcatgatgttttacatggcgttcaaggtgcgcagcctggacctgtacttgactggatgcagagggtcaaaattgctattgaggctgcaaaaggtatagaatatctgcatgaaaaggttcagccttcaatcatccatcgggacatcagatcaagcaatgtactgctgtttgaggatttcaaggcaaaaattgcagactttaatcttttgaaccaagcaccagatatggcagctcgtctccattcaactcgtgtattggggacttttggatatcatgctcctgagtatgctatgactggccagctgacacaaaaaagtgatgtctacagctttggtgtggttcttttggaacttttgactggaaggaaaccagtagatcacacaatgcctcgaggtcaacaaagtttagtcacatgggctactccaaggttaagtgaagacaaggtgaagcaatgtgtagatcccaggttgaagggagaatatcctccaaagggagtcgctaagcttgctgcagtggcagctctatgtgcacagtacgaagcagagttcaggcccaacatgagcatcgttgttaaggcgctttcgcctctccttcaacaaagacctgcaccaaccaccgaagagccagctccacaacctgggagctgaaaccagtcacatgtgatgggacccctaggcataagccatctccgcaaccattcaatcagcacattctataaatcattgagagtattttgggtatttgttctgtagcgttctcagttgggtatagcatacatgaacttgcccctgctgtttgtggccacctagttcgtggcttgatgttggcgccgcacaatggtatatgaagttggttcgaagtttttttttaccttctctataccaataccaagtgaccaactgtttgtaggttttcataattcgcggcttgaagaatagatgcaggatggtctggatttttttttgtccgtggcgtggtgttgctgcctgacctacgtgatgtacttcctctcttccaaatcccaattcaccttttcttgttctaagctagaattatcaaactttgacttgtttatataaatatatttatggacgtctacaa

SEQ ID NO: 2270 - DNA, 2561 bp, Zea Mays
gccgccgccgttgaatggtcgggtagaggacgtaaccatggttcactgccgggccctttaaaagccgagccgggctcgtcccatccgccccacgaccgcttggcgcttcatcactcgttccctttcgaaagcccgcgcacgcacgtcggtcgtcccgacctcgatcggccgagatggcgacgccgaacgggcttgcgcggatcgagacgaccgggaagaagaagcaggacaacggcgtgtggtacgacgacagctcggcgccggtgcgcgcgcagaccatcgacgagctgcactcgctgcagcggaagcggtcggcgcccagcacgcccaagcggtcggcgcccaccacgcccatcaagggcggtgcccactcgcccttcgccgtcgcgatctccgaggaggagcgccacacgcagcagatgcagtccatcagtgcgtcgttggcgtctctgacgcgtgaaaccgggccgaaagtggtcaagggcgacccggccgcgaagggcgaggccgccgcgcagggcgcgccatcgacgccgagggcgcaccagcagcaccgccaccccgccgcccccgccatcgccgtcagcgacagctccctcaagttcactcatgtgctcaacaacctctcgcctgctgagctgtacgagcaggccatcaagtacgagaaggggtcgttcatcacgtccaccggcgcgctggcgacgctgtccggtgccaagaccgggcggtctcccagggacaagcgcgtcgtcaaggacgaggtcaccgcgcaggacctgtggtggggcaagggctcgcccaacatcgagatggacgagaagacgttcctgatcaacagggagagggccgtcgactacctcaactccctggagaaggtgttcgtcaacgaccagtacctcaactgggaccccgagaaccggatcaaggtccgcatcatctccgccagggcgtaccactccctcttcatgcacaacatgtgcatccgccccacagacgaggagctggaggacttcggcacgccggacttcaccatctacaacgcagggcagttcccctgcaaccgctacacccactacatgacgtcgtccacgagcatagacctcaacctcgccaggagggagatggtcatcatgggcacgcagtacgccggcgagatgaagaaggggctcttcggcgtcatgcactacctcatgcccaagcgcggcatcctctcgctgcactccggctgcaatatgggcaaggacggcgacgtcgccctcttctttggcctctcaggtaccgggaagacgacgctgtcgacggatcacaacaggcttctgatcggcgacgacgagcactgctggagcgacaatggcgtgtccaacatcgagggcggctgctacgccaagtgcatcgacctggcgcaggagaaagaacctgatatttggaacgccatcaagtttggaactgtgctggagaacgtggtctttgatgagcatactcgtgaagtcgactacgccgacaactctgtcaccgagaacactcgggctgcctacccgatcgagtacatccccaacgccaagataccatgcgtcggcccgcaccccaagaacgtgatcctcctggcgtgcgacgccttcggcgtgctcccgccggtgagcaagctgaacctggcgcagaccatgtaccacttcatcagcggctacaccgctctggtcgccggcacggaggacggcatcaaggagccgcaggccaccttctccgcctgcttcggcgcggccttcatcatgctccacccgaccaagtacgccgccatgctcgccgagaagatgcagaagtacggcgccaccgggtggctcgtcaacaccggctggtcgggtggcaggtacggcgtgggcaagaggatcaggcttccctacaccagaaagatcatcgacgccatccactccggcgagctcctcaccgccaactaccagaagaccgaggtgtttggcctggagatccccactgagatcaacggcgtgccgtcggaaatcctcgacccgatcaacacctggacggacaaggccgcgtacaaggagaatctcctgaggctcggcgggctcttcaagaagaacttcgaggtgttcgccagctacaagatcggggacgacagcagcctgactgacgagatcctcgccgcaggccccaacttctgaactaaagcaatggatccggatgaataaaacgatggcgtgcgtgcgtgggtgcgtgtgaagatgattacgacgacgacgacgaaaaaaaaggtgttggatcgatgagccaacatagtaatagattagctgggtattgtcatgggtgcgtctggtgttgttatctataaggctgtctgcctgtctcaagcagctatcatattctatttcaaattctattctgtaagcgtgtagttcaaaacaatgctttacacaaccatatgcacagtctatctaaggttggtctgttctatcagcttgttgggaaaagtttgcgtgtgcttgtatcttgccccctgtactctctctggtttctgaatttgaatacgaaacagcttgatcgcaatc

SEQ ID NO: 2271 - DNA, 2711 bp, Zea Mays
gccgccgccgttgaatggtcgggtagaggacgtaaccatggttcactgccgggccctttaaaagccgagccgggctcgtcccatccgccccacgaccgcttggcgcttcatcactcgttccctttcgaaagcccgcgcacgcacgtcggtcgtcccgtacgtgtgcccgtctatctatcctcctcgactccgtcgtgtctcttcaactccgtcgtgtcgtgtgcaatcgttgcatgcggcgaacgctatacatggtgctccgagagtgtccgggagcagagagcatcgatcaatggcggggagcaggacctcgatcggccgagatggcgacgccgaacgggcttgcgcggatcgagacgaccgggaagaagaagcaggacaacggcgtgtggtacgacgacagctcggcgccggtgcgcgcgcagaccatcgacgagctgcactcgctgcagcggaagcggtcggcgcccagcacgcccaagcggtcggcgcccaccacgcccatcaagggcggtgcccactcgcccttcgccgtcgcgatctccgaggaggagcgccacacgcagcagatgcagtccatcagtgcgtcgttggcgtctctgacgcgtgaaaccgggccgaaagtggtcaagggcgacccggccgcgaagggcgaggccgccgcgcagggcgcgccatcgacgccgagggcgcaccagcagcaccgccaccccgccgcccccgccatcgccgtcagcgacagctccctcaagttcactcatgtgctcaacaacctctcgcctgctgagctgtacgagcaggccatcaagtacgagaaggggtcgttcatcacgtccaccggcgcgctggcgacgctgtccggtgccaagaccgggcggtctcccagggacaagcgcgtcgtcaaggacgaggtcaccgcgcaggacctgtggtggggcaagggctcgcccaacatcgagatggacgagaagacgttcctgatcaacagggagagggccgtcgactacctcaactccctggagaaggtgttcgtcaacgaccagtacctcaactgggaccccgagaaccggatcaaggtccgcatcatctccgccagggcgtaccactccctcttcatgcacaacatgtgcatccgccccacagacgaggagctggaggacttcggcacgccggacttcaccatctacaacgcagggcagttcccctgcaaccgctacacccactacatgacgtcgtccacgagcatagacctcaacctcgccaggagggagatggtcatcatgggcacgcagtacgccggcgagatgaagaaggggctcttcggcgtcatgcactacctcatgcccaagcgcggcatcctctcgctgcactccggctgcaatatgggcaaggacggcgacgtcgccctcttctttggcctctcaggtaccgggaagacgacgctgtcgacggatcacaacaggcttctgatcggcgacgacgagcactgctggagcgacaatggcgtgtccaacatcgagggcggctgctacgccaagtgcatcgacctggcgcaggagaaagaacctgatatttggaacgccatcaagtttggaactgtgctggagaacgtggtctttgatgagcatactcgtgaagtcgactacgccgacaactctgtcaccgagaacactcgggctgcctacccgatcgagtacatccccaacgccaagataccatgcgtcggcccgcaccccaagaacgtgatcctcctggcgtgcgacgccttcggcgtgctcccgccggtgagcaagctgaacctggcgcagaccatgtaccacttcatcagcggctacaccgctctggtcgccggcacggaggacggcatcaaggagccgcaggccaccttctccgcctgcttcggcgcggccttcatcatgctccacccgaccaagtacgccgccatgctcgccgagaagatgcagaagtacggcgccaccgggtggctcgtcaacaccggctggtcgggtggcaggtacggcgtgggcaagaggatcaggcttccctacaccagaaagatcatcgacgccatccactccggcgagctcctcaccgccaactaccagaagaccgaggtgtttggcctggagatccccactgagatcaacggcgtgccgtcggaaatcctcgacccgatcaacacctggacggacaaggccgcgtacaaggagaatctcctgaggctcggcgggctcttcaagaagaacttcgaggtgttcgccagctacaagatcggggacgacagcagcctgactgacgagatcctcgccgcaggccccaacttctgaactaaagcaatggatccggatgaataaaacgatggcgtgcgtgcgtgggtgcgtgtgaagatgattacgacgacgacgacgaaaaaaaaggtgttggatcgatgagccaacatagtaatagattagctgggtattgtcatgggtgcgtctggtgttgttatctataaggctgtctgcctgtctcaagcagctatcatattctatttcaaattctattctgtaagcgtgtagttcaaaacaatgctttacacaaccatatgcacagtctatctaaggttggtctgttctatcagcttgttgggaaaagtttgcgtgtgcttgtatcttgccccctgtactctctctggtttctgaatttgaatacgaaacagcttgatcgcaatc

SEQ ID NO: 2272 - DNA, 2971 bp, Zea Mays
ctgccactcctgctcacctccgccgaccgccatatcctcctctacatccaccgccgctgccgtataggtcccgtcccctcgtcgccgcggctgcgctggtggggagcggagcggacggacggagatccgcccgcctcgggctccgctacgccggctgaagtccaagatagaagacggaggtccaaagcaagtacttgtggacatggaaaaagttgtgccctcgcttcctcttcatctccttgctgtatgtttggagcttgggcaaggcccggacttgacctatgtgcttcgtggcatccgttttttgcatagtttgtctgatctagcatcccgccatactagactggagcaggttctccttgatgatgtcaaattatccgaacaagtcatggacctgatattctttctactttctattcttgctgaacagaaggtagtcttcatctgttgacaaattacttctcttcccagtggcatgaacttgtccatattctgcttgcacatccaaaggttgatatctttatggacgtggcctttgatagtttgcatgaagatgtgaggctgttaagtatcagattatcatcaatgggcttcggtttctttcctgttggttctttggaatctcgtcttgctcacttcatctgtcaacagtgtgaagcatcattgcaatttctcttgttgttgtgccagcaaaagctatttcgagatcggattttaaaaaataaggaactctctagaaacggaggcatactgtcactttctcacactatactgaagttagttgtccctgaatgtttgaagcaatcaaccgaccttgttgcttctatttccaggctcaaggcaaagatactttctattctgttgcaactttgtgaggctgaaagtgtctcttaccttgatgaagttgccactaatccaaataacatgcggctagggcaaaccttggctctagaggttctaaatttgctgaagatttcatttggaagaaaaataaacattacttctgattctcatgacaagggtaagatttaccccatgggatctgtgcttatcagtgcattgcgtcttgttgatgtcttctctgatgattcgaacttcagatcattctttttgaccaacactgttccatttttaatccagattctagctgctcctcacgatgaatttgtttcgagttggtgcgctgtcaacttaccaacaattgaggaagatgcaagtctagattatgatccttttggtgcatctgaggtggcactattagcttctgataatatgttgactgaagctaaagctaactattcttgcccttttcgccctagcgtgccttcaatggcatatgcacagacaagaacatcatgcgtagtgaaaataatagcaaatttgcatgtttttattccaaacatatgtgaagagcaagaaagggatctttttcttcagaactttcaaaagcacttggcgtctgggagtcctaaactatcagcagatctgccagcttctagtgattttaaggccactaaagtctgtagaaacttaggatttttgtctgattatgctaaaacattggttcctaatttgttaaatggggaagacttggtgttattaagtgattttgctgataagctacaatcttggtgtaaatcacaagttgcagtaaaggttgtacaaaatgatattccaccagaaagcatggatgccatgtgcccggtgcagcagctcttgccaacacggacaagcactccagcctccaaaatgaataaccttccaaaggatgcacagaacatggaagtgtctacaccagtacccccaataaatccggaaggaaatgatgaggacgagactccaaagaacactgtctctagaaatggtggtttcctgcagaatgcagttggccaagacctagtccatcttggcgttgcaagaacaacaagtggtggcccttcggctgtcgcttccggtgttagcactggacaccagcacaacagaatggatcttgatccagcatccagcagcgtggataatttcaaaacaccagaacttacaaaagaaaacggtctcgaggaggatgggaaaggagagagtagtatgtatgatgagaggcaacctaagagaaggaagcggacccttatgaataatgagcaaatagatgaattagagaaggctctagtagatgagcctgagatgcacaaaaatcctgttctattgcagagttggtcagagaagttaagtctgcagggcccagagatcacagcatcacaacttaaaaactggttgaacaaccggaaagctaagcttgctcgcattgcaaaagaaagggcggagaatgctgataaaccatctacttcccatcccggcgagtcttcagaaagtgccggggaggacaactatctaccccctgcaggtgtgatgactgttctatccaaaggtggtagcctgttgagcccggactgcactgagcaaacgtcgcaggcagagctatccccgaacacgacgatgatggtccgtccattcacgagatccttctcgttggaacccggccgcctcgtttcattagtcgacagcgatgggaaggaggttggcaggggcaagatcttccaagcgccagggaagagcacaacggagagccgcgtttgcgtggttgatgtcactgagctcaggaccgagaagtggagggagctcccccacccttcggaggcatttgggtggacgttccaggaggcggaggcgaggaatggtggcatcatcagggtctcttgggacgccgtcaggttgttccctgtagcgtagcaaggccgattgtataacaagatgagtagagggaaactgtggcctaagtaacattatgttaaaagctgtggttaactgtgttgtattcatgaactaattgttttgagcaattcaggtggttactgattttacatttttactactggtgttagtgtcacctgcaatgtgctgtgagaaaccaatgctg

SEQ ID NO: 2273 - DNA, 2453 bp, Zea Mays
ctggatgtggtgagtggtgatgctcgggtggtgattggcattgtcactcgggctcttctttgttctcgtcgtcgtggtcaccatagagcgcgtctgcaagcgctcccaccccaaaaccccgcggacgcaccgacgcgcgagccataatgcgccgccaaagcctcgccaccgtactgctgctcctggtggccgccgcggccctggccgcccccgccgctgggcactttgagtcctcctgccccttctacgaccacggcggccacggcgaaccacacgaacgccacgaccatggccacagctgcggcggcggcgcggaccatgagcaccaccatcaccatcaccacggccatggacacggcgagatccagcggctgctcccggaggagatggcggaggaggcggatctcgagctcgagtccttcggttacgaagaccatgaccacggccaccaccaccaccaccaccatcaccacagccacggcgacatggagacatcgcccatgggcgtgtggctgagcgcgatggggtgctcgctgctggtcagtatggcgtcccttgtctgcctcgtcctcttgccggtcatcttctttaaggggaaaccgtctaaggccatagtggattcgcttgcagtgtttggggcaggagctatgcttggagattcatttcttcatcagctgccacatgcttttggtggagggcattctcactcgcatgatcatgagggtcatgatcatgctcatgctcatgagcatgcacatgcacactcactgcaagatctatctgtgggtttgtctgtactatttggcattgtactgttttttattgtcgagaagattgtgaggtatgttgaagacaattctcaaaatggggctcatagcatgggtcatgggcaccatcatcataatcataaacggcacgattctagcgataaagccaaattgaattaccaaaagagtgatactgatggtaaagacattgatcatgctgaagaggaaccttcggttaatgataccactggaaaaataagtgatggccatgaatcagaagctactatacgcaaggtatatgtaactgaactctgcttcggatgcaaaacatagaaagtatctggtatattttcccaaggcactgcaatccatttacattttggcaaagaaaaaaagaggatggtacgaacttgagagtttccaagttttgtgaacaaaaaagcatctaaggcaaatgtgcatagaaaattcttgtggaacataacagtttttttaggaagcatagcctatgtgaaactaaaaaatagcagacaaatttggttcagtcaaaggaaatgtcgaggcacactttatcagatgttttatggcaaaatgtggaacagagcacctcatcgggtatacaacttatctcttaaaagtatgggaaagccaaattatgaaagctaaatgatggctctaagaaagcgtggtgtgttacatctatggttacaattcaagcactgaatatgttatgaaaaagagcaccgagtaaaggagaatcaaaattgcaatgtgtgtcggtaaaagaaatagtcgaagggcaacatcaaccaatttgccacatttggtgaaaagctaaagggaaaggttttgacactcaaggttgaatagaggagctcatccaaagccactgatggagaagccaccaattctggaagggatcctgcccctgaaaaagcaccatcaatttcaaactctaacttagtgtttggctacctcaaccttttctcagatggtgttcataacttcactgatgggatggctctcgggagtgcctttctgctgcatggttctgttggtggctggtctaggactttatttctgcttgcacatgaacttccccaagaggtaggagattttggtatccttgtgcggtcaggcttcacggtatctaaggccctattcttcaatttcctctctgcgttggttgctcttgctggaacagcactagcattgtctttgggtaaagatccgggacattcctccctgattgagggtttcaccgccggtggtttcatttacattgctgtcgcgggagtcctaccacagatgaacgaccagaaaacaaccatcaagagctcagtagctcagctgatctccctggcaatggggatgctggtcgctctaggcatttctctggtagaataatctgaatccccatttcaccacttgcagctttaggtccaaccgagttaccccaagtcgatataatgctctagcagctccagactagaagcagggttttctgatcctctcgatatatagtaccaaaaagttttttttttttgaaattttggcatctggttatagattgcctcgcatcggtgttatttgaaggcaacccgtcgcactaactgaatactgtacaactttatggccggctggctgatgtcggctcataataaaataagtataaaaaagctaaaa

SEQ ID NO: 2274 - DNA, 956 bp, Zea Mays
gaaaaagaaaaggaaaaattaacggctcgtcggtcctccacgaaaagtcgaaaaccaagtccagcagacggacgcgaactgagaaaaatctcacgtgacgacgacggacgcggcggcgatggcgtgccgcgcacttgccctccgcttcctgctcctcccggacccgctacaccgcctcccggccacgccgccatctgttgggagggcatccggctcccgcggtggtcgccgtccgcacctccgctgcagctccggcggcgggggtggggagcccgggcagccgccgcaagaagctgtgctcgaggccatatccagtaaattcctaccccacagatagaggttttacagcaattggcattggaggtgatgattttgtccagtcgatggtagttgctgttgaatctgttcttcaagaatccattcccaagggccgagtatctcagaaactatcttcaggaggaaaatatgtttctgtaaaaattgggccaattcgtgttgtttcaagtgagcaggtccaagctgtatatcgtgccatgagaagagataacagaatgaaatacttcttatgaagtgcaattgcatgtcctgcacgttccctggtccattccatcatgtaaacaaaaggagtccaacagtacattttcgccacattttgctggactggactggactggacccccgatgaattgcaaaaggaaaatgggaagacttttatgtgccattcatgccctgatggaagcttctcaaataacctgctacaggcaatttggtgggatcggttatgttatgtagtgcttgtgtagtacagtgggcgtatatagctactatatatgctaaagttgtattttagtgtctcatattagatgcattttaatattttataaaccatatgaaactagcggtataagtgttcctaatttatcatgtttgtttgcttgcaggattatataatccag

SEQ ID NO: 2275 - DNA, 2190 bp, Zea Mays
cttgactcttcatcgtctccactctccaccatcatctttgattcctgtctccgcagcttgacccacaaacgcgactagggcagtcaccgcggcgtagctgccgcgtcttgccccgaaacacaaccgtcaacgccgtcccggaccgcagcagcgcggcgcaaccccaatcggagccggagctagcgaagcgagcgcctcgcttccacaagtcgctagctgcatctggagcgccgccggcccgaccaacgcccgagccagccgtgggcgttcggccgccgattcctctgggctctgtcttgtaggaacacacttggatgaggttacaatacgcgtggaacgccatacccttcattctgctattttgtgctatctccacaaataaaatcttctccaacaacaaacctttcagcttcaccatagcgtctgctaggtcgttgcttcagattgacccaaattcaggacttgttcaggacaaggtaaaagttggacaaattttggaagaggacacccaaaacattgtcaatatgactatgaatgtgtcgtctggatggagcattgtgaaagaagaactcatacttcctgctagaggtgcccctttcaatagttgccatgcttctactattgtacagattgaggaagacaattttttggtagcatatttcggtggatccagggaaggtgccccggatgttaaaatctggttacagagatatagtgatggtcactggcatcctccagtggtggctgatgaacaagatggggtgcccatgtggaatcctgttttgtttcagcttccctcccgtgagctgcttctcttctacaagattggtcaagaagttcagaagtggagcggtgccatgaaaagatcgttagatggcggtgtaacctggtcacctagagagcagttacctcctggcatccttggtcctattaaaaataagcctttcttgcttgaagatgggcgcctactgtgtggatcatcagttgaaagttggaattcttggggtgcatggcttgaggttacgaaagatgccggatggacctggagaaagtatggccctatatgtataaaaggtcaaccacttggggtgattcagccagttccctacaggactgacgatggaactattcgagtgttgctgcgatcatttgaaacaattggtcatgtctgtatggccgattccattgatgaaggtgtgacatggagttatgtccgtgagactgagcttccaaacccaaattctgggattgatggagttaagatgaaggatggaagagtactgcttgcctacaacaccttctccagaggaacgctcaagcttgcagtatccttaaacgacggtgattcatgggacgaagtaatgacactagaggacacaaaaggtatggagttttcgtatcctgcagtgatccagtctatggatgagctcatacatgttacctatacatacaatcggacacaggttaagcatgttgttcttcgacctagttcgatggtgaaattgtgagcctgcaactgatgaaggcctacggctggcaacttcaggacacccaaatttatcaccaaatgtttggtgtgggggggggggggggggggggggggtcattgcatcggattggctagattatgctcagttgatgtcaaataaaatgctttcaggtgctacttaatggatttttcgaggttcatctaaaaaaagtaaatactgtttaaaatgttctgcttctttctcatctcggttattgttcaaatatacttttcctttggttgtgcgttggctttcacgctttaggactcctttggagcatagtggttttacagaaaccgtgtaacaaatttatatgaatcagttcattttcataaaaaaaagagaggaagaagcaggggaaaaaaactggcattcaaggggacatgggtaatggtaaatgtgtttctaagactgtccgcagaagatcatgtaaaatagacgatttacattgtagataatattatttgtagagtcaagtttgaaatagaggatgaggcatgatagctactgaagacagcattaaagaagcatccatgtaaccgggtaccttgtgtaacctgttgtttatccgggatatgtcaagccacgccccttatattgcggagaaaacattgaagtaacacaggaatctgtcgccggcgtgctctttgtgaaaatttcg

SEQ ID NO: 2276 - DNA, 840 bp, Zea Mays
  misc_feature (1)..(2): n is a, c, g, or t
nngaattcgctactgttgaagctgctcagaaggctcttgaatttgttggtcatgacctgatgggacggcctctaaggattgacatggctaccgagaggggtgcatacactcctagcagcgggaaggacaacggttctttcaagaagttcgctccaaggtcaggcaacaccgtgtttattaagggctttgacacctctggtggagaggaccagatccgcaccgctcttgaagagcattttggatcatgtggagatatcacccggatttcaattccaaaggattatgacactggtgtaagcaaaggaatggcgtacatggatttcaaggacccagattccttgaataaagcatacgagttgaatggaaccgaccttggtggctacagcttgtatgtcgatgaagccaagccgagacctgataacagcggtggcttcagtggtgacaggggtggtggcagagggaggagtggcggcttcagtggtggcagaggagggaggagtgacagggggcgtggtggtagccgtgggcgtggatttggaggccgtggtggaaggggtacgcctttcagacagaccgctggtacagctagtacaggaaagaagaccacctttggtgatgacgattgaagatccatggctggctattatagtgaaaaacgcaaactatattgtaccgttcagacctattgttatctgaggctgtactgcttttttgcttgataattcgacaattgtttttaccatttttaacatttggtgctatcaaagacatgactttttaagtttttataatatgagtagcggcaagttcaaatgttgttggtctttgaatttctgtgat

SEQ ID NO: 2277 - DNA, 5651 bp, Zea Mays
catgcttcatttgttgagcttctgcggcaagttgctggtttgcgccgccgtttgttttcattatttgcacatccagctgaaagtgtgcgagagactatttctgttataatgcgtacaattgctgaggaagatgcaatagcagcagagtccatgcgtgacgctgccttgaaggatggtgctcttctgaggcatttactaaatgctttcttctttcctgctggagaacggcgtgatgttagtcggcaacttgttgctctttgggctgattcctatcaacctgcacttgatttgctatcaagaatacttcctcctggacttgttgcttatctgcatacacgttcagatgaagattcacggagccagtatgatgaagcaccgttgagcagaaggcagagacgaatacttcagcagaggagggttcatggtactaaaactatggcagtacaagaacaagggataccccccaatggtgttgaggatggggaacccttcaggcacatcagtgccggcacttacggaggagcagatgttcatcagaggcatgttggcctgtactcttccacccactctccttcgccaggtataaacattgatccttctcacactgtttcagttccacatggttctgtacctgaggccctttctgaaaataatcaacaaatcgaggcaccacagctggattcacatgtttattcagtggactccaatgccaatggcaatcttgtgagctcattgcattcagatttttcagtccctgcacaggttgtggtggaaaacactcctgtgggatctggcaggctcctgtgcaattggtatggattttggagggcattcagtctagatcacaacagagcagatttgatatggaatgaacgcactagaggggaattgagggcagcattgcaagctgaagttcataacttggatgtcgagaaagaaagaacagatgacattgtccttggaagttcagtcactgaggatgctgctggtagtgacaacttacctcgaatttcatggaattatgctgaattttcagtgagttacccaagcttgttcaaagaagtctgtgtggggcaatactatttgcggctcctgcttgaaagcggaagcaactatcgagcacaggattttccattacgtgatcctgttgccttttttagagctctgtaccatcgatttttgtgtgacgcagatattggtcttactgtggatggtgcagtacctgatgagttgggatcatctgatgattggtgtgacatggggagattagatggctttggtggtggtggaggatcttctgtgagagaactttgttctagggcaatggctatagtttatgagcaacattataaagttattgggccttttgatggcactgcacatattactgtcctcttagaccgaacagatgatagggtgttgaggcatcgtttgctactacttttaaaggccttgatgaatgacctttcaaatgttgaagcatgtgttttggttggaggctgtgttttggctgttgatttgcttactgttgcacatgaaacatccgaacggacagctattcctttgcaatctaacctcatcgcggcaactgcatttatggaaccttcaaaagagtggatgtacattgataaagatggcacacaagttgggccacttgaaaaggatgcaataagaaggctgtggtcaaagaagtcaattgattggacaataaaatgttgggcttctggtatgtctgactggaaaaggttacgggatatacgggaactgcgatgggcactttctgtaagagtacctgttttgactcctacccagattggggacactgcattatctatattacacagtatggcatctgcacgctctgatcttgatgatgcaggtgaaatagtaactccaactcctagggtgaaacatatattgtcaagtccaagatgccttcctcatgtggcccaggctatgcttactggggaacccagcatcgttgaagcagctgcctcattgcttaaggctattgttacaagaaatcctaaagctatgattcgattatatagtactggtgccttttactttgcattggcgtatcctggttcaaatctcctatcaattgcacagttgttttcggccacacatactcatcaagcttttcatggtggtgaagaggcagcactatcttcatctttgcctttggcaaagcgtagtgtactgggtggactactcccagaatctttgctgtatgtcttggagcgcagtggcccttctgcttttgcgggtgcaatggtgtctgattctgacacaccagaaattatatggacccacaagatgcgagcagaaaaccttattcgtcaggtcctgcagcatctcggtgactttcctcagaaattagcacagcattgccattcgttgtatgattatgctcctatgccacccgtgacttatccgaatctgaaagatgagatgtggtgccatcgttactacctccgtaacctatgtgatgaaattaggtttcctaactggcccattgtagaacacgtggagtttttgcagtcattgttggtaatgtggcgtgaagagttaactcgtcgtccaatggatttatctgaagaagaagcctgtaagatactggagatttcacttgatgatctcgtgcttgttgagaacggtagcagcaagcggccatctgacttaagttcggctaattccggaaacaaaactgaaaacattgatgaagagaagcttaagcgccaataccgaaagctagcaataaaatatcatccagacaagaaccctgaaggaagggagaagtttgttgctgtgcaaaaggcctatgagcgattgcaggctagtatgcagggattgcagggaccacaagtctggaggctgctactcttgctgaaggcacaatgcatcttgtacaagagatatggggatgtcttggaaccattcaaatatgctggttatcctatgttgctaaatgcagttactgtagataaggatgacagcaattttctttcatctgatagggcccctcttcttatagctgcttcagagctgatttggctgacatgtgcatcatcttcattaaatggagaagaacttataagggatggtggtatccccttgttggcaacacttctttctcgctgtatgtgcattgttcagcccacaacaccggcaaatgaaccagctgcaagaatagtcaccaacataatgcatactttctctgtcctcagtcagtttgagtcaggaagagttgaggttcttaagtttggtggccttgttgaggacattgtgcattgtacagaacttgaatttgttccttcagctgtggatgctgcactgctgacagctgcaaatgtttcggtgtcatctgagttgcaaaatgctttgctcagggctggatttttatggtatgtgctacccctgctgcttcagtatgattcgacagcagaagagaatgagatatgtgaggcacatggtgttggggcaagggtgcagattgctaaaaatctgcatgctgttcatgcaactcaggctttgtctaagctttctggtctcagcagcgatgatatactgtacccagataacaaacctgcatacaatgcgctaaaggctcttcttactccaaagcttgctgacatgctgagaaaccacccacctaaagagttattatcaaatctgaattcaaatttggaatcaccagagatcatatggaattcgtccaccagaggggagcttctcaaatttgtagaccagcagcgtgctagtcaaggccctgatggttcatatgatttgacagaatcacagtctttcacctatgaagctttatccaaagaattgatcgttggtaatgtatacttgagagtttacaacaatcaaccggattttgaaataagtgaccaggaggaattttgcattgccctgctcaagtttatagcagagttagtacaacagtggaattccgttaacttggaggagacgattcatcaacatggttcagttattgaagcatctatttctgaaaatgatcaagtcagtgattcaactattgaaggaaaaatggacaattcatcaggaaaacaaagtacagatggagattctgaagttattataaacctccaatgtgggctaacatcacttcagtgtgaggcacatttactgaattgcatgtcatcatttcgtttgaaattgcagaatcttcttacaagtaatccaggcttagctgctgtttttgctaccaaggagcgtctggttcctctttttgaatgccttgcactccatgtttctcctgaaagcagcatcccacaaatctgtttaagtattctttctctgttgactaagcatgctccttgtttggaggctatggttgcagaaaggatgagcctcattttgctatttcagatactccactgcaatcctccttgcagggatggagctcttgctgtactatattctttagccagcacaccagagcttgcctgggctgctgccaagcatggtggtgttgtttacattcttgaacttatgttgccacttcaagaggaaatctctatgcagcaaagagctgctgctgcatctttattgggcaaacttgttggacaaccaatgcatggccccagggtggcaatcacccttgccaggttcctgcctgatggtttggtttctgccattaaagatggacctggtgaagctgttgtttcttctcttgaacagacaacggaaactcctgaactagtatggacacccgcaatggcagcttctctttctgcacagttagcaacaatggcatcagacctctaccaagagcagatgaaaggacgtgttgttgattgggatgtacctgaacaagcatctgggcaacatgtaatgaaggacgaaccacaggttggtggaatttatgttagactttttcttaaggaccccaaatttccactgagaaaccctaaaagattccttgaagggctcctagatcaatatgtctcctctgttgctgctacgcattatgaagcaattgctacagacccagagcttcctttactactgtctgcggcattggtttccttactacgagttcatccagcacttgctgaccatgttggctacctcggttatgttccaaagcttgttgcggctatggcttatgagggaagaagggagactatggcatctgggcaggctaccagtgcatcgaaggcagaacctagcgaacatgacaactcagctcactccgaggccactgtacagactccacaagaacgtgttcgccttagttgtttgcgtgttctgcatcagcttgcgtctagtacaacttgtgcagaagctatggcagcaacaagtgcaggaactcctcaggttgtaccactgcttatgaaagcaattggatggcaaggtggaagtatactggcattggagacattaaagcgtgtagttggtgctggtaatcgggctcgtgatgctcttgttgcacaggggcttaaggttggtcttgttgaagtactccttggtattcttgattggcgtgttggtggaagacaggggctctgtaatcaaatgaagtggaatgaatcagaggcttcaattggacgtgttttggctgtggagccttatcgtccctcgactcttatctacaagtgaagggcttattttgacatcgc

SEQ ID NO: 2278 - DNA, 6418 bp, Zea Mays
catgcttcatttgttgagcttctgcggcaagttgctggtttgcgccgccgtttgttttcattatttgcacatccagctgaaagtgtgcgagagactatttctgttataatgcgtacaattgctgaggaagatgcaatagcagcagagtccatgcgtgacgctgccttgaaggatggtgctcttctgaggcatttactaaatgctttcttctttcctgctggagaacggcgtgatgttagtcggcaacttgttgctctttgggctgattcctatcaacctgcacttgatttgctatcaagaatacttcctcctggacttgttgcttatctgcatacacgttcagatgaagattcacggagccagtatgatgaagcaccgttgagcagaaggcagagacgaatacttcagcagaggagggttcatggtactaaaactatggcagtacaagaacaagggataccccccaatggtgttgaggatggggaacccttcaggcacatcagtgccggcacttacggaggagcagatgttcatcagaggcatgttggcctgtactcttccacccactctccttcgccaggtataaacattgatccttctcacactgtttcagttccacatggttctgtacctgaggccctttctgaaaataatcaacaaatcgaggcaccacagctggattcacatgtttattcagtggactccaatgccaatggcaatcttgtgagctcattgcattcagatttttcagtccctgcacaggttgtggtggaaaacactcctgtgggatctggcaggctcctgtgcaattggtatggattttggagggcattcagtctagatcacaacagagcagatttgatatggaatgaacgcactagaggggaattgagggcagcattgcaagctgaagttcataacttggatgtcgagaaagaaagaacagatgacattgtccttggaagttcagtcactgaggatgctgctggtagtgacaacttacctcgaatttcatggaattatgctgaattttcagtgagttacccaagcttgttcaaagaagtctgtgtggggcaatactatttgcggctcctgcttgaaagcggaagcaactatcgagcacaggattttccattacgtgatcctgttgccttttttagagctctgtaccatcgatttttgtgtgacgcagatattggtcttactgtggatggtgcagtacctgatgagttgggatcatctgatgattggtgtgacatggggagattagatggctttggtggtggtggaggatcttctgtgagagaactttgttctagggcaatggctatagtttatgagcaacattataaagttattgggccttttgatggcactgcacatattactgtcctcttagaccgaacagatgatagggtgttgaggcatcgtttgctactacttttaaaggccttgatgaatgacctttcaaatgttgaagcatgtgttttggttggaggctgtgttttggctgttgatttgcttactgttgcacatgaaacatccgaacggacagctattcctttgcaatctaacctcatcgcggcaactgcatttatggaaccttcaaaagagtggatgtacattgataaagatggcacacaagttgggccacttgaaaaggatgcaataagaaggctgtggtcaaagaagtcaattgattggacaataaaatgttgggcttctggtatgtctgactggaaaaggttacgggatatacgggaactgcgatgggcactttctgtaagagtacctgttttgactcctacccaggtgaaatagtaactccaactcctagggtgaaacatatattgtcaagtccaagatgccttcctcatgtggcccaggctatgcttactggggaacccagcatcgttgaagcagctgcctcattgcttaaggctattgttacaagaaatcctaaagctatgattcgattatatagtactggtgccttttactttgcattggcgtatcctggttcaaatctcctatcaattgcacagttgttttcggccacacatactcatcaagcttttcatggtggtgaagaggcagcactatcttcatctttgcctttggcaaagcgtagtgtactgggtggactactcccagaatctttgctgtatgtcttggagcgcagtggcccttctgcttttgcgggtgcaatggtgtctgattctgacacaccagaaattatatggacccacaagatgcgagcagaaaaccttattcgtcaggtcctgcagcatctcggtgactttcctcagaaattagcacagcattgccattcgttgtatgattatgctcctatgccacccgtgacttatccgaatctgaaagatgagatgtggtgccatcgttactacctccgtaacctatgtgatgaaattaggtttcctaactggcccattgtagaacacgtggagtttttgcagtcattgttggtaatgtggcgtgaagagttaactcgtcgtccaatggatttatctgaagaagaagcctgtaagatactggagatttcacttgatgatctcgtgcttgttgagaacggtagcagcaagcggccatctgacttaagttcggctaattccggaaacaaaactgaaaacattgatgaagagaagcttaagcgccaataccgaaagctagcaataaaatatcatccagacaagaaccctgaaggaagggagaagtttgttgctgtgcaaaaggcctatgagcgattgcaggctagtatgcagggattgcagggaccacaagtctggaggctgctactcttgctgaaggcacaatgcatcttgtacaagagatatggggatgtcttggaaccattcaaatatgctggttatcctatgttgctaaatgcagttactgtagataaggatgacagcaattttctttcatctgatagggcccctcttcttatagctgcttcagagctgatttggctgacatgtgcatcatcttcattaaatggagaagaacttataagggatggtggtatccccttgttggcaacacttctttctcgctgtatgtgcattgttcagcccacaacaccggcaaatgaaccagctgcaagaatagtcaccaacataatgcatactttctctgtcctcagtcagtttgagtcaggaagagttgaggttcttaagtttggtggccttgttgaggacattgtgcattgtacagaacttgaatttgttccttcagctgtggatgctgcactgctgacagctgcaaatgtttcggtgtcatctgagttgcaaaatgctttgctcagggctggatttttatggtatgtgctacccctgctgcttcagtatgattcgacagcagaagagaatgagatatgtgaggcacatggtgttggggcaagggtgcagattgctaaaaatctgcatgctgttcatgcaactcaggctttgtctaagctttctggtctcagcagcgatgatatactgtacccagataacaaacctgcatacaatgcgctaaaggctcttcttactccaaagcttgctgacatgctgagaaaccacccacctaaagagttattatcaaatctgaattcaaatttggaatcaccagagatcatatggaattcgtccaccagaggggagcttctcaaatttgtagaccagcagcgtgctagtcaaggccctgatggttcatatgatttgacagaatcacagtctttcacctatgaagctttatccaaagaattgatcgttggtaatgtatacttgagagtttacaacaatcaaccggattttgaaataagtgaccaggaggaattttgcattgccctgctcaagtttatagcagagttagtacaacagtggaattccgttaacttggaggagacgattcatcaacatggttcagttattgaagcatctatttctgaaaatgatcaagtcagtgattcaactattgaaggaaaaatggacaattcatcaggaaaacaaagtacagatggagattctgaagttattataaacctccaatgtgggctaacatcacttcagtgtgaggcacatttactgaattgcatgtcatcatttcgtttgaaattgcagaatcttcttacaagtaatccaggcttagctgctgtttttgctaccaaggagcgtctggttcctctttttgaatgccttgcactccatgtttctcctgaaagcagcatcccacaaatctgtttaagtattctttctctgttgactaagcatgctccttgtttggaggctatggttgcagaaaggatgagcctcattttgctatttcagatactccactgcaatcctccttgcagggatggagctcttgctgtactatattctttagccagcacaccagagcttgcctgggctgctgccaagcatggtggtgttgtttacattcttgaacttatgttgccacttcaagaggaaatctctatgcagcaaagagctgctgctgcatctttattgggcaaacttgttggacaaccaatgcatggccccagggtggcaatcacccttgccaggttcctgcctgatggtttggtttctgccattaaagatggacctggtgaagctgttgtttcttctcttgaacagacaacggaaactcctgaactagtatggacacccgcaatggcagcttctctttctgcacagttagcaacaatggcatcagacctctaccaagagcagatgaaaggacgtgttgttgattgggatgtacctgaacaagcatctgggcaacatgtaatgaaggacgaaccacaggttggtggaatttatgttagactttttcttaaggaccccaaatttccactgagaaaccctaaaagattccttgaagggctcctagatcaatatgtctcctctgttgctgctacgcattatgaagcaattgctacagacccagagcttcctttactactgtctgcggcattggtttccttactacgagttcatccagcacttgctgaccatgttggctacctcggttatgttccaaagcttgttgcggctatggcttatgagggaagaagggagactatggcatctgggcaggctaccagtgcatcgaaggcagaacctagcgaacatgacaactcagctcactccgaggccactgtacagactccacaagaacgtgttcgccttagttgtttgcgtgttctgcatcagcttgcgtctagtacaacttgtgcagaagctatggcagcaacaagtgcaggaactcctcaggttgtaccactgcttatgaaagcaattggatggcaaggtggaagtatactggcattggagacattaaagcgtgtagttggtgctggtaatcgggctcgtgatgctcttgttgcacaggggcttaaggttggtcttgttgaagtactccttggtattcttgattggcgtgttggtggaagacaggggctctgtaatcaaatgaagtggaatgaatcagaggcttcaattggacgtgttttggctgtggaggtgcttcatgcttttgcaaccgaaggtgcacattgtgctagagttcgtgaagtcctgaattcctctgatgtatggagtgcttacaaagaccagaagcacgaccttttccttccatccaatgcacaatcttctgctgctggaattgctgggctcattgagagctcatcatcaagactcacttacgccctcaccgcaccgccaccacaaccttcattggtccgtctgccatcttcttctccctctccaccatcagctcctgcaaaccctagtggacggcattcttatcagcgtttgtagtgcaaaacggaacatgttaatctcaacccggagtgtgaaccatgaaggcaccatggtaacggtttctagagtgaggccaccttgagtgggcttgttactgccaccaaatacagattgtgcggttgtgcctccattccccaccaatgagcagctgtcagtggctgcatttcagtacatagcattgtacagttttccattacaacggggtcagggtcggggtcggttttgcgtttgttcatgtaaagcatatgatcttttttgtaacataatagatgtcaatagaataatggagctggaaattgtagtatcgattcattgctgggtcctgggtggatgcactcccttgttaggataacacgactttcttggacaagagaaatggatgttttttgttttgtttgatcagcgtcctgtagcgtcagggtatatttggttccctgtctaactcgacttttttgttagtcacaaactaaacaatgacacagttagtcacaaaccaaataactccttaaccttttatagtcatacgtcgcaaacttctggcaatggtgtgctattttatttgtaataaaataacaaagcaaaattca

SEQ ID NO: 2279 - DNA, 6515 bp, Zea Mays
catgcttcatttgttgagcttctgcggcaagttgctggtttgcgccgccgtttgttttcattatttgcacatccagctgaaagtgtgcgagagactatttctgttataatgcgtacaattgctgaggaagatgcaatagcagcagagtccatgcgtgacgctgccttgaaggatggtgctcttctgaggcatttactaaatgctttcttctttcctgctggagaacggcgtgatgttagtcggcaacttgttgctctttgggctgattcctatcaacctgcacttgatttgctatcaagaatacttcctcctggacttgttgcttatctgcatacacgttcagatgaagattcacggagccagtatgatgaagcaccgttgagcagaaggcagagacgaatacttcagcagaggagggttcatggtactaaaactatggcagtacaagaacaagggataccccccaatggtgttgaggatggggaacccttcaggcacatcagtgccggcacttacggaggagcagatgttcatcagaggcatgttggcctgtactcttccacccactctccttcgccaggtataaacattgatccttctcacactgtttcagttccacatggttctgtacctgaggccctttctgaaaataatcaacaaatcgaggcaccacagctggattcacatgtttattcagtggactccaatgccaatggcaatcttgtgagctcattgcattcagatttttcagtccctgcacaggttgtggtggaaaacactcctgtgggatctggcaggctcctgtgcaattggtatggattttggagggcattcagtctagatcacaacagagcagatttgatatggaatgaacgcactagaggggaattgagggcagcattgcaagctgaagttcataacttggatgtcgagaaagaaagaacagatgacattgtccttggaagttcagtcactgaggatgctgctggtagtgacaacttacctcgaatttcatggaattatgctgaattttcagtgagttacccaagcttgttcaaagaagtctgtgtggggcaatactatttgcggctcctgcttgaaagcggaagcaactatcgagcacaggattttccattacgtgatcctgttgccttttttagagctctgtaccatcgatttttgtgtgacgcagatattggtcttactgtggatggtgcagtacctgatgagttgggatcatctgatgattggtgtgacatggggagattagatggctttggtggtggtggaggatcttctgtgagagaactttgttctagggcaatggctatagtttatgagcaacattataaagttattgggccttttgatggcactgcacatattactgtcctcttagaccgaacagatgatagggtgttgaggcatcgtttgctactacttttaaaggccttgatgaatgacctttcaaatgttgaagcatgtgttttggttggaggctgtgttttggctgttgatttgcttactgttgcacatgaaacatccgaacggacagctattcctttgcaatctaacctcatcgcggcaactgcatttatggaaccttcaaaagagtggatgtacattgataaagatggcacacaagttgggccacttgaaaaggatgcaataagaaggctgtggtcaaagaagtcaattgattggacaataaaatgttgggcttctggtatgtctgactggaaaaggttacgggatatacgggaactgcgatgggcactttctgtaagagtacctgttttgactcctacccagattggggacactgcattatctatattacacagtatggcatctgcacgctctgatcttgatgatgcaggtgaaatagtaactccaactcctagggtgaaacatatattgtcaagtccaagatgccttcctcatgtggcccaggctatgcttactggggaacccagcatcgttgaagcagctgcctcattgcttaaggctattgttacaagaaatcctaaagctatgattcgattatatagtactggtgccttttactttgcattggcgtatcctggttcaaatctcctatcaattgcacagttgttttcggccacacatactcatcaagcttttcatggtggtgaagaggcagcactatcttcatctttgcctttggcaaagcgtagtgtactgggtggactactcccagaatctttgctgtatgtcttggagcgcagtggcccttctgcttttgcgggtgcaatggtgtctgattctgacacaccagaaattatatggacccacaagatgcgagcagaaaaccttattcgtcaggtcctgcagcatctcggtgactttcctcagaaattagcacagcattgccattcgttgtatgattatgctcctatgccacccgtgacttatccgaatctgaaagatgagatgtggtgccatcgttactacctccgtaacctatgtgatgaaattaggtttcctaactggcccattgtagaacacgtggagtttttgcagtcattgttggtaatgtggcgtgaagagttaactcgtcgtccaatggatttatctgaagaagaagcctgtaagatactggagatttcacttgatgatctcgtgcttgttgagaacggtagcagcaagcggccatctgacttaagttcggctaattccggaaacaaaactgaaaacattgatgaagagaagcttaagcgccaataccgaaagctagcaataaaatatcatccagacaagaaccctgaaggaagggagaagtttgttgctgtgcaaaaggcctatgagcgattgcaggtgccccctgtttgtatgaccagttgcccagctagtatgcagggattgcagggaccacaagtctggaggctgctactcttgctgaaggcacaatgcatcttgtacaagagatatggggatgtcttggaaccattcaaatatgctggttatcctatgttgctaaatgcagttactgtagataaggatgacagcaattttctttcatctgatagggcccctcttcttatagctgcttcagagctgatttggctgacatgtgcatcatcttcattaaatggagaagaacttataagggatggtggtatccccttgttggcaacacttctttctcgctgtatgtgcattgttcagcccacaacaccggcaaatgaaccagctgcaagaatagtcaccaacataatgcatactttctctgtcctcagtcagtttgagtcaggaagagttgaggttcttaagtttggtggccttgttgaggacattgtgcattgtacagaacttgaatttgttccttcagctgtggatgctgcactgctgacagctgcaaatgtttcggtgtcatctgagttgcaaaatgctttgctcagggctggatttttatggtatgtgctacccctgctgcttcagtatgattcgacagcagaagagaatgagatatgtgaggcacatggtgttggggcaagggtgcagattgctaaaaatctgcatgctgttcatgcaactcaggctttgtctaagctttctggtctcagcagcgatgatatactgtacccagataacaaacctgcatacaatgcgctaaaggctcttcttactccaaagcttgctgacatgctgagaaaccacccacctaaagagttattatcaaatctgaattcaaatttggaatcaccagagatcatatggaattcgtccaccagaggggagcttctcaaatttgtagaccagcagcgtgctagtcaaggccctgatggttcatatgatttgacagaatcacagtctttcacctatgaagctttatccaaagaattgatcgttggtaatgtatacttgagagtttacaacaatcaaccggattttgaaataagtgaccaggaggaattttgcattgccctgctcaagtttatagcagagttagtacaacagtggaattccgttaacttggaggagacgattcatcaacatggttcagttattgaagcatctatttctgaaaatgatcaagtcagtgattcaactattgaaggaaaaatggacaattcatcaggaaaacaaagtacagatggagattctgaagttattataaacctccaatgtgggctaacatcacttcagtgtgaggcacatttactgaattgcatgtcatcatttcgtttgaaattgcagaatcttcttacaagtaatccaggcttagctgctgtttttgctaccaaggagcgtctggttcctctttttgaatgccttgcactccatgtttctcctgaaagcagcatcccacaaatctgtttaagtattctttctctgttgactaagcatgctccttgtttggaggctatggttgcagaaaggatgagcctcattttgctatttcagatactccactgcaatcctccttgcagggatggagctcttgctgtactatattctttagccagcacaccagagcttgcctgggctgctgccaagcatggtggtgttgtttacattcttgaacttatgttgccacttcaagaggaaatctctatgcagcaaagagctgctgctgcatctttattgggcaaacttgttggacaaccaatgcatggccccagggtggcaatcacccttgccaggttcctgcctgatggtttggtttctgccattaaagatggacctggtgaagctgttgtttcttctcttgaacagacaacggaaactcctgaactagtatggacacccgcaatggcagcttctctttctgcacagttagcaacaatggcatcagacctctaccaagagcagatgaaaggacgtgttgttgattgggatgtacctgaacaagcatctgggcaacatgtaatgaaggacgaaccacaggttggtggaatttatgttagactttttcttaaggaccccaaatttccactgagaaaccctaaaagattccttgaagggctcctagatcaatatgtctcctctgttgctgctacgcattatgaagcaattgctacagacccagagcttcctttactactgtctgcggcattggtttccttactacgagttcatccagcacttgctgaccatgttggctacctcggttatgttccaaagcttgttgcggctatggcttatgagggaagaagggagactatggcatctgggcaggctaccagtgcatcgaaggcagaacctagcgaacatgacaactcagctcactccgaggccactgtacagactccacaagaacgtgttcgccttagttgtttgcgtgttctgcatcagcttgcgtctagtacaacttgtgcagaagctatggcagcaacaagtgcaggaactcctcaggttgtaccactgcttatgaaagcaattggatggcaaggtggaagtatactggcattggagacattaaagcgtgtagttggtgctggtaatcgggctcgtgatgctcttgttgcacaggggcttaaggttggtcttgttgaagtactccttggtattcttgattggcgtgttggtggaagacaggggctctgtaatcaaatgaagtggaatgaatcagaggcttcaattggacgtgttttggctgtggaggtgcttcatgcttttgcaaccgaaggtgcacattgtgctagagttcgtgaagtcctgaattcctctgatgtatggagtgcttacaaagaccagaagcacgaccttttccttccatccaatgcacaatcttctgctgctggaattgctgggctcattgagagctcatcatcaagactcacttacgccctcaccgcaccgccaccacaaccttcattggtccgtctgccatcttcttctccctctccaccatcagctcctgcaaaccctagtggacggcattcttatcagcgtttgtagtgcaaaacggaacatgttaatctcaacccggagtgtgaaccatgaaggcaccatggtaacggtttctagagtgaggccaccttgagtgggcttgttactgccaccaaatacagattgtgcggttgtgcctccattccccaccaatgagcagctgtcagtggctgcatttcagtacatagcattgtacagttttccattacaacggggtcagggtcggggtcggttttgcgtttgttcatgtaaagcatatgatcttttttgtaacataatagatgtcaatagaataatggagctggaaattgtagtatcgattcattgctgggtcctgggtggatgcactcccttgttaggataacacgactttcttggacaagagaaatggatgttttttgttttgtttgatcagcgtcctgtagcgtcagggtatatttggttccctgtctaactcgacttttttgttagtcacaaactaaacaatgacacagttagtcacaaaccaaataactccttaaccttttatagtcatacgtcgcaaacttctggcaatggtgtgctattttatttgtaataaaataacaaagcaaaattca

SEQ ID NO: 2280 - DNA, 1330 bp, Zea Mays
ccttccctggcgcgcgagtgacgagcgtgcgcagaagctagccaagcgatgccgctcctcttccccgccacgccgccgctaccgctgtgccgcgccgcgcgcgtctcacgccgcgccacggcctccgtggcgtccgcggccaggagctcgtcgtcgtcctcggcctcgttcgacgcggccgccttcgaggccgagcggctgcgcctggacgccgcggcgcgggccgggatggagtccaccgccgcggcagcggaggccggcccgcgggcctggaagtgggcgatacggaagcgggtgtgggacgcgctcgaggctgagggcatcgcgcgggacccgcgccccgtccaccaccgcatccccaacttcgacggcgcccccgccgccgcagacgcgttggggaggcttgacatatttcagaagtcccattgtgtaaaggtcaatcctgacacacctcagaagcaagttcggttcttaacattgtcaggtgataaaaagctgttgactccgcaacctcggctaaggacaggatttttctcagttatggactctcagatgatacctgttgggtgcattcctgaagcatgcacttctgttggtgcagctaaatatgggaggccaattggtttagatgaaagccttaaggtggatttgattgtgattgggtcagtggcagttgatccaagttcaggagcacggttagggaagggagagggatttgcagagctggaatatggaatgcttcgctatatgggagctatagatgattcaaccatgatagtaactactgtgcatgacaagcagttagttgatgacattccagtggagaagctgctagttcatgatgtgccagttgacattatctgcacccctactcaggtcatcttcacgaagactacgatcccaaagccacaagaaaaattgggccaaatccgaattctaagagagctgaagcaacgtatagagcaagagacaggaactatgcttccttgtggaccttcggagaagctaccgccaacagctcagagaaagcagaggtggcagcggcgacgatgagacttttgtatgcttctcttaactgtttcttttactcaataaagagctatgtgcacccttttctttcttagggcaaatcaaggtcacaattcaaaactgctagcattagactataggaacattaccagatgtaatagaaatgccaaaaaaaactttgtttgcacttaagaggcaatgaggatagatagtatagctctttccacacatatttaatttctttgcaagtatgaagttccatttggaaagtggtacttaaaatttgtatcttggatgtagc

SEQ ID NO: 2281 - DNA, 1495 bp, Zea Mays
agttaagtcttcctctatgctgtttgtccaccatcttgattgcatggcaccaccatcatggaagctaactctgtcagtttgaaaatctagtgcttttaagaccaatttttgcagaataagtaaccacacctgcacctcccttgaagttgcgccaggttactgtagttgcttttctggtgtaaggtcgtatgatcaagcgtgctctgaattagtcagtggagcatgatatactaggtcgattcatgcttattgctgcatagttaatttctcgttgtaatgcaccagtatgtaattgtatcattctgtttcctgattaacttcataagttaatagcacttgatctctcaatgaatttcatgctgcaaaccaaagcatatactggttggttagtgtttcaggttttctgtacattttttctagctttcgatcagatgtacccattctattaaggacaaacactgcaatcatgctaaacttcttgcctgagaatttgaaaatgatttgtttgcttctccttttgattcggtgctactttttgtcatctaggtgataaaaagctgttgactccgcaacctcggctaaggacaggatttttctcagttatggactctcagatgatacctgttgggtgcattcctgaagcatgcacttctgttggtgcagctaaatatgggaggccaattggtttagatgaaagccttaaggtggatttgattgtgattgggtcagtggcagttgatccaagttcaggagcacggttagggaagggagagggatttgcagagctggaatatggaatgcttcgctatatgggagctatagatgattcaaccatgatagtaactactgtgcatgacaagcagttagttgatgacattccagtggagaagctgctagttcatgatgtgccagttgacattatctgcacccctactcaggtcatcttcacgaagactacgatcccaaagccacaagaaaaattgggccaaatccgaattctaagagagctgaagcaacgtatagagcaagagacaggaactatgcttccttgtggaccttcggagaagctaccgccaacagctcagagaaagcagaggtggcagcggcgacgatgagacttttaaatgactgccccgtgcgttgcgacggcttacaacaatacccatgtaaactatccaccaaaaaaatttcaatattttttgtttattgtctccgctctccgtgtaatatttttttttgatttggctaactggtgttattatttactctatccaatatatcttgttacaacacaaccaatgaaatgagcgattagaagagagttcacaacgactgactgaacgaacaaatattataaaatgatataattccaccatacaaagaccaaataagaaaaaatttgtaagctcaagtttctaaaataagtcacatgaactcaaacttataaaaaagataaatcaaaatatggagtgattactaaagtcagacatcaata

SEQ ID NO: 2282 - DNA, 1328 bp, Zea Mays
aaccccaatgcctcgagggcgcacccaaacaaactggctccgcctccttcctccccacccccggcctccgccgctgccttcttttcctcgtgcgcatattcgcttgcagcggcgccgacaccatttcataaacaccggaaacgcgcgcgaagtgaggagcagcaccaaacgcccctctgcttctcctctatttctccctcttgcggagccgcctcttgtgtgtaggggtgtgtcgagtctatggcggcggcggcggatacctcggaggcgtctgcggccgggatcgcgcttgcggaggccaatatcaactgggagagatttgccaaaggctcatggttcaaggagtgccagggatggcaacgtacaggggaccatttgatgtgataaataaggttgtcagaacacaggggatccaggggctttaccgaggttttggaatcactatgttgactcagtcgccagcttcagccctttggtggagtgcatatggtggtgctcaacatgctatttggaggagtttgggttatggaaatgactcatcaacaaaaccatctcaatcagaacttgttgctgtccaagcaacagcaggaacaattgctggtgcttgctcgtcgattatcaccactccaatagatacaatcaagactaggcttcaggttatggacaactatggtaatggtaggccttctgtcatgaaaactaccaggctgctgcttgatgaagatggctggagggggctttatagaggttttggacccaggtttcttaacatgtctctctggggcacatcaatgatcgtgacatatgagctcataaagaggctatctgtgaagtcggaatgacacgttttggcagattctcaactgagttgatttactgttcagtatcatctttatgaatacaggcaatcaagttagtttgcctcgctaaaagtataggccagtattatgatagggtaggatgcagaattatggtttagttacataataacatccttctgtaggactcgtgatgtatatatttgtgctaaagaccctcctttcaggatgttgtaggcttgtagccagcttctttaggatgcaacagatggaggccaagatacatgttgtgtctaatgaggcacattgtagctgtagctgtagctgttcatggtgcagcaaaattttggcagagttctgcgtccttttcgttcagtgaccagctctccagttgttgtcgtccaacttacatttttagaatctacagagattgtgttcgtcattgaggatgtgtctggtttgttcgtcatttgtgatggtgttttagtttctatggactaatttttagac

SEQ ID NO: 2283 - DNA, 931 bp, Zea Mays
agctcaagaagactactagctagtgtcagtcatgatgacatcccactcatcagtattagtagcaggactagtgtgtctcagtgcggcggtggtcgtgccaatgccatggctagccgccggggagagtagtattggtggtgcggagtgcaaaagatcatgcggcggcgtggagatcctcagcatctctccggagcaaggtgaagccaaggtgctcctccctatctcttcttactgctacgactctgcgtctcggacgatggtggccgacgagtggcactggtccttgggcgccaattaccgtttctccagcacggccaacaagttcacggtggtagggtgccgggcgctggcgtacatcggtgacaccaggaagaagaggaacaacgttgctgagaataactacctgaccgggtgcgtgtccacgtgcttcaaccgcacgatctccctaaacacttgctccgggatgggatgctgccagacggtcatccccaacggtccgccgtatttccatgtgtggttcgacgccggcttcatggacatctctgggatcgacggcggcgcggacttatttggtcgctgcagtttcgcggtgctcatggactcgtccaacttcacgtcgtggacctctagctccagcaacatctcgtcgccggagttcgtcaacaatgttagctcgctgttgcagttcttcaacagctcccgtggtggaaaggcgccggtggtccttgactggtccatcggggaggacgactgcaagaaccctgcaggatacgcgtgccgcagcgtcaacagcttctgctcaagcgcagccagcggacggggctacatctgtaagtgcaaccaaggtttcgacggcaacccttaccttcctaacggctgccaaggaggggaagtagcagacttttgctgcttctgtactaaggtggttccc

SEQ ID NO: 2284 - DNA, 2618 bp, Zea Mays
ccgttggattatcttcacctttcactccccctctttctgagatctgctttttaaacactgattgtatgatggtggttgcatgcagcctttggccgggttcgtgcgcctgacacagacacagatctggagacagatgggttggctacttcctcctccagtgcttctgcagcctttgccgagcggcaggacgacgaagcggaggagttgctgtgcggggtgaaggaagaggagtcggctcaggtacaagaaccggccaagaatccggcaggacgtcccaccccactaccccaggaaggggtcgaaacagcggccggccccggccttacttgacctcggcagcactgggttaattccacggagccacgttttctacaagtttcgtgattggtggtgtggggttgatgaacaaaggacttgaagcattactcatccggtcagacgtgtttcgtagaccttgacgctgagctatcggagttgggtttccaaaaaaaggtggagctctgagagagttccgcattcttctaaaggaagtaggagatacccaggaagcagcatggcattttcttacagcaatgggaggacattgccctcgaaatgggaggatgcagagaggtggatcttcagtcccaattccagcgacatgcgtggaagaactacggttgctcatggtcggaggccaaagtctaaaagtggccccctggggcctccaggaagacttggtggacagtattcatctgtttcttcggtgtcattgcttgatagtgagagagttggacctattacatcaaattctcatttttcagcaggagtactaatgccaggacatgtttgtggaggaaaaaatacaaatggggcctattcaggtagaccaattggtgacgaaatcaacattggagaaggagtcagaatttgtccactgaatggtgggtctcatcctattcgaactcccagagttcgcaagcgattagattctgcagtcgaatcatctgcttcattgcctagcacacaagaatctatccaagacgagcaggttgaaatcacagaagattcagcttcaactattgcctgtataatttccaggaaagatgttgcaacacagaccagcccagagctaagtaggtcctcttcacccaacaatagaccaacatttaatcgttccctgtcgacggaacaaatgaaagagagggggagctgtttctcagatcttgatatcagggatgttcagatggatgatcgagtgactctgactaggtggtcaaagcaaaatgtaacacggttgcctaacaagaattcaacaaacataatagagtggaaggaaaaagctgtggaatcaaaatctttgtcctggggctttgccgaagcgaagtgcatatccaagtaagagatcacagatcactacatattcaattattgtgctgcttgaagcctaatttcctaatacttgttaccttatgtgtcatgaaatcttctgtaatgcttatctgttctaaatgtgtccaagccttaaccatctctcgagtttttttttaaacatcagtgtatatttacaccaacaaattgtgaaagctgataatctctacaatattataaggattggtagagaggacacaaaaattactgcatgggaaagtattcaaaaagcaaaagctgaggcagcaattcagaagttaatgattaagatggagaagaaaggatcatcttcgctggataagattttgaacaccctcaagtctgctcagagaaaagcccaggtgatgcttgagcatgagcttgatgcagtaacagcaaaccaagatggaaaaggctctaggaaggcaaaaaagggagcacagcgtagcaagaatggccaaatcagttccctgagtggctgcttcacttgccatgctttttgatacatgaatcaggatctgagaaattccttcgtactgcctacatcaccgtcatgttctccacatcgaaatctaggtgaacttcagatatctatcagatgtcagtacataatacgataatcccacagctggaaatcagactcggatctttccaagatgctagctgcaggctcttcatctgccatgatagggataatgcaatatctgcagtgccgctctgtgttagtttcgattctgccaatgagacagagaaaatggagcacgaaggaaaaggaggaacggttctgcgtacacctcatgtgcccggttgatgtctcctttatcattgtgtcattacctggcctgccttgtagctaggcactgctgatgtcgatcttgttgccaaaaaggctgtatggatcatacattcacacaaagtgcaattccattccaagatacagcgaaatcttcaggtacgaggagaaagcatggcctgcttgtgcgtgtgactagttgggcaccctgctgggtactggaatggaaccacgctcccttgttgcttttgtttggtacagtgctggttgttgctacctatatttgctttacagcagcgtcggtgtgtagctcttttaggaaactgagatgttggtttggcctggaaacttaacaatatcgtcacacacatatatgtacatatggggatgaagatatgatcgtcagtatgccatcctttaaaaaaaaagattctca

SEQ ID NO: 2285 - DNA, 1592 bp, Zea Mays
tagcgacgagccgagcgcggccgaagacccttaccatgtacgcgcggatttttctttacgggaggacgggaggttgctatttatagtggcctcacgcgcgaccctgcacccaccgatcacacaatcccgacttcccgaggccgcccggcccgagagcaccgagcacgcttctcccaaactgcactgctccgtccacggcacggcgaggcggggacgccaaagcaaaaaggcaataaagccagcggccagggccaggaccaggagccggcgtcggtggaggctgaggcagaggcgccgaagcggcggcggcatgggggtgctgcggagcacgcagagcctggaggccgaggtagaggagatgcgcggcgcgctgctgctccatggcgcgtgggcgtggaggcccggcgggggcgccgccaagcgcgcggcccgcgccgtggagccccgccgccgcggaggcgcgcaccgtgtgcgtcacggggggcacgtccttcctcggctttgccgtcgtcgaccgcctgctccgccacggctacaccgtccgcctcgccctcgagacgcaagaggaccttgacaagctgcgggagatggagatgtttggggagaatggcagggatggggtctggactgtgatcgcaaatgtgatggacccggagagtttgcatgaggctttcgacggctgtgttggtgtctttcacacttcgtcgcatgtggatccagcgggcatctccggttacacgaaacacatggcaggcttggaggccaaagcagcagagctggtggtggaagcatgtgtgaggacagaatccgtgaggaagtgcgtcctgacgtcgtcactgttggcatgcgtctggaggcagaactaccctcatgaccgccgccggttcccaactaccatcgatgagaactgttggagcgacgagagcttgtgccgcgacaacaagagtttgaagcctggagcctaaacatttgcagctgtggctgtcactcggcaagacgatggcggaaaaggcggcgtggagggccgcacggggaacagacctgaagctagtgaccatatgcccagcactggtaaccgggccggggttccggaggcggaaccctactccatccattgcatacctcaaaggagcgcacgccatgctcgtccaaggtctgctggcgactgcgaacgtggagagggtggcggaggcgcacgtccgcgtgtacgaggagctgagcggcacggccgggggccggtacatctgctacgaccacgtggtgcgacgaggcgaggagttcgcggagctgcagcggcagctggggctcagggtccccgcgaccgcgacgcccgacggctatggcggcgacgacgacgacggccgggcgccgcggttccagctctgtaaccggaagctggcggcgctcatgtccgcgcggaggcggtgcacctacgacgcctacttccccatgccgcaggagtgagaccggaagaggagagagagctgctgatgctggacaacgactggagcgtgcgtgacaagtgacctcgtgtacatagcaatagtggtgatcggctcgcatcaatataataaatcggcctcaagtatccc

SEQ ID NO: 2286 - DNA, 3126 bp, Zea Mays
ctctgatttttagcgcttcattatttggaatccttctggctctgtagtttgctgtggtctcttgttgctgacactacctggacttttcttctgcttatgacaaagacgaactgataagctggcattcgtagatcggtttcttgggagatacacatacagaagctttagggtcggctcgtagaatctctcagacaccgtcgttttgcatccgagaacttggtcacttctaagtgcattttcctttgctgcaaaaggtgctgaataaactgtctgcacaagtcagtggtccttgaactacagggacctgatctgcagattcttccattggatatgggaataaaagttgagggtgagacctatattccaggatactttgacatggaagattctagtgtaaattataatggcaatgtgctgccgtatcacaaggagaacaaaccaagtgtgtttcttactgagaagttcacaataatagcttcaaatggacgagtacattacgacaaggaaatgataaagcggacaatgcttgtacatgaagctacattccggaaacaggtatatgaacttcaccagctttacaaaattcagaaggaactaatggcacggttccaaatagaagagatcaatggttgtcctagttatgctggtttattgcagccaagatcctctccatcacaggcactgcttgatgatgttaaaggaatgcgaaaaactgtgaatcctatttctggacatgatcctaagcagtcatgcatcgatttgataaatgaaagtagttcacaatatagtgtgagtggaactcctttgaggcataacaatgttaggcctcaaaagaaaatgattgacctgcaggttccagcagatgtatacactgacaatgatgatgatgtggagatattagaagtgaggccttccaaaagattgcctggggctaatgggtctgttcttttaggaaatgtcaacctcagccttcaaaatagtgagggctattcacatatgaagagttggagtactgatatacaagcacatcacagctcaactgcgcatatactgaataaaccagttgaagattcatctagtatgaatagatctaattttcttggtgtgggaatatctgctctgcagaaccatcattatgcatcacagggagtaaacttgaaccccataagcttggaagcaaaactaaaggaacaatgtgctggtaaagcatctggttcaaggttctttggaacaaatgaggaaataaggaacaacaatccatttcaacacagaaaggatgactccaactctagcatggcattgtacaaacaaaattgcattggttcctcaatggggaattacgctcccaatgctagcaccttcaatcactccattctttctccgcttggcttcaaccatgcactgaatcttccatggcaaagcaacaacacgagctacttgactaagagtcattgtggtgctgctgaaacattcattcctaaggatgccctttccaatggtatctcagtggattctactccaaaggcgccctatcatcattcactaaagattcacggaggtgccggatatcaaaaacctcctgcactacatgataacctgaaggatatagatctgaatgacacaccagttgatgtcgctgccacttgggaacagggaagcgagaaatcagtggttgatatctcttggctcagcaagaaaccagtaagcctgatggaatcacaagtcccatcaagttatgcaaaggaccactcccagattttgccaagccccacattatattcagaaagtagaactcccacaagagttcctgccttccctttcagtgttggtgctgaaaaagattctcggtgctcacccactctactatatgacctaaacaatggaccatcgattaagcatgaaactgacatggaaattcagtccctgtgcaaggaaagtgacacagatactaggaatctcattgacctgaatgaaaccttgccaataatcgacgatccagaaatagagtctcatgaatcaggtgaaattgttcctcatgaacccaatggcccttcacaggattctatcgctatagcagcagcagcagagacgttggtagaaatgtggaataatagtgatcggcctgcatatcaaccggacattttgcattggtttgctgacctagctatatccaaagataacacattgttggacaaggacagcgatgacgactttgaggctgcaacactgaagctgcgagaaacaaagagcaacgagtaccattcaacaccaagaaccacccaggaggataacactaactttggtcattgctctgcagcttcacttgtctcaaaacctcagagaggtagagggcgaggacgccgacagaggaaacactttcagagggacatcttgccaggccttgcgtcattgccaaagcacgaggtatcagaggatcttcgtgcgctcggaaggtccaagctagtcaccccgacgaaacgtggccgtaacaggcagcaaccgagagggaggcgtcgggcaagaagcgtggctgtcgccatggaggtagaggaaagcgaggtcagcccaccactgcaggcatcaccatctcctgtccctgctgacttggacgcagatgcattggcaataacaaggtggggaaggaccaccagacgttgtcgaaggccgagatgcccgccggtgaacaatgcatcgctgcgtgtagcttgagagagttttaggcatcttagctgatgagaattggtcagaattcagaaattcttttttttccatgactagttggagggaaaactcgaagtagtagattaaaagtaaccagtcacaattgtatatgcatctcagcattaatttggctccctgggacctggatcgaatcaaaacagtttgtacatctctttgaaatgaactctaatcctagagaaatgcacagaattagcatttctacgagtttgctagaattcagtttctcgtagtgcatcttattgttgatcaggccgacatgccactgatatcatgctcagtagccatgttggaccaacgggtttagttagttttgttactgttaatatcatgtgatcgttctttaatggtgtgtttggtttgtgtagtcactctatgctttatgag

SEQ ID NO: 2287 - DNA, 3186 bp, Zea Mays
gcttgtgatgttgcgatttttcagaaagctctgatttttagcgcttcattatttggaatccttctggctctgtagtttgctgtggtctcttgttgctgacactacctggacttttcttctgcttatgacaaagacgaactgataagctggcattcgtagatcggtttcttgggagatacacatacagaagctttagggtcggctcgtagaatctctcagacaccgtcgttttgcatccgagaacttggtcacttctaagtgcattttcctttgctgcaaaaggtgctgaataaactgtctgcacaagtcagtggtccttgaactacagggacctgatctgcagattcttccattgggtactgtttcatatttgaccactttgtaaattatatgggaataaaagttgagggtgagacctatattccaggatactttgacatggaagattctagtgtaaattataatggcaatgtgctgccgtatcacaaggagaacaaaccaagtgtgtttcttactgagaagttcacaataatagcttcaaatggacgagtacattacgacaaggaaatgataaagcggacaatgcttgtacatgaagctacattccggaaacaggtatatgaacttcaccagctttacaaaattcagaaggaactaatggcacggttccaaatagaagagatcaatggttgtcctagttatgctggtttattgcagccaagatcctctccatcacaggcactgcttgatgatgttaaaggaatgcgaaaaactgtgaatcctatttctggacatgatcctaagcagtcatgcatcgatttgataaatgaaagtagttcacaatatagtgtgagtggaactcctttgaggcataacaatgttaggcctcaaaagaaaatgattgacctgcaggttccagcagatgtatacactgacaatgatgatgatgtggagatattagaagtgaggccttccaaaagattgcctggggctaatgggtctgttcttttaggaaatgtcaacctcagccttcaaaatagtgagggctattcacatatgaagagttggagtactgatatacaagcacatcacagctcaactgcgcatatactgaataaaccagttgaagattcatctagtatgaatagatctaattttcttggtgtgggaatatctgctctgcagaaccatcattatgcatcacagggagtaaacttgaaccccataagcttggaagcaaaactaaaggaacaatgtgctggtaaagcatctggttcaaggttctttggaacaaatgaggaaataaggaacaacaatccatttcaacacagaaaggatgactccaactctagcatggcattgtacaaacaaaattgcattggttcctcaatggggaattacgctcccaatgctagcaccttcaatcactccattctttctccgcttggcttcaaccatgcactgaatcttccatggcaaagcaacaacacgagctacttgactaagagtcattgtggtgctgctgaaacattcattcctaaggatgccctttccaatggtatctcagtggattctactccaaaggcgccctatcatcattcactaaagattcacggaggtgccggatatcaaaaacctcctgcactacatgataacctgaaggatatagatctgaatgacacaccagttgatgtcgctgccacttgggaacagggaagcgagaaatcagtggttgatatctcttggctcagcaagaaaccagtaagcctgatggaatcacaagtcccatcaagttatgcaaaggaccactcccagattttgccaagccccacattatattcagaaagtagaactcccacaagagttcctgccttccctttcagtgttggtgctgaaaaagattctcggtgctcacccactctactatatgacctaaacaatggaccatcgattaagcatgaaactgacatggaaattcagtccctgtgcaaggaaagtgacacagatactaggaatctcattgacctgaatgaaaccttgccaataatcgacgatccagaaatagagtctcatgaatcaggtgaaattgttcctcatgaacccaatggcccttcacaggattctatcgctatagcagcagcagcagagacgttggtagaaatgtggaataatagtgatcggcctgcatatcaaccggacattttgcattggtttgctgacctagctatatccaaagataacacattgttggacaaggacagcgatgacgactttgaggctgcaacactgaagctgcgagaaacaaagagcaacgagtaccattcaacaccaagaaccacccaggaggataacactaactttggtcattgctctgcagcttcacttgtctcaaaacctcagagaggtagagggcgaggacgccgacagaggaaacactttcagagggacatcttgccaggccttgcgtcattgccaaagcacgaggtatcagaggatcttcgtgcgctcggaaggtccaagctagtcaccccgacgaaacgtggccgtaacaggcagcaaccgagagggaggcgtcgggcaagaagcgtggctgtcgccatggaggtagaggaaagcgaggtcagcccaccactgcaggcatcaccatctcctgtccctgctgacttggacgcagatgcattggcaataacaaggtggggaaggaccaccagacgttgtcgaaggccgagatgcccgccggtgaacaatgcatcgctgcgtgtagcttgagagagttttaggcatcttagctgatgagaattggtcagaattcagaaattcttttttttccatgactagttggagggaaaactcgaagtagtagattaaaagtaaccagtcacaattgtatatgcatctcagcattaatttggctccctgggacctggatcgaatcaaaacagtttgtacatctctttgaaatgaactctaatcctagagaaatgcacagaattagcatttctacgagtttgctagaattcagtttctcgtagtgcatcttattgttgatcaggccgacatgccactgatatcatgctcagtagccatgttggaccaacgggtttagttagttttgttactgttaatatcatgtgatcgttctttaatggtgtgtttggtttgtgtagtcactctatgctttatgag

SEQ ID NO: 2288 - DNA, 3211 bp, Zea Mays
tgaggggacggattatctcctgttcttggctgcttccctctgttctattctggcctggccgccattgtttcagcggatgagttcggggtcggaagtcttgttcttggaggtctcttgttgctgacactacctggacttttcttctgcttatgacaaagacgaactgataagctggcattcgtagatcggtttcttgggagatacacatacagaagctttagggtcggctcgtagaatctctcagacaccgtcgttttgcatccgagaacttggtcacttctaagtgcattttcctttgctgcaaaaggtgctgaataaactgtctgcacaagtcagtggtccttgaactacagggacctgatctgcagattcttccattgggtactgtttcatatttgaccactttgtaaattatatgggaataaaagttgagggtgagacctatattccaggatactttgacatggaagattctagtgtaaattataatggcaatgtgctgccgtatcacaaggagaacaaaccaagtgtgtttcttactgagaagttcacaataatagcttcaaatggacgagtacattacgacaaggaaatgataaagcggacaatgcttgtacatgaagctacattccggaaacaggtatatgaacttcaccagctttacaaaattcagaaggaactaatggcacggttccaaatagaagagatcaatggttgtcctagttatgctggtttattgcagccaagatcctctccatcacaggcactgcttgatgatgttaaaggaatgcgaaaaactgtgaatcctatttctggacatgatcctaagcagtcatgcatcgatttgataaatgaaagtagttcacaatatagtgtgagtggaactcctttgaggcataacaatgttaggcctcaaaagaaaatgattgacctgcaggttccagcagatgtatacactgacaatgatgatgatgtggagatattagaagtgaggccttccaaaagattgcctggggctaatgggtctgttcttttaggaaatgtcaacctcagccttcaaaatagtgagggctattcacatatgaagagttggagtactgatatacaagcacatcacagctcaactgcgcatatactgaataaaccagttgaagattcatctagtatgaatagatctaattttcttggtgtgggaatatctgctctgcagaaccatcattatgcatcacagggagtaaacttgaaccccataagcttggaagcaaaactaaaggaacaatgtgctggtaaagcatctggttcaaggttctttggaacaaatgaggaaataaggaacaacaatccatttcaacacagaaaggatgactccaactctagcatggcattgtacaaacaaaattgcattggttcctcaatggggaattacgctcccaatgctagcaccttcaatcactccattctttctccgcttggcttcaaccatgcactgaatcttccatggcaaagcaacaacacgagctacttgactaagagtcattgtggtgctgctgaaacattcattcctaaggatgccctttccaatggtatctcagtggattctactccaaaggcgccctatcatcattcactaaagattcacggaggtgccggatatcaaaaacctcctgcactacatgataacctgaaggatatagatctgaatgacacaccagttgatgtcgctgccacttgggaacagggaagcgagaaatcagtggttgatatctcttggctcagcaagaaaccagtaagcctgatggaatcacaagtcccatcaagttatgcaaaggaccactcccagattttgccaagccccacattatattcagaaagtagaactcccacaagagttcctgccttccctttcagtgttggtgctgaaaaagattctcggtgctcacccactctactatatgacctaaacaatggaccatcgattaagcatgaaactgacatggaaattcagtccctgtgcaaggaaagtgacacagatactaggaatctcattgacctgaatgaaaccttgccaataatcgacgatccagaaatagagtctcatgaatcaggtgaaattgttcctcatgaacccaatggcccttcacaggattctatcgctatagcagcagcagcagagacgttggtagaaatgtggaataatagtgatcggcctgcatatcaaccggacattttgcattggtttgctgacctagctatatccaaagataacacattgttggacaaggacagcgatgacgactttgaggctgcaacactgaagctgcgagaaacaaagagcaacgagtaccattcaacaccaagaaccacccaggaggataacactaactttggtcattgctctgcagcttcacttgtctcaaaacctcagagaggtagagggcgaggacgccgacagaggaaacactttcagagggacatcttgccaggccttgcgtcattgccaaagcacgaggtatcagaggatcttcgtgcgctcggaaggtccaagctagtcaccccgacgaaacgtggccgtaacaggcagcaaccgagagggaggcgtcgggcaagaagcgtggctgtcgccatggaggtagaggaaagcgaggtcagcccaccactgcaggcatcaccatctcctgtccctgctgacttggacgcagatgcattggcaataacaaggtggggaaggaccaccagacgttgtcgaaggccgagatgcccgccggtgaacaatgcatcgctgcgtgtagcttgagagagttttaggcatcttagctgatgagaattggtcagaattcagaaattcttttttttccatgactagttggagggaaaactcgaagtagtagattaaaagtaaccagtcacaattgtatatgcatctcagcattaatttggctccctgggacctggatcgaatcaaaacagtttgtacatctctttgaaatgaactctaatcctagagaaatgcacagaattagcatttctacgagtttgctagaattcagtttctcgtagtgcatcttattgttgatcaggccgacatgccactgatatcatgctcagtagccatgttggaccaacgggtttagttagttttgttactgttaatatcatgtgatcgttctttaatggtgtgtttggtttgtgtagtcactctatgctttatgag

SEQ ID NO: 2289 - DNA, 1444 bp, Zea Mays
tgaaacatttatagccgttagacacagccgcccattaattccccaccctcggcgtttaaaatttgcaactctgctgcatcttcttccattccccactctccagtctccactagcatcagtcgccgccgcctatcctcgagcgccatttccatcaacagcatccgcctctggcaagctagcgacagcaactcatggcactccgcgcgctcgacaatacgaagcccgccgccgtcgaggagcggcccaagaaggtggctaaggtgggcgtccccgccgccgccgccaaggccgccgcctcccccgggagtggcggcaagaagaagaaggggaacgacgagaactcggcgccaagggccacggccgcggcggcggagcaggccgtggagtacatctcgtcggaggagctggaggcggcggccagccccaaggccaaggccgcggggctggtcgcggacctggactccaaggactgggtcaggacctgcgaggcgctcaacgacgcgcgccgcctcgcgatccaccaccccgcgctgctgaacccgatcctggagaaggtggtgctggcggttgtgaagacgatgaagagcccccgcagcgcggtgctcaagacgtccatcatggcctgcgccgacatcttcagctccttcggcaacctgctcgcctccgtctccgacgacgccttcgacaagctgctgctccagctcctgctgaaggcgtcccaggacaagcggttcgtgtgcgaggaggccgagaaggcgacgcgcgcgatggcggcgtcgatgccgccgctgccgctgctgaagaagctcaaggcgtacgtccaccacgccaacctcagggacatcggcgcgatgaaggagttcgggatgtcggcgctgctgcagctggcggtggagctgctgaacgaccggctgccggaggcgagggaggccgcccgcggcgtggtggcgtcgacgcacgcggccttcgtcaaggaggccgccgcgagcggccaggaggacgacgctgccgcgtcctgggagagcctctgcgcgctgagcctcccgcccatctccgcgcaggccgtcgccaagatcgctgccgccgccgccgcctcctcgcagtagccacggcacgcgtgcggacgtgcgccgctggcgttgtttttgggggtcgtctggttcggttcagaagtagcgctcgtgagtcttcagacagagctcgtttgtcgccgccgccgagtctgtttgtttgttctttctactccatgctatctcgcatggttagtgttctgtttatggcttcgtcaagtaataacatatcaattaacatagtttactagtgtggtgggtgtgaaaagcaaaatcttttaaaaaaaaagagagagagatagcctcgcatgtagcaccggtacacagatgaacaattgcgaaagggaaatttggatccataccattaaaagatc

SEQ ID NO: 2290 - DNA, 1069 bp, Zea Mays
gtggctgcacctcaagcgcttcggcaaggtggacagcgccaacaagtacgagaccttgctggaggtggtttaggtgatgaccgacctgaagttgatcatcaagcgggcctacatttcctccgacgacgagtggttcatgaacggttgatatcgtgattattcacggcattgtcttattggatgttcttgacaaggagctcatcacttatgccattagagttcgctaatggctttattcagagctctaaagaaaagcattctacacccaagtatgggctcatctaccatgcatcctcaattgggaaggcttctcaaaagcataacggaaaaactctcggtctctatctgcaaaagctgctcttgctatccgataggatgcccttggtgttgatgaggacaactccattggcactaagagtcgactgaaggttgagacacagtttcaaattcttgaaggtcgtgacggttgggctggagagcacgctggtaggggaggacctcaacgaccgtgcctttgtctatggcttccttagcttcctggacaagatctcttgcgtaatcgtcctatttgtcttggaattgtacgaagacacgaatgagatgtagcgagatgaggggacacggtgagcaggtacgagatgggcctgatctcctcatacttcaccgtcctctccctggtggtcacatccattctgaggctataggtcaccactccgaaagccattgcaatggaagccccactgcttgtctgacaaactgaagaaaccggtgagtgtagatgtcgatcgggttggaagaaagaagaaagaaatgtgcatcctcttcaattagtttcaattagatttgaaagcaggtcactttgtaatagtatgtgtcttgtcatcgtgttggcacaacacagatgtgtatgatgtagttacgtataactcaagattctcattgctatgctttattataccaacaaagttcagatgtttggatatttctagcttattagggtctgatgcggaacatgtttaaacaaatatatcaaatttgaataatgtcaacatgtgtgatatatagaaac

SEQ ID NO: 2291 - DNA, 1819 bp, Zea Mays
ttcggcaaggtaattgtgcctgattcgccccctttcccatctgattcgacgatataagcctacaacagatggtcgtgcactgtggtagtcggcagagacgagcttctgcgattgcatcggattgccacatgggaccatcgtgctatgttactctttggttatactagcaaacttttctcgcctctggctttctatcattcgactcatacttagcgacatgggaataatccattttttcgtggtattgtgaggttgctcaatttctggctgcaggtggacagcgccaacaagtacgagaccttgctggaggtggtttaggtgatgaccgacctgaagttgatcatcaagcgggcctacatttcctccgacgacgagtggttcatgaacggttatatacttatagagtgtggatacatgtttgcaatagctccagatcaattgcaaatgaaccttgttgatatcgtgattattcacggcattgtcttattggatgttcttgacaaggagctcatcacttatgccattagagttcgctaatggtatggctggcactttccaaagctcatcaaaatagttttagataatatttagtatgccaaagctgtgaaggtgatgggcaacagagctaatgcaatcaaccttgacttctcagatgtaattgttgacatctatgtatgatctccttgactactatgggaactgtttagtgagaaactatattgttttcagatattgtctgatgaagagctagaaacatatctaaaggtgattgcagtaatatccatgggaacagaagttattgaacatgacttgttaaatatcagagagctatatgatcatgtgttggccctactatatgactatttaagaagcaagatgaacactatcaccgcaattctaacagcactggtgggtgaatcagttggtgccatattgtgcatggtggaagtttggtaaacttggccaagcaacctggtagcataatttaaatacttggtgtagagaaggctttattcagagctctaaagaaaagcattctacacccaagtatgggctcatctaccatgcatcctcaattgggaaggcttctcaaaagcataacggaaaaactctcggtctctatctgcaaaagctgctcttgctatccgataggatgcccttggtgttgatgaggacaactccattggcactaagagtcgactgaaggtcgtgacggttgggctggagagcacgctggtaggggaggacctcaacgaccgtgcctttgtctatggcttccttagcttcctggacaagatctcttgcgtaatcgtcctatttgtcttggaattgtacgaagacacgaatgagatgtagcgagatgaggggacacggtgagcaggtacgagatgggcctgatctcctcatacttcaccgtcctctccctggtggtcacatccattctgaggctataggtcaccactccgaaagccattgcaatggaagccccactgcttgtctgacaaactgaagaaaccggtgagtgtagatgtcgatcgggttggaagaaagaagaaagaaatgtgcatcctcttcaattagtttcaattagatttgaaagcaggtcactttgtaatagtatgtgtcttgtcatcgtgttggcacaacacagatgtgtatgatgtagttacgtataactcaagattctcattgctatgctttattataccaacaaagttcagatgtttggatatttctagcttattagggtctgatgcggaacatgtttaaacaaatatatcaaatttgaataatgtcaacatgtgtgatatatagaaac

SEQ ID NO: 2292 - DNA, 1614 bp, Zea Mays
cagggttccagggtcgagcggcattcaagcaaaccgccaactacgttggtagtttccactcctttaaatactctcctcttcctctcgtcgctccatccatcgtcaaaccgcccgcggtccaaaatccaaaccctgcgagtgtatagaagaagaaccccccaccccatcgcaacccgcaatggtcgcggcggaagatccggaacacttcttcgccgcctcgccgccgctgcgcgacgctgccgttgtcgccgccagcctgcaggagttcgtcgcgcgcaattcgcacgcatcatcagacggcgtcgggcggcggcgcatcgtctgcgtcacgtcgggcgggaccacggtgccgctggagcagcgatgcgtgcgctacatcgacaacttcagctccggccaccgcggcgccgcgtccaccgagtatttcttaaaggctggctatgcggtcattttcgtccatcggcgagggagttgccagcctttctccaggttcctgcctgatgactcgtttctccacttctttgatgtcacaacagattcgaaggttcaagtggccgagtcccaggcaacggtggtaaagagagcaattggggattatcgcaaggctactgaaggaggctctctgctgaaactcccattcaccacgatatttgagtatcttcagttactgaagatggttgctacatccatgagctgtgtgggtctccacgggatgttctatctcgctgcagctgtgtctgacttctatgttccatgggatagcatggcaaaacataagatccagtcagccggaggcccactggatatgaagctcagccaggttccaaaaatgctccccgttctgcgcaaccattgggcccccttggccttctgcgtatccttcaagctggagacggatccagacattctagttcagaaagcagagacggctctgagcaagtacaggatggacgttgttgtggccaatctacttgcaacgtacaaggaggaggtcgtcatcatctcgaatggcaaaagcaacaccattcgaaggtgcagcaaaggcgaggatctggaggagcatatcatcaagctcctagagaagagccactccaagtttatttacagcagcactcttgtagtgtttggatggatggacgaggaaggatgaagagggatgggataggatcattctaagttgacccatgtttggtttggaggtctagagtcacggtcaaggaatatttttcaaaaatagtggatggggccatcccttaaaaaataagggacggagtcaactcagagttgatcccatcccatctctcgttgacaccgaaccaaacacatcataaagctctacatgcagtgtgtacatttgctggtaatgtatatgtaagcaggactaataggattgttctgttctcacacgcacacaaacacgccaccaaaaaagatggtccaaagttgtatgtatcgtttgctattcacctgttaattaatggctttgtaatcagaaatgattattgttcaaattgtttcttaacttctccgatggcaatggacctcgcctagtttatcagtcaacatacctacttttaagggcatgtacaacctagatactatattgtggttttc

SEQ ID NO: 2293 - DNA, 1943 bp, Zea Mays
atccatcgtcaaaccgcccgcggtccaaaatccaaaccctgcgagtgtatagaagaagaaccccccaccccatcgcaacccgcaatggtcgcggcggaagatccggaacacttcttcgccgcctcgccgccgctgcgcgacgctgccgttgtcgccgccagcctgcaggagttcgtcgcgcgcaattcgcacgcatcatcaggtagccgcggcgccgccctgcatgggggacaacgcgcggaccgcgcgtgggccatttcgtcgaacgagcccttgaccgcgcgctctagcttaacccgtgcggccttttttgttttttgttttttgcgatgtgcgcgcagacggcgtcgggcggcggcgcatcgtctgcgtcacgtcgggcgggaccacggtgccgctggagcagcgatgcgtgcgctacatcgacaacttcagctccggccaccgcggcgccgcgtccaccgagtatttcttaaaggctggctatgcggtcattttcgtccatcggcggtaatccacaaagctacatcagctgcttcgttgcaaaaacaatcccacaacttttacttctcgtctttcagctttatcaactgttcagtatccacataatgcaaaaaaaaagaagaaagattcttcacataaatcccattatgcttgcatgaacgcagagggagttgccagcctttctccaggttcctgcctgatgactcgtttctccacttctttgatgtcacaacagattcgaaggttcaaggttggttgtggccgagtcccaggcaacggtggtaaagagagcaattggggattatcgcaaggctactgaaggaggctctctgctgaaactcccattcaccacgatatttgagtatcttcagttactgaagatggttgctacatccatgagctgtgtgggtctccacgggatgttctatctcgctgcagctgtgtctgacttctatgttccatgggatagcatggcaaaacataagatccagtcagccggaggcccactggatatgaagctcagccaggttccaaaaatgctccccgttctgcgcaaccattgggcccccttggccttctgcgtatccttcaagctggagacggatccagacattctagttcagaaagcagagacggctctgagcaagtacaggatggacgttgttgtggccaatctacttgcaacgtacaaggaggaggtcgtcatcatctcgaatggcaaaagcaacaccattcgaaggtgcagcaaaggcgaggatctggaggagcatatcatcaagctcctagagaagagccactccaagtttatttacagcagcacggaagggtgcagtaagaacgactacgaaaagcttataccgttaggcatcaaaagtctggcttaagggaaacattgatcggttctggagctcaaattaatagggaagccccatcagcactcttgtagtgtttggatggatggacgaggaaggatgaagagggatgggataggatcattctaagttgacccatgtttggtttggaggtctagagtcacggtcaaggaatatttttcaaaaatagtggatggggccatcccttaaaaaataagggacggagtcaactcagagttgatcccatcccatctctcgttgacaccgaaccaaacacatcataaagctctacatgcagtgtgtacatttgctggtaatgtatatgtaagcaggactaataggattgttctgttctcacacgcacacaaacacgccaccaaaaaagatggtccaaagttgtatgtatcgtttgctattcacctgttaattaatggctttgtaatcagaaatgattattgttcaaattgtttcttaacttctccgatggcaatggacctcgcctagtttatcagtcaacatacctacttttaagggcatgtacaacctagatactatattgtggttttc

SEQ ID NO: 2294 - DNA, 1357 bp, Zea Mays
ggcggggctcgctttcgaccctggctggggccccacttggcagagacgcaaatcaaaccgctgcacaaaaggagatgctcccctacaccggccgatttgctaatttgtcgttattgccgcttcgaaaatttgcatgaaactcataaaatcacgcagaaaactatacaacgaattcagtgctaaaattccaattatttccctgcaggctgcatcggccaggtggccaagtctcgtcaagtcgtccccgctcccccatagtcgccaccgccggcccgcctgcccgcggcacgcaacccgccacgcccaagcagcggagggccaaaaatgcgctcgcagttgccgtagcgccatcgcgtcgtccatccgctggggagccacgcgatggaggaggacaagcgggcggaggaggcgcggcgcgccaaggaggccggcaacgacgcataccgcaagtccttcctcgagacggccgtcgagcactacacccgcggcgcgctcctcgacccccgagatatctccttcctcactaaccgcgccgccgcctacttccacatgggcaagtataaggagtgcgtgagggactgcgagggggcggtggagcgtggcagggacctcagcgccgccaacaagctgatcgcgaaggcgctgttgcggaaggcgtcggcgctgctcgagctcgcgacatgctccggggattacgcaccggcgatcagggccctgcagcaatcgctcaccgagcattacagcgaggagacgcacgagaagctcaacaaggcggtggtagttaagaaggagcttgaggagcaggagcgattggatcaggagacggccgaccaacaccgcgagagaggcaacgaattgttcaagcagaagcagtaccatgaagcagcaacgcactacacacgagctatgaaaatgaacccaaaggatccaagagcatttagcaacagagctcaatgccacatctatctgggagctttccctcaaggtcttgaggatgcagagaaatgtgttgaactggatccaacttttataaagggctacgtgcgtaaagctaaagttcagttcctgatggaaaattatgaaaatgctatggcaacttacctagagggtttgacgtacgacccaaataatctggaggttcttgatggcttaagaagggaaatttccaatcagaaaataaccttcttaaatttcgaaaagcaacagaacaagctgcaatactcaagaaggaagcttctgatgagcgtttgaagcgtattgaatctgaacgaatgtagtgctagtgctgtatatggctggtgggtggatttagtaatctgatatatttagtgcaatgatatgtagctatcctgcaata

SEQ ID NO: 2295 - DNA, 2153 bp, Zea Mays
cacgggagggagtttgggttggggaccggatccaccaatttttcttccggcgatgggaaaacgaaagagacctgcatctgattccattctggaagcaccccactccaatccactctacatgtcccacgctcagacccgggtccctcaccgccgtctctcgcgctccgcgtgcggtggacggggtttgccagcgacttcaagaaaggtagatataatttgatgggaagatgaatggtgcagaggaggaggagccgcctcacgtcagcagcatgcccaagacacaagacggtgttaccaagcccagtctagggaaagagcccatcccagggagcgagctctggacggatgggctcatctgtgcttttgagctggtcaagagtcacaggaagcctgttcagcacaaatcatggctggcaactgagcagatacaggagaagggccccactatgtgcacgaggaagcactcaagaaggaatgggcaccagatcactgagccgaaagtggatgagagcattgtgttggaaaacccccagcagactgatttcagtaacgatccttcagtgctcaaagataggccattgtatgctggggagattttggatcataaatgggtgcctattggatggaataggatcgccgagctggtcctgagggttcagtcagactccagctgggagaatgagttgatggagatgagtgatagcgaggatgattacaccgtggctgatcttgcagctccatactggcagcgccctgtgggacctacttggtggtgtcatgtcaccgcaggccatccttcaatagatgcatggttgaatagcgctcactggatgcatcctgccatcagaattgcactgagagatgagagcaaactgataagcgaccggatgaagtacctgctctacgaggtcccagttagagttgcaggagggctgttatttgagcttcttggccagtcaataggagacccaaatcatgaagaggaagatatacctattgtgcttaggtcttggcaagcacaaaattttcttgttacaacaatgcatgtcaaaggcccttcatccaatataaatgtgttaggagtgactgaagtgcaggagttgcttcttgctggtggaagccaaacacctagatcagtgcatgaagtaattgcacatttggtcagccgtctttcacgttgggatgacagattattccggaaatatgtatttggggaagcagatgaaattgaattgaaatttgtgaataggagaaatcatgaagatcttaatcttgttagcatcatactgaatcaggaaatcagaaggttagcaacacaggtaatcagggttaaatggtcacttcatgcaagggaagagatattaattgagcttctcagacatttgaggggtaatgccacaagagctattctagagagtattagaaagtgtacgagggacatgttggaagagcaggaagctgtgcgcgggcgcttgttcactattcaggatgttatgcagagcactgtccgtgcatggctacaagatagaagcctcagagttacacataatctggcaatttttggcggcggtggcatggttttatccataatcactggccttttcggaatcaacgtcgatggcatacctggagcgcagaacaccccctacgcttttgaatccagttaacagtgagaaggtgaaggtgaggaagctggagctccagcacctggtttcgatgttccagcacgaagcggagcagcatggcaaggtcagggaaggtgttagccggcatggcgcctcgccgagttcatccacggcctctgatgaagggtacattcttatctcctgagatgggagatttatttgctgacgtgcaaggtcttgttttgaaaggctggaactgaagagaagtcgggtaaatggtatacttacacgtgtcttaagaattgtaattgggggatttgacatcgaaacgttggatatgataattgtagcagcagattggctttcctctgttgcttgagatcgcggctgtgatcgtttcttatcgaattttcagtaggaggagcaacggagtaagcgtcgttgcttttaagcccgtatgcccacgggcgcgagtgccactgccagtgaccatcaaacgctatagttctgtttctgaaagccctcgcc

SEQ ID NO: 2296 - DNA, 3221 bp, Zea Mays
ctcagccatgcagccagccgctgctctctggcgcccacagcagcccagccggcagccgctgctctcctcagccagcagaccaaagcagaccgccctcggcctccacgaactgtggcactgcgcccacagcagaccatattgatatggatcacttggacgaacatgacagtgatgacatgaatgtaggggtagcttcagatggcccctccagactcagaaagaagaggtccaaggtttgggacgactacaagcccatcattgtagatggagcaattcagagcgcggaatgtcgctactgtcatattcacatgagttgcagaggtgctgatggtcaatccaatgggacaagccatttgtggcgacaccagaaaatttgccgagcaaaagatgggatttttccaaacccacttcaacaggacgcatacttgccatatgtggtgaatgaagtagacccgctggaccaaattcttccagattcacttgatgagattaatttagtgactcaaagtgagaatagcaaattcaggtcaaaggtttggaaggattttataccattctatgttcgagggagagtccagggtgctgactgtgttcattgccacaagcgattcagtgcagataaaggtagaagccatttgaaccggcacactcaaacttgtccggcacggagtggaaatagcctaaatcaccagaaaggtgtgttgtaccagtctagtctaccgagttctaaatctagctttcaagatgagctttcaccagcattgacaaatggcaaagttcagattgcagaatatgctagtaagttcctcaaagacagccgaggcgatgcaagccttgtggaacatcatgttctagctttaccagcaatggatgatatgaatccctcagagcagaatacttcatcagctcaggctgctactgatataaccaggaaacctgaccaagaagcatcttatcatgagttaactagaatgattatttcacatggctatcccttgtcgattgtcgagcatgaagaaatgagaaggtttgcaaagatcctaaaccccacatttaacatggcttcaagcattgatatagaagagtattcaactcttttgtttcagaaagaaaagtctgagcttaaggaaagaattgcacttttgtcccatcgggtttccttgtcagcaagtgtttgggttcctcatggagctgaagcctcagtaaagtatctctgtttggcagtgcattttgtagattcaaactggaaacttcaaaggaaaaccatcaaatttggtgtgttctggtcctcatctactagtttggaaaggatgatacagtttaaggaggcctgtgtgctagattctgatattggaccatttaatgtcatacaggaagctataagagattggaatcttgatcagaagcatttcagcttgacatctggtagtgaaattagaaatgacgaggggacctcaaaactgatggacttgctcatccaaaggaaatgccttcctattagaggcaagctatacaatatcgcttgtgtgaatgatgtgcttaacggcattgtctcaaaaggtcaaccggtgctttatcatgttggtaacatactagagaaatttattcaggcacaaatgtcctcatctctgactcgacagcaacttctagaagttgttgcacatatgggattgaagtgcccacaggaagaagctaaatggtggcacataatttactttaggcttgaagttcttctgcatttcaagaaggcatttccctcggaagacttgttatctgcagaagataacaaaacttttgagtctgtttgcaggatactcagggctttttatcgcgctgttgaagtgatttgtggtcctgtttgccccacagcaaatatgtacttcaatgaactgtggaaagttagaactgttttgcaagaagaagcatcaactgatcgtgctgcacttgctaacatggttttggagatgctggaagcattcaatgagtattggaaaaattcatatgtgtggctgtcaatacctgttgttcttgatcccagattcaaaattacttttattgagttccgtttaaagcgagcttttggtaccaatgcagaaaaacatgtatctgccattcgtgatacaataagggagctgtttcatgaatattgtggactttcagataacttgggtgccgatacatcaactcgtgaagctcatgatgttgagttgtatggatttgacagtgattcattggaagattgggatgagcatcttaatgcacagacaaggaaccaacaattgacagaacttgacaactatctagaagatggtcttgtcccaaggaaggatgattttgatatcctgaactggtggatgagtaattgtacaaagtatccaaccctttcagttatggcacgcgatgtcctggcgattccagcttctgccgataattttgaggctgcgttaagtggtgaggcaaatgtgatacataagcaatggagtacattaagtatcaaaacaattgaggctcttgtatgtacccgagattggggtaaatagaatgtttacaagcagttcataaccatagtgcttctaacccgggaatacaggatgatacagaaagagtacaccagccatttattgtgcagtatatcagacatctcgcagccaactggtaatacaaaccctaccaaacgtgggcttctgagtgttttcatgtattgtgcacattgatgtccagtgattttattatgttattactatttgtacagtgccaatgacgtgctgctgctttagcctgattgagaattcttgtacaacgtctctagaaagccatttgatgactgatgttctgttcatgttatcctggcgtgctggatgtgctgtgcccccttcaaaagctgaattttggggcaaccaccagtgctcaaatttgatctacgggtcctgtggctgacatcaccatgaaatgattgctggcttcaaatcacatttaggacaatgtggttggttaaacgttgcattaatcttgagtagcatatcaatactgcaaaagagcggaagaattagaatacctttcgctcaaggtctatattcatataggaatgtaaatattactgtcaccagtaagacatcttacaccttccttctgttcaaatcaatagatgcccattccgctggcaaacttttttctcactgaactctaaagtctcaacgtacccggcctgcctgtgattgtgg

SEQ ID NO: 2297 - DNA, 515 bp, Zea Mays
gcgcattggaaagggaatctcaccaaggccctaaactggctccaccgtggttcccttgcacgacgccctgcggcgggtccgccgaacacagcgtcaaaatggacccacatgtcatcgaaggtacgtagcttgcaagcggcgttctcaataacattcagatgcgcagccacgtcgtagcaggcctaggcttttttgaggagcgcggactagggagtagggaggacgggacgggagagagagagagaggcgcgtgcgttcgtggtcggtgccggtgcgtgcgtggcgtggtggccgctgccgtacgtgatccgtccaccccctctcctcttccgacgccggcgacagcgggaggtactcccggggaggaatggccgtggcaagggctccgctcggcgcggttgctgcgatggcggtggccgctctcgtcttcgccatactcatgaccgccgccgctgcggcgcaggcaccggcgcccgcgcccaccagcgacgcacacaggaatcttattcttgacg

SEQ ID NO: 2298 - DNA, 1986 bp, Zea Mays
aaaacagaattccacgacgtctcacctgcacacgcgctcgtcgtcgtctcatcggcgcttgctgcgacaactcacgccggtggcttgagcgcgccatcgaccagggttgttacaccaagcgatggcggcggtggccggggatggtggtggtgggcccgaggagggcgtcggcgagagctcgtccccgcctcgcaaccccgtgctcgcgcccgcacccgctgcctctggcgggagcgggagcggtggcggcggccgcggaggtggcctccgggacatctgccgcgaggtgttcgagcgcctcgtcaacgatggccacagggcgggctccgagctccttgcccagctcgaggcccacttcaatcgactccccatcagctacaagctggatgtgaatattgacaaagcagaagatgtgttaatccatcagaaagttttggcagaagcacaggatcctgataggcgcccagcattcactgtccgtttcctcagggtcaaagacatcatatgcacacattcatgagatactattctccaccaaggataaacccaagctcctgagtcagttgtctgctttgctttctgacattggactgaacatcaaggaggcacatgtgttctcaacaacagatggttattctcttgatgtttttgttgttgacggttggcccgttgaggaaactgatggtttgcataaggcactagaagtatcaattttgagaaatgagggttcctggtctggctctgaatcctcagcttccaaaagatcactgccattcctagcacaggattttgaatcagatattgacacaagacttctgaagcttgtaaataagattgcttctggatcttgtggggacatgtttcttgggacctacagtggtgaggaggttgctgttaaagttcttaatcctcagaatttgaacaaaaatgtatggagtgaatttaagcaagaaatcaacatgttaagggaagttgatcatccgaatattgtccgattcattggttcatgcacaaagccacctcagttttacataattacagagtgcatgtctagaggaagtctgtttgatttcttgcacaatgagcataatgtgttggacctcccaacgcttctgaagtttgcactagatgtatgccaagggatgtcctacttgcatcagaaaggcattatccacagagatttaaagtctggcaaccttttattggataaaaatgatgttgttaaagtagccgattttggtctagctcgttttcaggatggagggggtgatatgactgctgaaactgggacctatagatggatggcacctgaggttataaatcatcagccctatgacagcaaagcagatgtatacagttttgctcttgtactttgggagctcatgacatccaagattccatataataccatgacccccctccaagcagctgttggtgtgaggcagggattgcgaccacaaattccagaaaatacgcatccgaggctcataaacttgatgcagagatgttgggaagctactccgactgatcgcccttcatttgaggagatcattcctgaactagaggatatccaggcacaagcacagagaacatcaggggaaacgagccagacagaggaggaccactcatgcagtaaagattgattgaccccctctgtacatacatgttgacaattctctcatctgatcactaaaatgctgagaaagtagcatatcatcagttttgatgccatagaaaaaaagtagcgaatcattttgtcaagttttgtcagaaccttttggggccgacggccaaagctcttggtattatccttgcttcactcttaggtcccatttttcttgatatgatgatatctttgagttgcggcttgatatatgtgaatatttgaatgagaaatttactgctgcttgtcacgcaaaatcgcatgtttttgtcggggcttgtgagtttgttgagcttgcatattgaggttttcatgattatgtc

SEQ ID NO: 2299 - DNA, 1625 bp, Zea Mays
gcttccgcagttccgcttcaaaattccggtgaaaaaggaagacgacagctccagacccctaggcccctagccatggccggagaggcgggaaaagacccccaagcgtggctagccgccaacgagacggcgtcggccttcctctcccgttcactctcctcgcggccccccatcaccctcccgccaccactgcaccgcgcgcctctccgcccgggcaacgtcgtcgagatcgccggcccgtccaactctggcaagtcccacctcctcctcatggctgcagtgcagtgcatattaccaaaggagtgggagggaatctactttggggggctggggagggcggtcatgtacttggacttggactgccgatttgatgtgctacggctggctcaaattctgaggaatcgtattgcagagggctgccgtttagcacaccttagaaatggagaccctgaaaatgatgtcactaaagatgagtttcagtgttctcttcaaaatacactgttttctgattgtatgcagcgcttcttgtatgctcgatgttgcaaaagtcctgaattcatagatgctttgaagactgtacagtctcaatcaaggagggaagtgtccggcgctggtatatattttgttatgatagacagcattggtgcgttctactggatagatcgtggttctcaagcttcacgagagaataaagggaaaacactgcaaagcatttttgaaagtgttgtccacgagttacgcaagattttgcaacttgaacctgcattggttttggtcacaaaggcatccgtttatggggaaggcaccacaacagcaaatgacttcaatcgggattcttcaaaatacatgctggaggatcctagcggtttgggatattcaagacgggaggaagaaagaactctctctaatcgggaatatatgccatcaatatggcagtcttttgtcacacacaggataaaccttcaagtagaagcagaagttccctctgtgctggaaagtgaggtgcttcctttgcatacttctgagtgggtgcaaccttgcctcaaaatgaaggagaagttttctattatggatgatggtgttaaccttatccactgaatttaccagtctggcattctgtgatgaacatgtcgaacctcactgaattgttgtgatctgattaagaaaacagtatgcccacagcacgcctacaggatgttatgtggcagtgtctctatcttggttcttttattctttggcatggcacacatacagaacacagaagcatagaacgtgtgatggctgagtactgtatgattttaaagtttatccaatagtaccaaaaaatggaaactgttctcacgttcaagaattcttaacatagtggagctgagtaacctctactgatgccttacaattgatgggtgggaactcccaataccgatgatcaagttgctgttatcaccttattttaatcatggtgatgcttggtgccgggaatgatgagttagcatgtcgctatttattctgtttttttgtacatatttgttagggataagtgaccctgtattatatacattcctgttcagacgggtacgtttcgttatccattttgtctcacacacagagagggagtgagttcattttcc

SEQ ID NO: 2300 - DNA, 4525 bp, Zea Mays
cgccaaaagacaagaccataaagattactcatagattaaagtagggtttggacgtctgcctgtccatttcggcgtctgttcttagcggccgacaagcggaatctggatcaagtcccctgcttcaacccatcccctctcatcgattcattgccacaaggcagctgattgctcacagcgttggatgtgagaattggattcggacccaccgatcgatatgccgttcggccacacgcggctcgatgtccggcgtccgccgcagtcgtcctacctctgctgctccacaaccaccgtcgccgtattcgtcgcgctctgcctggtggctgtgtggatggcgtcgtccatgctcgtcacccctgccgagttccctccatttcagtccaaagtgcgtccactgaggcctcatgactctcctcctgccaccggaagcttaaccagtgctgatcagggcgatggcatcaccacccatgatgatccaccacctgctacacaacaattgcctcctgtaacagacagcatggatggtgaaaatcagcaacaagaacttttcactacagagcgcggaccatggtcaaccaaggctgaacaatctaacaaggacgctaaagagcaaaccttgacgtccagtagcccactgagcttccgttgggcgttatgcaacgtcgatgctggagcagattatattccatgcctcgacaacgtagcagctatcaagaagctccgttccaccaagcactacgaacaccgagaaaggcattgccccgagaaatctcctacctgccttgttcctctaccagagggctacaggaatccaattaggtggccaaagagcagagatcagatatggtacaataacgttcctcatactaagctggttgaatacaagggacaccaaaactgggttaaggtttctggagaatacctcaccttccccggaggcgggactcagtttaaacatggcaaagaaggatgtagcatggggaaaacgaagccgtgtagtgttagatgttggttgtggagtagctagctttggaggatatctatttgacagagatgtgattactatgtcatttgcacctaaagatgagcacgaagctcaggttcagtttgctcttgaaagaggaatacctgctatatcagctgtcatgggtacaaaaaggctcccatttcccagtagggtgtttgatgttgttcattgtgcacgatgtagggtaccgtggcatattgaaggcggtaaactcttgcttgaactggacagactgttacgtcctggtggttactttgtgtggtctgctacacccgtataccagaagctgcctgaagatgttgagatatggcaagccatgtctgctctaaccagttcaatgtgctggaaaatggtcaacaaagtaaaggatagggtgaatagagtgggtatagcaatttacagaaagccaacagacaacagctgctacgaagcaagatctgaaacaaaccctccactctgtggagagtacgacgatcctgatgctgcctggaacatatcgttgggggcttgtatgcataagttgcctgtagatcctaccgttcgtggttcacagtggcctgagttatggccattgagactggagaaaccaccttattggctgagaggttctgaggctggagtatatgggaaacctgccccggaggattttcaagcagactatgaacactggaagcgagtcgtgagcaattcatacatgaatggtttgggtattgactggtctactgttagaaatgttatggatatgaaagccgtatatgcagggttcgcagcagctttgcgcgatctcaaggtgtgggtcatgaatgtggttccaattgattcacctgacacgcttccaattatatatgagcgcgggctgtttggactgtaccatgactggtgtgagtcgtttagcacctatccgagaacttatgatcttgtgcacgccaaccatctgttctccaaggttaagaagaggtgcgagctattacctgttatcgtggaggtggaccgggtgttgaggccacaaggccggctaattgtcagagacaacattgaaacaacaagtgaggtggagaacattctgaaatctctccactgggaggtccgcatgtcttacttccaggagaaagaaggcttgctgttggtgcagaagacgacatggcggccaaatgaaactgaagctaagctatgatgcagagcccttgccccttggaaggaggaaaggaagatctagtgtttgcaaggtcctctacttttgtgaggcatcttttatttatgtagaatttgtagagctatatgattggtagatgtggaggaatctggtggtttccagcatatccatattcatctgtggaagtggaactggttatctgattccctttttttttttgattcatccattcggaaggggaaggtaacgataaatagaaaaggaattgagaattggcggaggtcaaaggcccaacacaacccaatccggaaccccaaccccacccccaccaccaagggtccaaagccatgcgtgccgccatggcggcggcggtcctccgacccacggccgccaccctccgcttcctctccaccccaccacaccagcgccgccgcgtcttggtcggacacctcccctttgctcgccgacgccgccactcctccaccgctacggccccagcgctggaggactccagcccccgcagtggcgaaggcaaggccgtgcgccgccgccgcgcccgtgaatctccccagggcctcctccgccaccagctcgacatgtgctcccgcaacgccgacctcaccaccgcgctccgcctctacgacgacgccctctccccggacaaccccatcccgctctccctccaccactacaactgcctgctctacctctgctccaacgccgccgctaccgactctgacagccatatctccgccaccgccgctcagcgcggcttcgacatcttcgccaggatggaggccgacggcgtccagcccaacgaggccaccctcaccagcgtcgcgcgcctcgccgccgccacccgcgaccctgccatggccttctccgtcgtccgccgcatggccgctgcgggcaccccgccgcgcctccgcacctacggccccgccctcttcgcctactgcgatgccaaagatgccgacggcgccaagcaggtcgaggctcacatggacgcatctggcgtcgtgcccgaggagcccgagctcgcagcgttgctccgcgtcaacgcggacacgggcaaggccgatgaggtttacaggctcctgcacaggacgcgcgtcctcgtcaggcaggtctgcgacaccactgcccaggtcgtcgaggcctggttccggtcggacgcagcgtcccaggcgggggtggacagctgggatcccaccaaggtaaaggagggcgtcgtcaagggcggcggcggctggcatggccagggatggcttggcaagggcgcatggagcgttggctggaccgagatgggcaaggatgggacatgccaacgctgtggggagaggcttgtctgcattgacattgatccagccgagactgacaactttgcaaattcgctcaccgaactggccattaagcttgaggccagggaagatttcctcagttttcagagctggctacgccgccatggaccattcgatgctgttatagacgctgctaatgtaggcctttacaaaagtaaagatttctgtttttcacagttgccactgatcgttttgcataggagccgtgtaaatgttggtcctgcaaaagccccatacaaccagaagattctggacagttggaggaatgctggagctctgtatgcaacccctcctggctccaatgacgattggtattggctgtatgcagctgtcagttgccgatcgttgcttgttacaaatgatgagatgcgagaccacttgttccaactgcttggcactagttttttccctaggtggaaagaaaaacatcaggtcagactaactttctccgggcatggccctacccttcacttgccgcctccttattcaattgttattcaggaatctgaagatggaagctggcatgtaccaacaacaacaggcgatgatattgaaaagccacggcagtggttgtgcactactagaaaatctttgaggtagatgtgatttaattttggcccagtcaagttgacacagaatggtgccaagttgccaaccttggtgggaactgggaagggtggtggcgtgacaaaccctgaaaccagcaaagcttaaatgcagcaacttgttggcccgaacgaaagaaagctgattggagtacaagtgatgaatatgagcaggccatggatatggaaagccttttgttgtaacatcgtgagctgtttattgctagcccaggttattctagagtagtttgagaaccgtggtaaggtaatttgcttcatgtgagttttacttttattaaatgacgtgccatgccagtgatttgaaggatgtggcaggcaagtaatcaaagaaagagatgaatgttatctaatttgtcattag

SEQ ID NO: 2301 - DNA, 4686 bp, Zea Mays
ggaaaacgaaggaaaatagagcgaagaagagttggtggtcggtagctactgctccgttgcccaattcttccctcctcctccctactgattccagctatcagtcctctccgccaaaagacaagaccataaagattactcatagattaaagtagggtttggacgtctgcctgtccatttcggcgtctgttcttagcggccgacaagcggaatctggatcaagtcccctgcttcaacccatcccctctcatcgattcattgccacaaggcagctgattgctcacagcgttggatgtgagaattggattcggacccaccgatcgatatgccgttcggccacacgcggctcgatgtccggcgtccgccgcagtcgtcctacctctgctgctccacaaccaccgtcgccgtattcgtcgcgctctgcctggtggctgtgtggatggcgtcgtccatgctcgtcacccctgccgagttccctccatttcagtccaaagtgcgtccactgaggcctcatgactctcctcctgccaccggaagcttaaccagtgctgatcagggcgatggcatcaccacccatgatgatccaccacctgctacacaacaattgcctcctgtaacagacagcatggatggtgaaaatcagcaacaagaacttttcactacagagcgcggaccatggtcaaccaaggctgaacaatctaacaaggacgctaaagagcaaaccttgacgtccagtagcccactgagcttccgttgggcgttatgcaacgtcgatgctggagcagattatattccatgcctcgacaacgtagcagctatcaagaagctccgttccaccaagcactacgaacaccgagaaaggcattgccccgagaaatctcctacctgccttgttcctctaccagagggctacaggaatccaattaggtggccaaagagcagagatcagatatggtacaataacgttcctcatactaagctggttgaatacaagggacaccaaaactgggttaaggtttctggagaatacctcaccttccccggaggcgggactcagtttaaacatggtgcgttgcgctacattgattttattcaggaggcaaagaaggatgtagcatggggaaaacgaagccgtgtagtgttagatgttggttgtggagtagctagctttggaggatatctatttgacagagatgtgattactatgtcatttgcacctaaagatgagcacgaagctcaggttcagtttgctcttgaaagaggaatacctgctatatcagctgtcatgggtacaaaaaggctcccatttcccagtagggtgtttgatgttgttcattgtgcacgatgtagggtaccgtggcatattgaaggcggtaaactcttgcttgaactggacagactgttacgtcctggtggttactttgtgtggtctgctacacccgtataccagaagctgcctgaagatgttgagatatggcaagccatgtctgctctaaccagttcaatgtgctggaaaatggtcaacaaagtaaaggatagggtgaatagagtgggtatagcaatttacagaaagccaacagacaacagctgctacgaagcaagatctgaaacaaaccctccactctgtggagagtacgacgatcctgatgctgcctggaacatatcgttgggggcttgtatgcataagttgcctgtagatcctaccgttcgtggttcacagtggcctgagttatggccattgagactggagaaaccaccttattggctgagaggttctgaggctggagtatatgggaaacctgccccggaggattttcaagcagactatgaacactggaagcgagtcgtgagcaattcatacatgaatggtttgggtattgactggtctactgttagaaatgttatggatatgaaagccgtatatgcagggttcgcagcagctttgcgcgatctcaaggtgtgggtcatgaatgtggttccaattgattcacctgacacgcttccaattatatatgagcgcgggctgtttggactgtaccatgactggtgtgagtcgtttagcacctatccgagaacttatgatcttgtgcacgccaaccatctgttctccaaggttaagaagaggtgcgagctattacctgttatcgtggaggtggaccgggtgttgaggccacaaggccggctaattgtcagagacaacattgaaacaacaagtgaggtggagaacattctgaaatctctccactgggaggtccgcatgtcttacttccaggagaaagaaggcttgctgttggtgcagaagacgacatggcggccaaatgaaactgaagctaagctatgatgcagagcccttgccccttggaaggaggaaaggaagatctagtgtttgcaaggtcctctacttttgtgaggcatcttttatttatgtagaatttgtagagctatatgattggtagatgtggaggaatctggtggtttccagcatatccatattcatctgtggaagtggaactggttatctgattccctttttttttttgattcatccattcggaaggggaaggtaacgataaatagaaaaggaattgagaattggcggaggtcaaaggcccaacacaacccaatccggaaccccaaccccacccccaccaccaagggtccaaagccatgcgtgccgccatggcggcggcggtcctccgacccacggccgccaccctccgcttcctctccaccccaccacaccagcgccgccgcgtcttggtcggacacctcccctttgctcgccgacgccgccactcctccaccgctacggccccagcgctggaggactccagcccccgcagtggcgaaggcaaggccgtgcgccgccgccgcgcccgtgaatctccccagggcctcctccgccaccagctcgacatgtgctcccgcaacgccgacctcaccaccgcgctccgcctctacgacgacgccctctccccggacaaccccatcccgctctccctccaccactacaactgcctgctctacctctgctccaacgccgccgctaccgactctgacagccatatctccgccaccgccgctcagcgcggcttcgacatcttcgccaggatggaggccgacggcgtccagcccaacgaggccaccctcaccagcgtcgcgcgcctcgccgccgccacccgcgaccctgccatggccttctccgtcgtccgccgcatggccgctgcgggcaccccgccgcgcctccgcacctacggccccgccctcttcgcctactgcgatgccaaagatgccgacggcgccaagcaggtcgaggctcacatggacgcatctggcgtcgtgcccgaggagcccgagctcgcagcgttgctccgcgtcaacgcggacacgggcaaggccgatgaggtttacaggctcctgcacaggacgcgcgtcctcgtcaggcaggtctgcgacaccactgcccaggtcgtcgaggcctggttccggtcggacgcagcgtcccaggcgggggtggacagctgggatcccaccaaggtaaaggagggcgtcgtcaagggcggcggcggctggcatggccagggatggcttggcaagggcgcatggagcgttggctggaccgagatgggcaaggatgggacatgccaacgctgtggggagaggcttgtctgcattgacattgatccagccgagactgacaactttgcaaattcgctcaccgaactggccattaagcttgaggccagggaagatttcctcagttttcagagctggctacgccgccatggaccattcgatgctgttatagacgctgctaatgtaggcctttacaaaagtaaagatttctgtttttcacagagagtaactaaatcaaagaagttgccactgatcgttttgcataggagccgtgtaaatgttggtcctgcaaaagccccatacaaccagaagattctggacagttggaggaatgctggagctctgtatgcaacccctcctggctccaatgacgattggtattggctgtatgcagctgtcagttgccgatcgttgcttgttacaaatgatgagatgcgagaccacttgttccaactgcttggcactagttttttccctaggtggaaagaaaaacatcaggtcagactaactttctccgggcatggccctacccttcacttgccgcctccttattcaattgttattcaggaatctgaagatggaagctggcatgtaccaacaacaacaggcgatgatattgaaaagccacggcagtggttgtgcactactagaaaatctttgaggtagatgtgatttaattttggcccagtcaagttgacacagaatggtgccaagttgccaaccttggtgggaactgggaagggtggtggcgtgacaaaccctgaaaccagcaaagcttaaatgcagcaacttgttggcccgaacgaaagaaagctgattggagtacaagtgatgaatatgagcaggccatggatatggaaagccttttgttgtaacatcgtgagctgtttattgctagcccaggttattctagagtagtttgagaaccgtggtaaggtaatttgcttcatgtgagttttacttttattaaatgacgtgccatgccagtgatttgaaggatgtggcaggcaagtaatcaaagaaagagatgaatgttatctaatttgtcattag

SEQ ID NO: 2302 - DNA, 4761 bp, Zea Mays
ggaaaacgaaggaaaatagagcgaagaagagttggtggtcggtagctactgctccgttgcccaattcttccctcctcctccctactgattccagctatcagtcctctccgccaaaagacaagaccataaagattactcatagattaaagtagggtttggacgtctgcctgtccatttcggcgtctgttcttagcggccgacaagcggaatctggatcaagtcccctgcttcaacccatcccctctcatcgattcattgccacaaggcagctgattgctcacagcgttggatgtgagaattggattcggacccaccgatcgatatgccgttcggccacacgcggctcgatgtccggcgtccgccgcagtcgtcctacctctgctgctccacaaccaccgtcgccgtattcgtcgcgctctgcctggtggctgtgtggatggcgtcgtccatgctcgtcacccctgccgagttccctccatttcagtccaaagtgcgtccactgaggcctcatgactctcctcctgccaccggaagcttaaccagtgctgatcagggcgatggcatcaccacccatgatgatccaccacctgctacacaacaattgcctcctgtaacagacagcatggatggtgaaaatcagcaacaagaacttttcactacagagcgcggaccatggtcaaccaaggctgaacaatctaacaaggacgctaaagagcaaaccttgacgtccagtagcccactgagcttccgttgggcgttatgcaacgtcgatgctggagcagattatattccatgcctcgacaacgtagcagctatcaagaagctccgttccaccaagcactacgaacaccgagaaaggcattgccccgagaaatctcctacctgccttgttcctctaccagagggctacaggaatccaattaggtggccaaagagcagagatcagatatggtacaataacgttcctcatactaagctggttgaatacaagggacaccaaaactgggttaaggtttctggagaatacctcaccttccccggaggcgggactcagtttaaacatggtgcgttgcgctacattgattttattcaggaggcaaagaaggatgtagcatggggaaaacgaagccgtgtagtgttagatgttggttgtggagtagctagctttggaggatatctatttgacagagatgtgattactatgtcatttgcacctaaagatgagcacgaagctcaggttcagtttgctcttgaaagaggaatacctgctatatcagctgtcatgggtacaaaaaggctcccatttcccagtagggtgtttgatgttgttcattgtgcacgatgtagggtaccgtggcatattgaaggcggtaaactcttgcttgaactggacagactgttacgtcctggtggttactttgtgtggtctgctacacccgtataccagaagctgcctgaagatgttgagatatggcaagccatgtctgctctaaccagttcaatgtgctggaaaatggtcaacaaagtaaaggatagggtgaatagagtgggtatagcaatttacagaaagccaacagacaacagctgctacgaagcaagatctgaaacaaaccctccactctgtggagagtacgacgatcctgatgctgcctggaacatatcgttgggggcttgtatgcataagttgcctgtagatcctaccgttcgtggttcacagtggcctgagttatggccattgagactggagaaaccaccttattggctgagaggttctgaggctggagtatatgggaaacctgccccggaggattttcaagcagactatgaacactggaagcgagtcgtgagcaattcatacatgaatggtttgggtattgactggtctactgttagaaatgttatggatatgaaagccgtatatgcagggttcgcagcagctttgcgcgatctcaaggtgtgggtcatgaatgtggttccaattgattcacctgacacgcttccaattatatatgagcgcgggctgtttggactgtaccatgactggtgtgagtcgtttagcacctatccgagaacttatgatcttgtgcacgccaaccatctgttctccaaggttaagaagaggtgcgagctattacctgttatcgtggaggtggaccgggtgttgaggccacaaggccggctaattgtcagagacaacattgaaacaacaagtgaggtggagaacattctgaaatctctccactgggaggtccgcatgtcttacttccaggagaaagaaggcttgctgttggtgcagaagacgacatggcggccaaatgaaactgaagctaagctatgatgcagagcccttgccccttggaaggaggaaaggaagatctagtgtttgcaaggtcctctacttttgtgaggcatcttttatttatgtagaatttgtagagctatatgattggtagatgtggaggaatctggtggtttccagcatatccatattcatctgtggaagtggaactggttatctgattccctttttttttttgattcatccattcggaaggggaaggtaacgataaatagaaaaggaattgagaattggcggaggtcaaaggcccaacacaacccaatccggaaccccaaccccacccccaccaccaagggtccaaagccatgcgtgccgccatggcggcggcggtcctccgacccacggccgccaccctccgcttcctctccaccccaccacaccagcgccgccgcgtcttggtcggacacctcccctttgctcgccgacgccgccactcctccaccgctacggccccagcgctggaggactccagcccccgcagtggcgaaggcaaggccgtgcgccgccgccgcgcccgtgaatctccccagggcctcctccgccaccagctcgacatgtgctcccgcaacgccgacctcaccaccgcgctccgcctctacgacgacgccctctccccggacaaccccatcccgctctccctccaccactacaactgcctgctctacctctgctccaacgccgccgctaccgactctgacagccatatctccgccaccgccgctcagcgcggcttcgacatcttcgccaggatggaggccgacggcgtccagcccaacgaggccaccctcaccagcgtcgcgcgcctcgccgccgccacccgcgaccctgccatggccttctccgtcgtccgccgcatggccgctgcgggcaccccgccgcgcctccgcacctacggccccgccctcttcgcctactgcgatgccaaagatgccgacggcgccaagcaggtcgaggctcacatggacgcatctggcgtcgtgcccgaggagcccgagctcgcagcgttgctccgcgtcaacgcggacacgggcaaggccgatgaggtttacaggctcctgcacaggacgcgcgtcctcgtcaggcaggtctgcgacaccactgcccaggtcgtcgaggcctggttccggtcggacgcagcgtcccaggcgggggtggacagctgggatcccaccaaggtaaaggagggcgtcgtcaagggcggcggcggctggcatggccagggatggcttggcaagggcgcatggagcgttggctggaccgagatgggcaaggatgggacatgccaacgctgtggggagaggcttgtctgcattgacattgatccagccgagactgacaactttgcaaattcgctcaccgaactggccattaagcttgaggccagggaagatttcctcagttttcagagctggctacgccgccatggaccattcgatgctgttatagacgctgctaatgtaggcctttacaaaagtaaagatttctgtttttcacaggtaggaggaggcttttcttcagccaagcagtaaaattatgatccgatacttgtttgacacaaaggcaggcaggcagacagacagagctaatacgaccaagtttgggtcgctctctccttgagccgtgtaaatgttggtcctgcaaaagccccatacaaccagaagattctggacagttggaggaatgctggagctctgtatgcaacccctcctggctccaatgacgattggtattggctgtatgcagctgtcagttgccgatcgttgcttgttacaaatgatgagatgcgagaccacttgttccaactgcttggcactagttttttccctaggtggaaagaaaaacatcaggtcagactaactttctccgggcatggccctacccttcacttgccgcctccttattcaattgttattcaggaatctgaagatggaagctggcatgtaccaacaacaacaggcgatgatattgaaaagccacggcagtggttgtgcactactagaaaatctttgaggtagatgtgatttaattttggcccagtcaagttgacacagaatggtgccaagttgccaaccttggtgggaactgggaagggtggtggcgtgacaaaccctgaaaccagcaaagcttaaatgcagcaacttgttggcccgaacgaaagaaagctgattggagtacaagtgatgaatatgagcaggccatggatatggaaagccttttgttgtaacatcgtgagctgtttattgctagcccaggttattctagagtagtttgagaaccgtggtaaggtaatttgcttcatgtgagttttacttttattaaatgacgtgccatgccagtgatttgaaggatgtggcaggcaagtaatcaaagaaagagatgaatgttatctaatttgtcattag

SEQ ID NO: 2303 - DNA, 6517 bp, Zea Mays
atggagttcgcaactggagcgctaggcgcccttcttcccaagctctccatgctgcttcatggtgagtacaacctggagaagggcgtcaggggggacatccagcgcgtcatgagcaagctcgagcgggttcatgctgccctccgccatgttggcgaagtgcctgtgccactggagcagatcattcgtcctggtatagtcaatatgtgggcacgcgacgtcggggagctatcctacgacatggaggacttcgtcgacaccttcctggtacggtgttggtactattgttcctaccgtcaaaaccttgttttatcctcgcataattgctctaaactacaccaaggccacggaccttgtcggcatcgatgaggcaagggaggaactgatcacaaggttgaccaaggaatatgacacctccactgaacaaaggcaagtctctatcgttggttttggaggacttggcaagacagcgcttgcaaaagcagtttataacaaacttaaagctaaaggggaattccattgtgcggcctttgtgtcgatgtctcggtatcctaagctcgtagaaatcttcaaggaattgctttatgagcttgacaagactgagtacaaggacgttattagcaccccaatggaaatagatgaacttataaatctagtgcacgaattccttaataaaaagaggtaccttatcgctgttgatgacatatgggatactgacgcatgggcaatgatacgatacgcttttgctgagaataagctaggaagcagaataatcgtaactactcgcagaattgatgttgctgagtatgtaggtggttgttgctatatgatgaaacctcttactcgagagaaatcaaagatattattctatggacgaacatttggttctgaaggtaaatgccctcctgaactttctcatgcgtctgagaaaatattgaataaatgcggaggcgtgccattggctattattactatatctagcttgctggctagtaagtcaaaaaacataaaagaatggttctatcttgctgattctattggttccggaatactagaaagaagtgctgaaatggagattatgtggaagatactgctgcgtagctattctgatctaccagcacgattaaagacatgtttgttatatctgagtattttccctgaagattgtgagattgggatgcatcggttaatatggaggtggatagctgaaggttttttcaatggagaactagcacatggtgggctctttaagattggggaatcttgtttccacgagctcataaggagaagcatggtgcagccagtaacacttgaaggcacgggtcttgtatatgcttgtcgtgttcataatatgtttcatgatttgatcctctccatgtcacatgaagaacaatttgtttctgtagtcaatgaaaaatttggtcctcttgatgttctttctcggcggttagcattccagaacataaaaaaaagtcagtacagacttgtggaacatccacggctggcacaatcgaggtcacttaatgccattggatgtcctatatacgcgatacctccaattgaaagctataaatcattgcgtgtactggatttcgaaaattgtgcaggtattgaagaccatgatcttgttcatcttgggaaattgcatcacctcaagttccttgggctaagaaacacgtttatcggtaagctgccggaaggaatagggaacctcaagtttctgcaaacattggacctcgatggaactggtgtggaagaattacctcaagccttgcataatcttacagaattgatgtgcctaattgctgactggagaacgagagtgcccaattggattggtaacctcacgtccctgcagcacttggtgatttatcctggtgggcatgacgatgaggattctgcgagcaggtttgttaatgagctgggaaagctgagacaactaagggtgctccgttttttgataaaagcacaagatgaagggcagctgagagatttgctagagtccctatcgaatctgccagagatcgaggctatacattttgattactatggagtacagttaaatagagtgatactcacgtcgtctacatctgttacccttccccacgtcctctacatctgttacccttccccggagcgggattacaacctgccccagagcggccggcgctggaggctggccgtcccgtccgccgccggcgcgtccagtctcgcctcgtcgctctcgcgctccctcaggtggaagcgccggctcccgggtctcccctccctcaccctgcgcagcggctccgcggccgccgtggtcgacgctgtcgcgttccgcgtcatgtacgtcgtcgaggccgtcgtgctgggcctcgcgctctcctgcttcttcctctgcgctatgggtggttcttgcatgtttaggctctgcatagcaaacacggaggaggactggaggccgggaacggagcagtacaagttcatcgatcgaagcagccctggatctgcactccttagagctctctcccaggtgggcacttttctcagcttcatagagctgtcctccattccccagactagaccacgctctgccaagcaatccatggtcgggaaccccggcgacgtccgcgcggtggtcctggacccggccgccggggccctcgcgggcctccgccgcggcggcgtgctggtggactgcacgagctcctccccgtccctcgcgcgcgaggtcgccgcggccgcggccgcggcgggctgccacgccgtcgacgcgccagtctccggcggcgtgctgcggactgcacgagctcctccccgtccctcgccattacagagctctctgcaagccatcgttcaaatcacagcccttggtgaggaggtggagtctgtggggagagcacaggtggctctgcgggatgcaatacgtacccatctcaaccgtcctacccttgaaataaacttatttgggcaaacaatacctccagagttaccaaagcaagacgacgatggagcgaaaattgtggagatatcaccggccgagagtagtcgtcaagctcaagagcgggagaaaagaagcatcgatgtggcgacgaagaaagcaacacgggtgccgtctttttacacaaagtcatcaattgatgagccaatggatcagctcataaacatgctatctgtggttgatgacgaagcctacactaagaacataaagatactatctattgtaaggtctgagggactggggaagactactctggcccaaaaagcattcgaagagctccattcgcaatttgaccgtggggcgttcgttctactaggccagaatcctgacttgaggagagtttttgctgacattctccgtggtcttgacaagcaaaggtacatagatttcccagtggcaatattggatctagtggacctgatctggctagtccgtaaatcgctcataaacaaaaggttctttattgtatttgatgatatatgtgatgtaaaagcatgggaaattataaagtgcgctttgattgaaaataacaaccacagtgtagttcttacgacaagtcgcaacactggtattactgaaattattggtggcagcaagcaattacaacctctatcagcaactatctctaaaaatctactctgcaaaaggttatttggatcggcaggcaagtgtccttctgaactagtaaatatatgtgacaatcttgtagaagaatgtggtggaatactatctgtgatcgacgaaactgtgacattgcttgcaagtataccaccaacagtggagaactgggaggcagtgtacgccagaagaatgttggatcggtcttatcctggtttaactgacagtctaaagaattgcttactctattttactatgtttcgaagaggacatgagattagtggagaacacttaatatgtgcatggatagctgaaggttttgtacatgggcaagaggtagcagagacctaccttagtgatctagtaaaaaagaaattaatcgatgcagtggaggttgatgctggaggaaaggtcctcacgtgccgcatgtatgacttggtgcatgactttatcgtctcaaaatcaattgaagaacgatttgtttatattttaaatgactcggaaggcagagatttgtcagaagcagttcacgttcaccagcgactatacatccagggacataataacaaagaactagacctgcaaattccttggctgccccaagtgaagtcacttgtctcctgtggtactgcgccatccatcttaaagtttaagggtctacatgttatggatttaggggcctgtgaatctttgcaggctagtcatctcaagggtataaataatgtaagttctttgagatatctggtcataggaggtaagtgtatctctggcatccctaaggaaattgcgaagctggaacatttgcggacactagatttaagtgcaagtggtctaaatgaattgccagaatatgttttcatgataagaaaattggaacgcctaattgttaatagtcagatgaagatatcatatggtattgcaaagatgtctgctttacaggagctaggcgatatcaatgtcaccgacccagagttgctgaaaagtctctgtaagctaaccaaattgagggttcttagaatttccatatggtcatgggatgatagtttgaagaactattttaaacaactgtgtgacaacttgcgttcactggttcagtgcacggagaacatccagagtctctccataatgacatgctgctccctggttttcatggatgatttgggtgagaattggacccctcaatgtctccagaagctcgaggtcggttgcagcgcatttgacatattgccaagttggtttggctcactttctagtatctccacgttaacaatcgaggtctacaagctgtcacaggacataattgatacgctcggaaggctggctggtcttggttctctatccctgacatcgaaacaagtaccaaaaggatactttgtgatcggctctgacaggttcaataagctacagagcttaaagtttgtgagcaatgcaatggtagagatgtttccacgtcaacaatcaaatggcacggaacagctcaaaaggcttatgattgtgttccatgcttcacgtacacaagatgtgaacaaagatttctgctttggtttggagaacctgtcttccctagagcatgttcgtgttgaaataatttgtttcgatgccagccataacatggtgaaaaacgcagaagctgcagttcagaaagctatatctggcacaagtatcgcaaatctggaaatacgaagacttcaggaaaatagtatgacacaggacgaagcggacctctgtgatgcagtacaagagcagaataatcagaagcaccagaaaatgaagagttctatggagtcccaggatgggtacctcacttctttaccgaaccaggaaagtgcagatgttgttggctccgatagtattgtggaaccactagtgaatgaaatgaactcgcagacaattaagagggatcaatccacgaatttcagtgaagatgaggacttaatgttggtttctagctaccttaatgtaagcaaagattctattactggaagggataaaaaagaaggcacattttgggaaagagtatgggaatactataacaagaataggacattcgagtccgatcatagttggtcgtcattgaaacatcgctggcttgcaattcagaaggaagtgaatatctttcaaggttactatgatgccatagaaaggaaaaatcaaagtggccagacaagtgatgacaagcatgctgaagcagaagtagaattccgagaaaaacaagggaaggctttttctgtattccatgtgtggatgattctaaggcatgagccaaagtgggcatttagagaatcaaagatcaaagaccagcatgaagcaaacaatgctaatactgatgctcctgccaacatttatagaccacaggggaggaaagctgagaaggaaaaggctcgtgcgagaaagcatggtggatctgatgttgatggtgatccgttcatcgaagaagtaaaaaatatgagggaagcacgggaagaaacagaacgagaccgaaagacccatgatgacaagttctatgagttggaaaagagtaagcttgaattggagcgagatcgacatgacaaagagataatgcaaacagacacaagcacaatggatgaagaatcgaaacaatacttcaagttgatgaaacaagagattttggctcgccgtttcgggagtagtcagccatagttgttagctgttggaaacttagatagtattttgtttttgccagacatctgttattgataatcttgtgaacttttacatatggcacctgtcaactacttcctcctttctaaaatattattcgttttagggtgttaatagattcatacaatatttgatgtatgtattttatatatgtgtctagattcgttgtctaagggtcttctagtctggcattgcctgtacagtcataatttgagcacttcctattttgtttggtgg

SEQ ID NO: 2304 - DNA, 6662 bp, Zea Mays
atggagttcgcaactggagcgctaggcgcccttcttcccaagctctccatgctgcttcatggtgagtacaacctggagaagggcgtcaggggggacatccagcgcgtcatgagcaagctcgagcgggttcatgctgccctccgccatgttggcgaagtgcctgtgccactggagcagatcattcgtcctggtatagtcaatatgtgggcacgcgacgtcggggagctatcctacgacatggaggacttcgtcgacaccttcctggtgcgtgtccaaggccctgaacgcaccagcaaaagaaggttattcattaagatgatagatatggtcatgaataatcgccatgatgagatcgccccagacatcaagcacttcgaaaagcgcgtccaggagatggatgatcgtcgtcaaaggtacggtgttggtactattgttcctaccgtcaaaaccttgttttatcctcgcataattgctctaaactacaccaaggccacggaccttgtcggcatcgatgaggcaagggaggaactgatcacaaggttgaccaaggaatatgacacctccactgaacaaaggcaagtctctatcgttggttttggaggacttggcaagacagcgcttgcaaaagcagtttataacaaacttaaagctaaaggggaattccattgtgcggcctttgtgtcgatgtctcggtatcctaagctcgtagaaatcttcaaggaattgctttatgagcttgacaagactgagtacaaggacgttattagcaccccaatggaaatagatgaacttataaatctagtgcacgaattccttaataaaaagaggtaccttatcgctgttgatgacatatgggatactgacgcatgggcaatgatacgatacgcttttgctgagaataagctaggaagcagaataatcgtaactactcgcagaattgatgttgctgagtatgtaggtggttgttgctatatgatgaaacctcttactcgagagaaatcaaagatattattctatggacgaacatttggttctgaaggtaaatgccctcctgaactttctcatgcgtctgagaaaatattgaataaatgcggaggcgtgccattggctattattactatatctagcttgctggctagtaagtcaaaaaacataaaagaatggttctatcttgctgattctattggttccggaatactagaaagaagtgctgaaatggagattatgtggaagatactgctgcgtagctattctgatctaccagcacgattaaagacatgtttgttatatctgagtattttccctgaagattgtgagattgggatgcatcggttaatatggaggtggatagctgaaggttttttcaatggagaactagcacatggtgggctctttaagattggggaatcttgtttccacgagctcataaggagaagcatggtgcagccagtaacacttgaaggcacgggtcttgtatatgcttgtcgtgttcataatatgtttcatgatttgatcctctccatgtcacatgaagaacaatttgtttctgtagtcaatgaaaaatttggtcctcttgatgttctttctcggcggttagcattccagaacataaaaaaaagtcagtacagacttgtggaacatccacggctggcacaatcgaggtcacttaatgccattggatgtcctatatacgcgatacctccaattgaaagctataaatcattgcgtgtactggatttcgaaaattgtgcaggtattgaagaccatgatcttgttcatcttgggaaattgcatcacctcaagttccttgggctaagaaacacgtttatcggtaagctgccggaaggaatagggaacctcaagtttctgcaaacattggacctcgatggaactggtgtggaagaattacctcaagccttgcataatcttacagaattgatgtgcctaattgctgactggagaacgagagtgcccaattggattggtaacctcacgtccctgcagcacttggtgatttatcctggtgggcatgacgatgaggattctgcgagcaggtttgttaatgagctgggaaagctgagacaactaagggtgctccgttttttgataaaagcacaagatgaagggcagctgagagatttgctagagtccctatcgaatctgccagagatcgaggctatacattttgattactatggagtacagttaaatagagtgatactcacgtcgtctacatctgttacccttccccacgtcctctacatctgttacccttccccggagcgggattacaacctgccccagagcggccggcgctggaggctggccgtcccgtccgccgccggcgcgtccagtctcgcctcgtcgctctcgcgctccctcaggtggaagcgccggctcccgggtctcccctccctcaccctgcgcagcggctccgcggccgccgtggtcgacgctgtcgcgttccgcgtcatgtacgtcgtcgaggccgtcgtgctgggcctcgcgctctcctgcttcttcctctgcgctatgggtggttcttgcatgtttaggctctgcatagcaaacacggaggaggactggaggccgggaacggagcagtacaagttcatcgatcgaagcagccctggatctgcactccttagagctctctcccaggtgggcacttttctcagcttcatagagctgtcctccattccccagactagaccacgctctgccaagcaatccatggtcgggaaccccggcgacgtccgcgcggtggtcctggacccggccgccggggccctcgcgggcctccgccgcggcggcgtgctggtggactgcacgagctcctccccgtccctcgcgcgcgaggtcgccgcggccgcggccgcggcgggctgccacgccgtcgacgcgccagtctccggcggcgtgctgcggactgcacgagctcctccccgtccctcgccattacagagctctctgcaagccatcgttcaaatcacagcccttggtgaggaggtggagtctgtggggagagcacaggtggctctgcgggatgcaatacgtacccatctcaaccgtcctacccttgaaataaacttatttgggcaaacaatacctccagagttaccaaagacgacgatggagcgaaaattgtggagatatcaccggccgagagtagtcgtcaagctcaagagcgggagaaaagaagcatcgatgtggcgacgaagaaagcaacacgggtgccgtctttttacacaaagtcatcaattgatgagccaatggatcagctcataaacatgctatctgtggttgatgacgaagcctacactaagaacataaagatactatctattgtaaggtctgagggactggggaagactactctggcccaaaaagcattcgaagagctccattcgcaatttgaccgtggggcgttcgttctactaggccagaatcctgacttgaggagagtttttgctgacattctccgtggtcttgacaagcaaaggtacatagatttcccagtggcaatattggatctagtggacctgatctggctagtccgtaaatcgctcataaacaaaaggttctttattgtatttgatgatatatgtgatgtaaaagcatgggaaattataaagtgcgctttgattgaaaataacaaccacagtgtagttcttacgacaagtcgcaacactggtattactgaaattattggtggcagcaagcaattacaacctctatcagcaactatctctaaaaatctactctgcaaaaggttatttggatcggcaggcaagtgtccttctgaactagtaaatatatgtgacaatcttgtagaagaatgtggtggaatactatctgtgatcgacgaaactgtgacattgcttgcaagtataccaccaacagtggagaactgggaggcagtgtacgccagaagaatgttggatcggtcttatcctggtttaactgacagtctaaagaattgcttactctattttactatgtttcgaagaggacatgagattagtggagaacacttaatatgtgcatggatagctgaaggttttgtacatgggcaagaggtagcagagacctaccttagtgatctagtaaaaaagaaattaatcgatgcagtggaggttgatgctggaggaaaggtcctcacgtgccgcatgtatgacttggtgcatgactttatcgtctcaaaatcaattgaagaacgatttgtttatattttaaatgactcggaaggcagagatttgtcagaagcagttcacgttcaccagcgactatacatccagggacataataacaaagaactagacctgcaaattccttggctgccccaagtgaagtcacttgtctcctgtggtactgcgccatccatcttaaagtttaagggtctacatgttatggatttaggggcctgtgaatctttgcaggctagtcatctcaagggtataaataatgtaagttctttgagatatctggtcataggaggtaagtgtatctctggcatccctaaggaaattgcgaagctggaacatttgcggacactagatttaagtgcaagtggtctaaatgaattgccagaatatgttttcatgataagaaaattggaacgcctaattgttaatagtcagatgaagatatcatatggtattgcaaagatgtctgctttacaggagctaggcgatatcaatgtcaccgacccagagttgctgaaaagtctctgtaagctaaccaaattgagggttcttagaatttccatatggtcatgggatgatagtttgaagaactattttaaacaactgtgtgacaacttgcgttcactggttcagtgcacggagaacatccagagtctctccataatgacatgctgctccctggttttcatggatgatttgggtgagaattggacccctcaatgtctccagaagctcgaggtcggttgcagcgcatttgacatattgccaagttggtttggctcactttctagtatctccacgttaacaatcgaggtctacaagctgtcacaggacataattgatacgctcggaaggctggctggtcttggttctctatccctgacatcgaaacaagtaccaaaaggatactttgtgatcggctctgacaggttcaataagctacagagcttaaagtttgtgagcaatgcaatggtagagatgtttccacgtcaacaatcaaatggcacggaacagctcaaaaggcttatgattgtgttccatgcttcacgtacacaagatgtgaacaaagatttctgctttggtttggagaacctgtcttccctagagcatgttcgtgttgaaataatttgtttcgatgccagccataacatggtgaaaaacgcagaagctgcagttcagaaagctatatctggcacaagtatcgcaaatctggaaatacgaagacttcaggaaaatagtatgacacaggacgaagcggacctctgtgatgcagtacaagagcagaataatcagaagcaccagaaaatgaagagttctatggagtcccaggatgggtacctcacttctttaccgaaccaggaaagtgcagatgttgttggctccgatagtattgtggaaccactagtgaatgaaatgaactcgcagacaattaagagggatcaatccacgaatttcagtgaagatgaggacttaatgttggtttctagctaccttaatgtaagcaaagattctattactggaagggataaaaaagaaggcacattttgggaaagagtatgggaatactataacaagaataggacattcgagtccgatcatagttggtcgtcattgaaacatcgctggcttgcaattcagaaggaagtgaatatctttcaaggttactatgatgccatagaaaggaaaaatcaaagtggccagacaagtgatgacaagcatgctgaagcagaagtagaattccgagaaaaacaagggaaggctttttctgtattccatgtgtggatgattctaaggcatgagccaaagtgggcatttagagaatcaaagatcaaagaccagcatgaagcaaacaatgctaatactgatgctcctgccaacatttatagaccacaggggaggaaagctgagaaggaaaaggctcgtgcgagaaagcatggtggatctgatgttgatggtgatccgttcatcgaagaagtaaaaaatatgagggaagcacgggaagaaacagaacgagaccgaaagacccatgatgacaagttctatgagttggaaaagagtaagcttgaattggagcgagatcgacatgacaaagagataatgcaaacagacacaagcacaatggatgaagaatcgaaacaatacttcaagttgatgaaacaagagattttggctcgccgtttcgggagtagtcagccatagttgttagctgttggaaacttagatagtattttgtttttgccagacatctgttattgataatcttgtgaacttttacatatggcacctgtcaactacttcctcctttctaaaatattattcgttttagggtgttaatagattcatacaatatttgatgtatgtattttatatatgtgtctagattcgttgtctaagggtcttctagtctggcattgcctgtacagtcataatttgagcacttcctattttgtttggtgg

SEQ ID NO: 2305 - DNA, 6801 bp, Zea Mays
ccttagttgattcttctgtggatgaagatgaaatctacttctgaaatcttgccaccgtccaactctgtttgatctaatctctatatcctccggccaccaagttcttgtcaaataagcgagcacagcaagctagccatggagttcgcaactggagcgctaggcgcccttcttcccaagctctccatgctgcttcatggtgagtacaacctggagaagggcgtcaggggggacatccagcgcgtcatgagcaagctcgagcgggttcatgctgccctccgccatgttggcgaagtgcctgtgccactggagcagatcattcgtcctggtatagtcaatatgtgggcacgcgacgtcggggagctatcctacgacatggaggacttcgtcgacaccttcctggtgcgtgtccaaggccctgaacgcaccagcaaaagaaggttattcattaagatgatagatatggtcatgaataatcgccatgatgagatcgccccagacatcaagcacttcgaaaagcgcgtccaggagatggatgatcgtcgtcaaaggtacggtgttggtactattgttcctaccgtcaaaaccttgttttatcctcgcataattgctctaaactacaccaaggccacggaccttgtcggcatcgatgaggcaagggaggaactgatcacaaggttgaccaaggaatatgacacctccactgaacaaaggcaagtctctatcgttggttttggaggacttggcaagacagcgcttgcaaaagcagtttataacaaacttaaagctaaaggggaattccattgtgcggcctttgtgtcgatgtctcggtatcctaagctcgtagaaatcttcaaggaattgctttatgagcttgacaagactgagtacaaggacgttattagcaccccaatggaaatagatgaacttataaatctagtgcacgaattccttaataaaaagaggtaccttatcgctgttgatgacatatgggatactgacgcatgggcaatgatacgatacgcttttgctgagaataagctaggaagcagaataatcgtaactactcgcagaattgatgttgctgagtatgtaggtggttgttgctatatgatgaaacctcttactcgagagaaatcaaagatattattctatggacgaacatttggttctgaaggtaaatgccctcctgaactttctcatgcgtctgagaaaatattgaataaatgcggaggcgtgccattggctattattactatatctagcttgctggctagtaagtcaaaaaacataaaagaatggttctatcttgctgattctattggttccggaatactagaaagaagtgctgaaatggagattatgtggaagatactgctgcgtagctattctgatctaccagcacgattaaagacatgtttgttatatctgagtattttccctgaagattgtgagattgggatgcatcggttaatatggaggtggatagctgaaggttttttcaatggagaactagcacatggtgggctctttaagattggggaatcttgtttccacgagctcataaggagaagcatggtgcagccagtaacacttgaaggcacgggtcttgtatatgcttgtcgtgttcataatatgtttcatgatttgatcctctccatgtcacatgaagaacaatttgtttctgtagtcaatgaaaaatttggtcctcttgatgttctttctcggcggttagcattccagaacataaaaaaaagtcagtacagacttgtggaacatccacggctggcacaatcgaggtcacttaatgccattggatgtcctatatacgcgatacctccaattgaaagctataaatcattgcgtgtactggatttcgaaaattgtgcaggtattgaagaccatgatcttgttcatcttgggaaattgcatcacctcaagttccttgggctaagaaacacgtttatcggtaagctgccggaaggaatagggaacctcaagtttctgcaaacattggacctcgatggaactggtgtggaagaattacctcaagccttgcataatcttacagaattgatgtgcctaattgctgactggagaacgagagtgcccaattggattggtaacctcacgtccctgcagcacttggtgatttatcctggtgggcatgacgatgaggattctgcgagcaggtttgttaatgagctgggaaagctgagacaactaagggtgctccgttttttgataaaagcacaagatgaagggcagctgagagatttgctagagtccctatcgaatctgccagagatcgaggctatacattttgattactatggagtacagttaaatagagtgatactcacgtcgtctacatctgttacccttccccacgtcctctacatctgttacccttccccggagcgggattacaacctgccccagagcggccggcgctggaggctggccgtcccgtccgccgccggcgcgtccagtctcgcctcgtcgctctcgcgctccctcaggtggaagcgccggctcccgggtctcccctccctcaccctgcgcagcggctccgcggccgccgtggtcgacgctgtcgcgttccgcgtcatgtacgtcgtcgaggccgtcgtgctgggcctcgcgctctcctgcttcttcctctgcgctatgggtggttcttgcatgtttaggctctgcatagcaaacacggaggaggactggaggccgggaacggagcagtacaagttcatcgatcgaagcagccctggatctgcactccttagagctctctcccaggtgggcacttttctcagcttcatagagctgtcctccattccccagactagaccacgctctgccaagcaatccatggtcgggaaccccggcgacgtccgcgcggtggtcctggacccggccgccggggccctcgcgggcctccgccgcggcggcgtgctggtggactgcacgagctcctccccgtccctcgcgcgcgaggtcgccgcggccgcggccgcggcgggctgccacgccgtcgacgcgccagtctccggcggcgtgctgcggactgcacgagctcctccccgtccctcgccattacagagctctctgcaagccatcgttcaaatcacagcccttggtgaggaggtggagtctgtggggagagcacaggtggctctgcgggatgcaatacgtacccatctcaaccgtcctacccttgaaataaacttatttgggcaaacaatacctccagagttaccaaagcaagacgacgatggagcgaaaattgtggagatatcaccggccgagagtagtcgtcaagctcaagagcgggagaaaagaagcatcgatgtggcgacgaagaaagcaacacgggtgccgtctttttacacaaagtcatcaattgatgagccaatggatcagctcataaacatgctatctgtggttgatgacgaagcctacactaagaacataaagatactatctattgtaaggtctgagggactggggaagactactctggcccaaaaagcattcgaagagctccattcgcaatttgaccgtggggcgttcgttctactaggccagaatcctgacttgaggagagtttttgctgacattctccgtggtcttgacaagcaaaggtacatagatttcccagtggcaatattggatctagtggacctgatctggctagtccgtaaatcgctcataaacaaaaggttctttattgtatttgatgatatatgtgatgtaaaagcatgggaaattataaagtgcgctttgattgaaaataacaaccacagtgtagttcttacgacaagtcgcaacactggtattactgaaattattggtggcagcaagcaattacaacctctatcagcaactatctctaaaaatctactctgcaaaaggttatttggatcggcaggcaagtgtccttctgaactagtaaatatatgtgacaatcttgtagaagaatgtggtggaatactatctgtgatcgacgaaactgtgacattgcttgcaagtataccaccaacagtggagaactgggaggcagtgtacgccagaagaatgttggatcggtcttatcctggtttaactgacagtctaaagaattgcttactctattttactatgtttcgaagaggacatgagattagtggagaacacttaatatgtgcatggatagctgaaggttttgtacatgggcaagaggtagcagagacctaccttagtgatctagtaaaaaagaaattaatcgatgcagtggaggttgatgctggaggaaaggtcctcacgtgccgcatgtatgacttggtgcatgactttatcgtctcaaaatcaattgaagaacgatttgtttatattttaaatgactcggaaggcagagatttgtcagaagcagttcacgttcaccagcgactatacatccagggacataataacaaagaactagacctgcaaattccttggctgccccaagtgaagtcacttgtctcctgtggtactgcgccatccatcttaaagtttaagggtctacatgttatggatttaggggcctgtgaatctttgcaggctagtcatctcaagggtataaataatgtaagttctttgagatatctggtcataggaggtaagtgtatctctggcatccctaaggaaattgcgaagctggaacatttgcggacactagatttaagtgcaagtggtctaaatgaattgccagaatatgttttcatgataagaaaattggaacgcctaattgttaatagtcagatgaagatatcatatggtattgcaaagatgtctgctttacaggagctaggcgatatcaatgtcaccgacccagagttgctgaaaagtctctgtaagctaaccaaattgagggttcttagaatttccatatggtcatgggatgatagtttgaagaactattttaaacaactgtgtgacaacttgcgttcactggttcagtgcacggagaacatccagagtctctccataatgacatgctgctccctggttttcatggatgatttgggtgagaattggacccctcaatgtctccagaagctcgaggtcggttgcagcgcatttgacatattgccaagttggtttggctcactttctagtatctccacgttaacaatcgaggtctacaagctgtcacaggacataattgatacgctcggaaggctggctggtcttggttctctatccctgacatcgaaacaagtaccaaaaggatactttgtgatcggctctgacaggttcaataagctacagagcttaaagtttgtgagcaatgcaatggtagagatgtttccacgtcaacaatcaaatggcacggaacagctcaaaaggcttatgattgtgttccatgcttcacgtacacaagatgtgaacaaagatttctgctttggtttggagaacctgtcttccctagagcatgttcgtgttgaaataatttgtttcgatgccagccataacatggtgaaaaacgcagaagctgcagttcagaaagctatatctggcacaagtatcgcaaatctggaaatacgaagacttcaggaaaatagtatgacacaggacgaagcggacctctgtgatgcagtacaagagcagaataatcagaagcaccagaaaatgaagagttctatggagtcccaggatgggtacctcacttctttaccgaaccaggaaagtgcagatgttgttggctccgatagtattgtggaaccactagtgaatgaaatgaactcgcagacaattaagagggatcaatccacgaatttcagtgaagatgaggacttaatgttggtttctagctaccttaatgtaagcaaagattctattactggaagggataaaaaagaaggcacattttgggaaagagtatgggaatactataacaagaataggacattcgagtccgatcatagttggtcgtcattgaaacatcgctggcttgcaattcagaaggaagtgaatatctttcaaggttactatgatgccatagaaaggaaaaatcaaagtggccagacaagtgatgacaagcatgctgaagcagaagtagaattccgagaaaaacaagggaaggctttttctgtattccatgtgtggatgattctaaggcatgagccaaagtgggcatttagagaatcaaagatcaaagaccagcatgaagcaaacaatgctaatactgatgctcctgccaacatttatagaccacaggggaggaaagctgagaaggaaaaggctcgtgcgagaaagcatggtggatctgatgttgatggtgatccgttcatcgaagaagtaaaaaatatgagggaagcacgggaagaaacagaacgagaccgaaagacccatgatgacaagttctatgagttggaaaagagtaagcttgaattggagcgagatcgacatgacaaagagataatgcaaacagacacaagcacaatggatgaagaatcgaaacaatacttcaagttgatgaaacaagagattttggctcgccgtttcgggagtagtcagccatagttgttagctgttggaaacttagatagtattttgtttttgccagacatctgttattgataatcttgtgaacttttacatatggcacctgtcaactacttcctcctttctaaaatattattcgttttagggtgttaatagattcatacaatatttgatgtatgtattttatatatgtgtctagattcgttgtctaagggtcttctagtctggcattgcctgtacagtcataatttgagcacttcctattttgtttggtgg

SEQ ID NO: 2306 - DNA, 2163 bp, Zea Mays
gcgtccgccccttgccccctccctctccgtgtctccgattctggatctgcccatgccgtaacccgcaggctcccggcatctcgctcttgcctccaaaattcaccttcgccgattgccgtcgtgggccgccgcgatggcgttgcggacgcctcgtaccacctccgtcgcattctccgctgactcccccctcggcggcgtcccaatacgctcctcaacagcctgctccgttcccacgccacctcctctcgctccgctgcgaccaccgaggaccaccagagcgggacgccgcggaactcgtcggccacgtcctggccgtcgcgcatgctgacgacgaggctgttgccctcccgggcgccctcggcgcggagctcgcacgcgtcctgcgagcgcgcggcgccgctgaggcaccgggcgcgccggcggaggaacaagttgaagtaggtccggaacagaggacagggagggacctaaaattcaagcccaaaggaccaaagcccgaagtttcttttcttccccgcaaagaaagaaggcaagagttctcggcttctcgcaagtcgcgacagagaaagaggcggagttgcggagaagatgcagagcagcagcatgaagagggagatcagcgaggcccacgacaccattcgcttcggcatcaacgccggcgtcaaagcggacctcgccccgccgcacccgaatgaaatccagaaatcatttcttcgttctaaattgaaagtctagaaataggtgtttatagattcatcgcgacacgaattcaccagaaaaggttacaagagaaatgcagagatttattctatggagaaagcatcagggcattctgctttgcgtcacaaagtttcaaacccagcaaaacccccagtcgatatatcagataggatgattggtgataccaaaggaagcaaactcaaacacacaaagtttcagaagcacagctactgcttgctccctcaggcgaccttgacctcgatggtcttgggcttcttgggctccggcgggggcagcttctcgacggtcaccgtgagcacgccgtccctgcacacggtgtcgcatcgggcggctcgacgaggcggacaaagccggtggcagaccatgggtgcaatgggtgcagagacttaggtggatggttctaaatgttcacgacaaaaaaatgtgtggcgcatgggtttctgtcctgagggtgcgcagatcggtcgccattagaaagatgcagcttcaactactttggaccaggtgcaaagtcatggcagttctgatagggcaccctacacaaatctggagtttgaacacacgacaggtgatatgcttatcttttgtggatggactgttcgcttggcttttgctgattgaattggagctgcacttgtagtttggtaacgtttatatacataactatgcggattgcgttagctagaatatgtcttccacttcgagtactggtcgttcgagatccttgtgctgtttgcagggctgatgcccgactctcatctcagcacttccatcattgcaatgtgccaaaacaccgaagccatatcatacatgatcacctatggcttcgccgctgtcatcagcacaagggtgtccaacgagctgggagcccggaacatcgccaacgccaggaaggcgctcactgtgtcgctggcgctgtccctgatgctgggggtggcgttcctgctgctcctgggcctcggccacgacctctgggggtactctgcggcgtcgccaggggctacgggtggcagcacctggcggcgtggaccaacctggtggccttctatgtcatcggcttgccgctcgccatcctcttaggattcacgctcgccttccaaaccaaggggctgtggatggggcagatatgcagcctcctctgccagaactgcgtcctcttttttatcaccctgcgaaccaactggcaggagttagacctgaccatattcaacaaggacaacgattttgtctgctaggaatctagaaagagtttttcttttcttttttgccatgtgctgttgctgaaacattgaaccatcagcatcaggcttcgacagagctgtctgatgtttgttcatcaattcatcaccagtgtaacactacagattgtaacatttggaatctcaaggataggaattaaaaatgttctgatacaccaatata

SEQ ID NO: 2307 - DNA, 2317 bp, Zea Mays
tggattgaagccacccccgcatttcacgcgcacggtggacatcgcatgccaacacgtggcgtgggctcggacccgaataattcattcaatccagcagcagaacaatcgagttgcgtccgccccttgccccctccctctccgtgtctccgattctggatctgcccatgccgtaacccgcaggctcccggcatctcgctcttgcctccaaaattcaccttcgccgattgccgtcgtgggccgccgcgatggcgttgcggacgcctcgtaccacctccgtcgcattctccgctgactcccccctcggcggcgtcccaatacgctcctcaacagcctgctccgttcccacgccacctcctctcgctccgctgcgaccaccgaggaccaccagagcgggacgccgcggaactcgtcggccacgtcctggccgtcgcgcatgctgacgacgaggctgttgccctcccgggcgccctcggcgcggagctcgcacgcgtcctgcgagcgcgcggcgccgctgaggcaccgggcgcgccggcggaggaacaagttgaagtaggtccggaacagaggacagggagggacctaaaattcaagcccaaaggaccaaagcccgaagtttcttttcttccccgcaaagaaagaaggcaagagttctcggcttctcgcaagtcgcgacagagaaagaggcggagttgcggagaagatgcagagcagcagcatgaagagggagatcagcgaggcccacgacaccattcgcttcggcatcaacgccggcgtcaaagcggacctcgccccgccgcacccgaatgaaatccagaaatcatttcttcgttctaaatttctagaaataggtgtttatagattcatcgcgacacgaattcaccagaaaaggttacaagagaaatgcagagatttattctatggagaaagcatcagggcattctgctttgcgtcacaaagtttcaaacccagcaaaacccccagtcgatatatcagataggatgattggtgataccaaaggaagcaaactcaaacacacaaagtttcagaagcacagctactgcttgctccctcaggcgaccttgacctcgatggtcttgggcttcttgggctccggcgggggcagcttctcgacggtcaccgtgagcacgccgtccctgcacacggtgtcgcatcgggcggctcgacgaggcggacaaagccggtggcagaccatgggtgcaatgggtgcagagacttaggtggatggttctaaatgttcacgacaaaaaaatgtgtggcgcatgggtttctgtcctgagggtgcgcagatcggtcgccattagaaagatgcagcttcaactactttggaccaggtgcaaagtcatggcagttctgatagggcaccctacacaaatctggagtttgaacacacgacaggtgatatgcttatcttttgtggatggactgttcgcttggcttttgctgattgaattggagctgcacttgtagtttggtaacgtttatatacataactatgcggattgcgttagctagaatatgtcttccagtacctgggtgacaatgggctctaaattttagagtgttgtagatttgttttgttgcaaatgtggcatggcatggcttggcttgcagcttcgagtactggtcgttcgagatccttgtgctgtttgcagggctgatgcccgactctcatctcagcacttccatcattgcaatgtgccaaaacaccgaagccatatcatacatgatcacctatggcttcgccgctgtcatcagcacaagggtgtccaacgagctgggagcccggaacatcgccaacgccaggaaggcgctcactgtgtcgctggcgctgtccctgatgctgggggtggcgttcctgctgctcctgggcctcggccacgacctctgggggtactctgcggcgtcgccaggggctacgggtggcagcacctggcggcgtggaccaacctggtggccttctatgtcatcggcttgccgctcgccatcctcttaggattcacgctcgccttccaaaccaagaactgcgtcctcttttttatcaccctgcgaaccaactggcaggagttagacctgaccatattcaacaaggacaacgattttgtctgctaggaatctagaaagagtttttcttttcttttttgccatgtgctgttgctgaaacattgaaccatcagcatcaggcttcgacagagctgtctgatgtttgttcatcaattcatcaccagtgtaacactacagattgtaacatttggaatctcaaggataggaattaaaaatgttctgatacaccaatata

SEQ ID NO: 2308 - DNA, 2184 bp, Zea Mays
gagtatttttgcctggataggtctttgcgtgtgttccatttggatgaccctgatactcttcctgaacctgcttccagagagttctttactgaagctagatgatatttgcaggaaagcagacatcgttttggttgctgcacgttcatatggtctaactggtttggtcagggttagcgtcaagcttaacatcctcatgaatctcttgcaaaatgttgcggatactcggaggtaccccatcaaacacgcaagcattcctttgtttccacaaccgccaagacaccaagataagtagggaattaaacgaaaatgttgcgtcaaggagcactgtgttatagaatcaaaaccagatcacttcttggatgatttgcgacttcacaatccatggactgaactaaagcaatttgcaaaatcaattgatataaatgataaagatcctgttgtccacaaacatactccatacattgttgtccttgtgagacttgctgaaaaatgggcagatgcccatgatggtaacatgccttcaactaggcaagaaaagaaggaatttaaggacctaattcgagcccacatgcttaatgtagatgaagaaaattacaaagaagctgtggactcatcatataaagtctcagtcactccaggaatcagtaatgagatccatcagataattgatgatgactctgcggaagtcaattcatcatcagaagatttctggattttagtagctgctttaaaggagtttatttccaaggagggtaatggtgagctacctctggagggaacaatacctgatatgacttcccttactgagtattatgtaagcttacaaaagatttaccaagctaaggcagaatttgactgtcttgccctggagcatcatgtaaaggaaatcttgaaacagattggtagagatccggattctatttcaagagcatatatcaaaacattttgtaaaaattctaggaaactaaggatttgtagatatcgtagtttcaaggaggaatttagctccccgattgtctctgagattcagaggtatttcagcgatgaagactgcagttacgcaatgaacttctacattctactacgggctgtcgatcgattggctgccaattatagccgattacctggaatcttcgacaggctgaagacagttgcggcttcagtgctaagcgagatgggtttgaacggagcatccttatcccaagacctggtaaccgagatgtgccggttcgggggtgcggagattcatccagtggctgctttcatcggtggagtcgcttcacaagaagtgattaagctggtcaccaagcagtttgtgcctttggggggaacattcatttttaatggaatcgatctcaaatctcaagttttggtgctataacatggatgtggagcgttggatttgagctggtccagattttgtgccagggcaccgcgctgcccaacgagtacccaagtctcgcagaaaatatcaatacttgcttcgtatgattttttgccaaatgactagcaaattcctagctcacgcggctgttatgcgtaaaaccagaagagctgctgcttttagactacgcctgttatatattagtaggcgaagtaatatgtcagtggggctgatgtgataagatggatggtgttaaagactagcgtgtgcgcgatttgacgaagacgactacgagacgggatgagcaatgagcatgtcggccgagctatggacgcttccatcatatcatggaccgacatcaatgtgcatatgatctcaggtgtccatcgacagaccgaatcttccgtggccagtattccttcggcgacgcggttgccgttagacgaaggaaactgtcgtgtgacagcgaaatgtggttgctacatgctggtagcgcacatagcacactttgggcgtgtttggttcggcttttttctaaatagcttttctgaaaagctggctgtggagaaaagctggctgttgggaaaaactggtggttagaatttaggtgtttggttcgccagctgtgcaaaaaagttgttcgttagaatataggtgtttggatacacagattctcagactgcagattctgtttgaaaaaactatacacattaacaccgaaccaacaaaaggtcattacatataattagtagagttcattacaacataactaccgttacatttacatatttaactatgac

SEQ ID NO: 2309 - DNA, 2677 bp, Zea Mays
aagccgtaaccattacgctaaagacccttttgcgtttgttaggatatggggtgatcaaggccaaactgcactggagaaggccagcatatgcttgcttaactgtggtcctaccggaacagaagcattgaagaatctcgtgcttggaggaataggaagtgtgactgctgttgatggctccaaagttgaagcatctgatctggggaacaattttatgtgtaatttctttgctatgtgattccacctgttcttctgaattcatccccagaaattgatggaactcatattctggtaccttatatttgcattcagtggatgaaggatgtttggggcaaccaagagctaaatctatatgttcattcctacaagagcttaatgacgctgttaaagccaagtttgttgaggagtttccaacgcatttgatagacactaatccttcattcttttcccagtttactgttgtcattgctactcagatatatggtgttttgacagtaatatgacattggactaagccactgaatgcatacacaatagctaatgcatagctgccctcttggcattggtgatggcaaaaccttgcactaagggctcgttggatgagaccctggagtatttttgcctggataggtctttgcgtgtgttccatttggatgaccctgatactcttcctgaacctgcttccagagagttctttactgaagctagatgatatttgcaggaaagcagacatcgttttggttgctgcacgttcatatggtctaactggtttggtcagggttagcgtcaaggagcactgtgttatagaatcaaaaccagatcacttcttggatgatttgcgacttcacaatccatggactgaactaaagcaatttgcaaaatcaattgatataaatgataaagatcctgttgtccacaaacatactccatacattgttgtccttgtgagacttgctgaaaaatgggcagatgcccatgatggtaacatgccttcaactaggcaagaaaagaaggaatttaaggacctaattcgagcccacatgcttaatgtagatgaagaaaattacaaagaagctgtggactcatcatataaagtctcagtcactccaggaatcagtaatgagatccatcagataattgatgatgactctgcggaagtcaattcatcatcagaagatttctggattttagtagctgctttaaaggagtttatttccaaggagggtaatggtgagctacctctggagggaacaatacctgatatgacttcccttactgagtattatgtaagcttacaaaagatttaccaagctaaggcagaatttgactgtcttgccctggagcatcatgtaaaggaaatcttgaaacagattggtagagatccggattctatttcaagagcatatatcaaaacattttgtaaaaattctaggaaactaaggatttgtagatatcgtagtttcaaggaggaatttagctccccgattgtctctgagattcagaggtatttcagcgatgaagactgcagttacgcaatgaacttctacattctactacgggctgtcgatcgattggctgccaattatagccgattacctggaatcttcgacagtgagattgacgaggatatccctaggctgaagacagttgcggcttcagtgctaagcgagatgggtttgaacggagcatccttatcccaagacctggtaaccgagatgtgccggttcgggggtgcggagattcatccagtggctgctttcatcggtggagtcgcttcacaagaagtgattaagctggtcaccaagcagtttgtgcctttggggggaacattcatttttaatggaatcgatctcaaatctcaagttttggtgctataacatggatgtggagcgttggatttgagctggtccagattttgtgccagggcaccgcgctgcccaacgagtacccaagtctcgcagaaaatatcaatacttgcttcgtatgattttttgccaaatgactagcaaattcctagctcacgcggctgttatgcgtaaaaccagaagagctgctgcttttagactacgcctgttatatattagtaggcgaagtaatatgtcagtggggctgatgtgataagatggatggtgttaaagactagcgtgtgcgcgatttgacgaagacgactacgagacgggatgagcaatgagcatgtcggccgagctatggacgcttccatcatatcatggaccgacatcaatgtgcatatgatctcaggtgtccatcgacagaccgaatcttccgtggccagtattccttcggcgacgcggttgccgttagacgaaggaaactgtcgtgtgacagcgaaatgtggttgctacatgctggtagcgcacatagcacactttgggcgtgtttggttcggcttttttctaaatagcttttctgaaaagctggctgtggagaaaagctggctgttgggaaaaactggtggttagaatttaggtgtttggttcgccagctgtgcaaaaaagttgttcgttagaatataggtgtttggatacacagattctcagactgcagattctgtttgaaaaaactatacacattaacaccgaaccaacaaaaggtcattacatataattagtagagttcattacaacataactaccgttacatttacatatttaactatgac

SEQ ID NO: 2310 - DNA, 2850 bp, Zea Mays
acaagacgtaacccgggagcgggaggagattttttttaaccaagccagaaaatcgcccccgagggagatcgaacccaggacctgtaggtgctactcggaagccgtaaccattacgctaaagacccttttgcgtttgttaggatatggggtgatcaaggccaaactgcactggagaaggccagcatatgcttgcttaactgtggtcctaccggaacagaagcattgaagaatctcgtgcttggaggaataggaagtgtgactgctgttgatggctccaaagttgaagcatctgatctggggaacaattttatgttggatgaaggatgtttggggcaaccaagagctaaatctatatgttcattcctacaagagcttaatgacgctgttaaagccaagtttgttgaggagtttccaacgcatttgatagacactaatccttcattcttttcccagtttactgttgtcattgctactcagcttccagagagttctttactgaagctagatgatatttgcaggaaagcagacatcgttttggttgctgcacgttcatatggtctaactggtttggtcagggttagcgtcaaggtacttttttctctcgaacacgcaggagaactgcgcgtcattatattaagaggaaaaaaggtcccaagtggaccaagaaaacaaagtgcccgagaaggcagcagacgagaagagggggacaaaaagaaaaaagagaagaacaaaaataaaagaaactagaaacaagagggaaaaagggggaggggggacaacccccaccaccccatctaaattaatgccacaactgtctaatatcttttgctcctgccattccccaaagcttaacatcctcatgaatctcttgcaaaatgttgcggatactcggaggtaccccatcaaacacgcaagcattcctttgtttccacaaccgccaagacaccaagataagtagggaattaaacgaaaatgttgcgtcaaggagcactgtgttatagaatcaaaaccagatcacttcttggatgatttgcgacttcacaatccatggactgaactaaagcaatttgcaaaatcaattgatataaatgataaagatcctgttgtccacaaacatactccatacattgttgtccttgtgagacttgctgaaaaatgggcagatgcccatgatggtaacatgccttcaactaggcaagaaaagaaggaatttaaggacctaattcgagcccacatgcttaatgtagatgaagaaaattacaaagaagctgtggactcatcatataaagtctcagtcactccaggaatcagtaatgagatccatcagataattgatgatgactctgcggaagtcaattcatcatcagaagatttctggattttagtagctgctttaaaggagtttatttccaaggagggtaatggtgagctacctctggagggaacaatacctgatatgacttcccttactgagtattatgtaagcttacaaaagatttaccaagctaaggcagaatttgactgtcttgccctggagcatcatgtaaaggaaatcttgaaacagattggtagagatccggattctatttcaagagcatatatcaaaacattttgtaaaaattctaggaaactaaggatttgtagatatcgtagtttcaaggaggaatttagctccccgattgtctctgagattcagaggtatttcagcgatgaagactgcagttacgcaatgaacttctacattctactacgggctgtcgatcgattggctgccaattatagccgattacctggaatcttcgacaggctgaagacagttgcggcttcagtgctaagcgagatgggtttgaacggagcatccttatcccaagacctggtaaccgagatgtgccggttcgggggtgcggagattcatccagtggctgctttcatcggtggagtcgcttcacaagaagtgattaagctggtcaccaagcagtttgtgcctttggggggaacattcatttttaatggaatcgatctcaaatctcaagttttggtgctataacatggatgtggagcgttggatttgagctggtccagattttgtgccagggcaccgcgctgcccaacgagtacccaagtctcgcagaaaatatcaatacttgcttcgtatgattttttgccaaatgactagcaaattcctagctcacgcggctgttatgcgtaaaaccagaagagctgctgcttttagactacgcctgttatatattagtaggcgaagtaatatgtcagtggggctgatgtgataagatggatggtgttaaagactagcgtgtgcgcgatttgacgaagacgactacgagacgggatgagcaatgagcatgtcggccgagctatggacgcttccatcatatcatggaccgacatcaatgtgcatatgatctcaggtgtccatcgacagaccgaatcttccgtggccagtattccttcggcgacgcggttgccgttagacgaaggaaactgtcgtgtgacagcgaaatgtggttgctacatgctggtagcgcacatagcacactttgggcgtgtttggttcggcttttttctaaatagcttttctgaaaagctggctgtggagaaaagctggctgttgggaaaaactggtggttagaatttaggtgtttggttcgccagctgtgcaaaaaagttgttcgttagaatataggtgtttggatacacagattctcagactgcagattctgtttgaaaaaactatacacattaacaccgaaccaacaaaaggtcattacatataattagtagagttcattacaacataactaccgttacatttacatatttaactatgac

SEQ ID NO: 2311 - DNA, 1924 bp, Zea Mays
cggaaagctattatccacaaaccctcgtcggctcggcctcgttcctcgcgcgtactgccgcttgccggctaccagaaaaatggccgcggcggcggcggcggctaggcgtgccgctggccttctccctctcctcctatcctcgcggtccggtgctcgcatacccctccaccgggctgtatcccagatccctccgccttgctcctatcgcctactctcgcagcaagccaagcccttctccgcctctgcctctgcctctgcctcagcctccgcgtcgaatggcgcgaccgcggaaagaacccgtgagctgcatctgtacaacacgaagtcgcggaagaaggagcagtttcggccgcgcgatccaggcggggaggtcggcatgtacgtctgcggcatcactccctacgacgacagtcacatcggccatgcccgcgcatacgtagcctttgacgtcgtctacaggtacttgcgctatttggactatgaagttcgctatgttcggaacttcaccgacattgatgacaagataatcgcaagagcaaatcagctgggggaagatccttttaacttaagtaaaaggttctctgatgacttcttgttagacatggccaatcttcaatgtttaccaccatctgtggagccccgtgtttcagatcatattgatgagattataaatatgattaaacaggccgcaaaagatggggagccatggtgggatagcccatggggcccaggaaggccaggatggcacatagaatgcagtgccatgagtgcacattatttgggtcattcttttgacatacatggtggtggggaggatctcatctttccacaccatgagaatgagattgctcagagccgtgcggcatgttgtgacagtaccataaattactggatacacaatggttttgtcaatgtaaatagccaaaaaatgtctaaatcgcttggtaattttgtcaccatacgaaaggttatagagatgtaccatccgctggctttgagaatgttcttacttggcacacactacaggtccccaattaactacacaatagaacaactcaatgtcacatcagacagattgtactacacatatcagaccttgcttgattgtgaagagatttgtcagcagcaacaaagcaacactggaaattcattgcctgctaataccttaaattacatccaaaaacttcatgaggaatttgagacctcaatgtcagatgatcttcacacttcagtggcattggctgctatttctgagccattgaaagttatgaatgatctgttgcacactcgtaagggaaagaagcaggacaaaaggctggaatctctttctgccttagaagagaaaataagagtagttctctctgttctaggattgctaccttcaagttatcatgaggctttgcaacagctgcgggataaggcactgagacgagcttccatcaccgaggagcttgtggtgcagaagattgaagagaggactgcagcaaggaaggcaaagcagtatgaaaaatccgacgagatccggaaagaactggctgccataggaattgccctcatggatggccccgacggaaccacttggagaccatctttgccaattttagaggaagcggtggttgcgaaaacatgatctgtgcaagggattccaatacgacccatggacaccagttctagtcggtaatcatggatttgctatatgtgacgaacttgttcgtttgactttcattcataccggcttgtaatgcttctataatgttttttcataattctctgctcccattagatctatagtagttactagctgaatgcacgtgtgttgtaatgaaaatatataatatgagtatactatgataacttatatacaaaatgtatgttataccgttatgagaaaatgtttcataatcaatttatgattcgggccata

SEQ ID NO: 2312 - DNA, 2621 bp, Zea Mays
aaacaaaacgctagacacaagaatccaaccggcaccatctgagcaagtaccagcgcgcccgtgacgagccctgcccctgcgcacggcgccgcgccgtccgagcctctcggtcggtcctcgacctcgagctcgaggagggaaggaaaccccgtcgtcttcgcgccatcgcgtgtgcggacccgccgccccgcgccaaagggaggtcacgcgaccgcctgcgcgccttgtctccttgcccccggtttatttgtccccgaacgctcacaacttcgcgctcgtctgcgtttgccatttctgtgcaaggtagcttgcacccatcgtgaagccgagggagcggcgacacattggtacctgctgtgctgcagtgctctcgtcctggtcggagatggacgctgaggccggcgaggcgggggtgcagcagccggccggggcggcgtccacgagcaccgcggcggtgccgttcgacaggtcgtcgtcgcggctaggcgcgccgggtgccgagagcttcgacggcgcgctcagggagctcaaggatctgcggtctcagctgcacgaagcggcggactgctgcgccaaggcgttcctcagcaccgacaagaagaagatctctactctcatgcatgcgaaggattctggagggtacaaagggttacatatgcgatgcggtggtagctgtgatcgatcacctggggacagtttcgtccaagcttgagcacaagctgcaggagaggactgaagtcgcacagacggaacgaaagatcaacttcttgaaacagaggcttttgacatgcgagcagtacgccgtttctctgaagcttttgtctgtacgaggggaccctgacgccattcgatatcatcgccgttacatctcacaatctactcaaatgtccaaactgggaaacggaatcggctcgagtgaaaatggtccacgacttccgcaaattactggctcaacagtatctggagctaccctcactctcaagccatatgatgttcaaccagccatcggaaaagaacataccgtggtatcagaaaacgttgaggacaacccaaggaccataagaaggtcattctcttttagagcagaggatgttcacgttgttctaggcgatcacaaaaagaagggcaaccatgggagtaacatcttgtcatttctcaagaaaaccaggcgataagcataagaactttgctaaagaaataaacataagaatcaatgcaccaacgggatagagtggaactgtagaggagtaccttttcccccctttggatagtcttttctttcgtggtactattggtcctaccggtcatgcagcgctttcactgtttcgcaataagtactgatatactgaaagcatttcttcaatgatatgtctaggttatcttcaacaacttatcaattctcatactcatatttaaactctactctatcaatattgcaacctacaatataaaacaatgttttgggtgactatattagtgaaccgctggacacggtcgatctaagtcctagggtcccttatgtcctagagtgctataaagaatagctattcaggacagttgagcaacattttaaggtattaggaccataccattttatttgtcaatcgataaggagaaagaggacacatgatacatacacactgcaatctggacctctctaactatgcgcacgctggctcccactcgtgtccaggtttagcatgaccatcaacttgtgtcatgctccctcttaactctctttctagtactctatgtatcctgatgttgttacactacaataacattcatcaatgtaaaagaagttttgatcttttattggtgtgccacacaatttaagaccatagttccaaggaagacatctcatacaatcatacagaacgtgattgttgaaaccacatatgtcacatatcattctatggtagtctcttgtatgatttctcaaaccacaaataagaatcaagtaaaaagtcttacttgcttgaataaatgacttgaccaaataagaatctggagctactgttaatgatatatatcaggggtaccaagatcaacctttatgaagaaggacatgtacggatgagcctatgggcttggccgagagcccaaagactcgatgatcaagactagaaggaggcctgaagtgacaaggatttcagaagcgtatatatggaaaagatcttatcaaaatagaagatatgccaaatgttctaacacttgtaacgatatagttcgattcacatacaaatttgggaccaactcggtcacatgttcaactaggtaccgagtctgtgtctatcctataactgatgtcgctccttagactataaaggagggtcaatgagtgattacgggcctgtttggttcactacctcagttgccacactttgcctaacttttctgtctaaggttagttattcaattcgaacgactaaccttaggcaaagtgtggcatatttagccacaaaccaaacaggcccatatatattctttgtaatctcacatgtctgtatatatgtgaggtcgaagtcttttagctctaatttttctctgtttatcgatggctttgatacaatagtcaaagccttggaatcgtacatgagaagaggaagtctacaaaattt

SEQ ID NO: 2313 - DNA, 3534 bp, Zea Mays
aacatgtcttttggaatatgtacctcaatgaggttgaccgaagcccataatgcagctactgcggcaaagcctataccagctagggcgaaaatgtcttccgcggtgctgaactgtattcgttttttttaaaagaaaaaaaaatcaatatgagtttggttagtcttcattcatactacataatataagtgcctcatggtcatggaagtactaatgtcaccaaagaaagcatcagcctaaagctgcagggttgatgtcccaatataatcttgagaaggccagcacagtttacactgaagccaatgaggcaagtcgcggcaaattccagcttactagtataatatactgataggcaagaaatatttggcctttttgaagaagtttcaaatttcaggcctttttgagcaagaaactcacagagctcgtgacgtatttcactatgctcccggtcccggacgattccgacccgtcctgcgcagccttggcaacgacagcgcggctccttattagcttgcctgcaccacgcgcgcagcacggtgtggccaaggcaagtttacctgaaagcctgggaggtggcagccgcggggggcggccgccggagagggtcctcttgccggatggcggcgcgagagatgctgctggctgggcgacggcgagggcacacgccatcatcatggctgctgctgctgcaggccaccggcgagagccgctgcagaacgagacggaattgagaggcacgcacgaggcggcgcgcggtgggtgatgcgtgtgggggtgggtggaaccacgcgacgaagactagagctgcttgcttggcctcctccggcgcgtcttgctgcggcgggcgcagcagatggattcggtcggtgatggagatggagagccagccagtaaacaaacagcagattccttaatcaggatggacacgaaaccaaacaaaacaaaacgctagacacaagaatccaaccggcaccatctgagcaagtaccagcgcgcccgtgacgagccctgcccctgcgcacggcgccgcgccgtccgagcctctcggtcggtcctcgacctcgagctcgaggagggaaggaaaccccgtcgtcttcgcgccatcgcgtgtgcggacccgccgccccgcgccaaagggaggtcacgcgaccgcctgcgcgccttgtctccttgcccccggtttatttgtccccgaacgctcacaacttcgcgctcgtctgcgtttgccatttctgtgcaaggtagcttgcacccatcgtgaagccgagggagcggcgacacattggtacctgctgtgctgcagtgctctcgtcctggtcggagatggacgctgaggccggcgaggcgggggtgcagcagccggccggggcggcgtccacgagcaccgcggcggtgccgttcgacaggtcgtcgtcgcggctaggcgcgccgggtgccgagagcttcgacggcgcgctcagggagctcaaggatctgcggtctcagctgcacgaagcggcggactgctgcgccaaggcgttcctcagcaccgacaagaagaagatgattctggagggtacaaagggttacatatgcgatgcggtggtagctgtgatcgatcacctggggacagtttcgtccaagcttgagcacaagctgcaggagaggactgaagtcgcacagacggaacgaaagatcaacttcttgaaacagaggcttttgacatgcgagcagtacgccgtttctctgaagcttttgtctgtacgaggggaccctgacgccattcgatatcatcgccgttacatctcacaatctactcaaatgtccaaactgggaaacggaatcggctcgagtgaaaatggtccacgacttccgcaaattactggctcaacagtatctggagctaccctcactctcaagccatatgatgttcaaccagccatcggaaaagaacataccgtggtatcagaaaacgttgaggacaacccaaggaccataagaaggtcattctcttttagagcagaggatgttcacgttgttctaggcgatcacaaaaagaagggcaaccatgggagtaacatcttgtcatttctcaagaaaaccaggcgataagcataagaactttgctaaagaaataaacataagaatcaatgcaccaacgggatagagtggaactgtagaggagtaccttttcccccctttggatagtcttttctttcgtggtactattggtcctaccggtcatgcagcgctttcactgtttcgcaataagtactgatatactgaaagcatttcttcaatgatatgtctaggttatcttcaacaacttatcaattctcatactcatatttaaactctactctatcaatattgcaacctacaatataaaacaatgttttgggtgactatattagtgaaccgctggacacggtcgatctaagtcctagggtcccttatgtcctagagtgctataaagaatagctattcaggacagttgagcaacattttaaggtattaggaccataccattttatttgtcaatcgataaggagaaagaggacacatgatacatacacactgcaatctggacctctctaactatgcgcacgctggctcccactcgtgtccaggtttagcatgaccatcaacttgtgtcatgctccctcttaactctctttctagtactctatgtatcctgatgttgttacactacaataacattcatcaatgtaaaagaagttttgatcttttattggtgtgccacacaatttaagaccatagttccaaggaagacatctcatacaatcatacagaacgtgattgttgaaaccacatatgtcacatatcattctatggtagtctcttgtatgatttctcaaaccacaaataagaatcaagtaaaaagtcttacttgcttgaataaatgacttgaccaaataagaatctggagctactgttaatgatatatatcaggggtaccaagatcaacctttatgaagaaggacatgtacggatgagcctatgggcttggccgagagcccaaagactcgatgatcaagactagaaggaggcctgaagtgacaaggatttcagaagcgtatatatggaaaagatcttatcaaaatagaagatatgccaaatgttctaacacttgtaacgatatagttcgattcacatacaaatttgggaccaactcggtcacatgttcaactaggtaccgagtctgtgtctatcctataactgatgtcgctccttagactataaaggagggtcaatgagtgattacgggcctgtttggttcactacctcagttgccacactttgcctaacttttctgtctaaggttagttattcaattcgaacgactaaccttaggcaaagtgtggcatatttagccacaaaccaaacaggcccatatatattctttgtaatctcacatgtctgtatatatgtgaggtcgaagtcttttagctctaatttttctctgtttatcgatggctttgatacaatagtcaaagccttggaatcgtacatgagaagaggaagtctacaaaattt

SEQ ID NO: 2314 - DNA, 2433 bp, Zea Mays
ttctatactgctgtcttcctcatccatttctgcttcctctgctgtaactactactagttcttagttgaatcaatacctattgtgagtaggtcgctgactggtagccgcctcgggcgtggcgggatggaccgtggaggacgacgtcctcctcgccatcgagcgccaggctaccaatgatgctggtaggattgaagggcttgtggttatgaggattatcaatgagcccactgctgcggccttgtcatatggaatgaacagcaaggagggccttgtcggtgaagtgtgttcgtgccggagagcgtggagtgcgaggcctcatgacgcgaagcaagttcggtctgctcgtgcatgtcacccgtcgcgtgcgcgtgtgccggagagcgaggaggagtgcaaggcctcacgacgcgctgccaggtccgtgctgctcgtgcgcgtcacccattgctgaatggactacttagagatagctacactatcgatgcatctacatcattttggactatatgggacaccatcagtaatgaaattcagtttctgactgaactaaacggtggtggtttgaatcatcgtggttcactggttttcacaatattgggattcttggcaaccatgaggacattatgagattcttggctaccatgaggacaaattgttcaattacattttctacgtctatttcgaagcgtcgatggcggatgtccgcacacaaaatgccttgaagggtctggaggaagttgcaagtttcctgcgtgtccttggctactatccgtgcaacacaataacgatatgagctgttgcgtcacactgtctatcttggttgctccgccttggaagaccagattgaataaaaggttcctcttcccttgtttggaagagattatggtcattatacactcccgactgaatatgaacactcttgaaatacattgcgaagctgcagaggatcgtcattagaattgcatgaaggttgtatgcgaaaccactggattgaacaattcgagaaatctacagaggaagtcgtgaacagctatgcacaagattgagtctaaggtataggcatctgatggaggacatgttgtctctactcccgcatatgaaggacaaccaggacaaggtcgagtccaagcagagcaaggggaacacgccgagcaagctgcttgagctcaggagttgctccagctgcctttcttcgagattctggctgttgaccatgcgtcggatgagggcgcgattgtaccaattggttcgcagcatgatgcacatttgaccaaactgatgaatatggaaaatgaccaacctttgttgccggcaccaccagttaatctggaatcagccatccttgagcaaaatgcaaatatggtggctctcaaggaaggctgttctgtgggaagtgagctgccacctggtctgcagggtaattttggtggtaacaaagcaaacacgtgtacttcagcactgcattctattgatgaaggtgaagaaataacttgtggtttcattaaacatgagaggagttatgatttacagaatttgactatggataagtcaattcaagtgtctaatgaaacaaagtacaagtttcttgctcataagcccagagtaggctgtgaaactgctattcaaaactgtgagttggcttctgcattgccagatacagaatttcatggccctgttgcaaccatttcaactacgggtcaatcagaaggatctgacactgagattaatgttccaaactattctgacctagaagcactgatacttgatctggacctgattccatgggatcaagaatctgacttcatccaaccagaagtttcaaggtttcagtatcctgaaagcaggaaggatttgataagattagagaaaggtgtctgctcttatatgaaccgatctatcatgtctaagggtgctttcgcaattctttatggccaacgcacgaaatactacataagagagcccgaggtaagtcttgggagagaaacagaagaagtacatgttgatatcgatttgagtaaagaaggaaaggcaaacaaaatatcccgtcgacaggcagttattaagatggacgatggtggatctttctacataaacaatactgggaagttttcaattttcgtgaatagcaaagaagtaccctgcagtaaacgtataaacttaatgtcagactcattaattgagataaggaacctgaaattcatttttcacgtgaaccacgaggctgcaaggcaatacatagttcgaaaaaggagaggaagctcccaaggcgggatcacggcgtttgattggagtcagaacccatgagtagttaacgttatgatcaaggttgtttataatctgcgatagctacctctctcttcaagaaagtattggataagcgtaaagttatttataatttccgatagctaatatttctctcttccagttagcact

SEQ ID NO: 2315 - DNA, 2662 bp, Zea Mays
ttctatactgctgtcttcctcatccatttctgcttcctctgctgtaactactactagttcttagttgaatcaatacctattgtgagtaggtcgctgactggtagccgcctcgggcgtggcgggatggaccgtggaggacgacgtcctcctcgccatcgagcgccaggctaccaatgatgctggtaggattgaagggcttgtggttatgaggattatcaatgagcccactgctgcggccttgtcatatggaatgaacagcaaggagggccttgtcggtgaagtgtgttcgtgccggagagcgtggagtgcgaggcctcatgacgcgaagcaagttcggtctgctcgtgcatgtcacccgtcgcgtgcgcgtgtgccggagagcgaggaggagtgcaaggcctcacgacgcgctgccaggtccgtgctgctcgtgcgcgtcacccattgctgatgatataccacaaatgttttcgacctaacaaagagggcatagaaagtagaagttggttgctcctttaaagcatcagtttcaagtagccatcagctgaaatctaccattgctgaaacaaggtgaaaaaaatgcagaatggactacttagagatagctacactatcgatgcatctacatcattttggactatatgggacaccatcagtaatggttgatcttgtctactgtgctttggagttcctttcaactttgcttggagcctttcatgccactgatggagtcatatgcctctgcccagaaattcagtttctgactgaactaaacggtggtggtttgaatcatcgtggttcactggttttcacaatattgggattcttggcaaccatgaggacattatgagattcttggctaccatgaggacaaattgttcaattacattttctacgtctatttcgaagcgtcgatggcggatgtccgcacacaaaatgccttgaagggtctggaggaagttgcaagtttcctgcgtgtccttggctactatccgtgcaacacaataacgatatgagctgttgcgtcacactgtctatcttggttgctccgccttggaagaccagagtgggagatgttgaataaaaggttcctcttcccttgtttggaagagattatggtcattatacactcccgactgaatatgaacactcttgaaatacattgcgaagctgcagaggatcgtcattagaattgcatgaaggtataggcatctgatggaggacatgttgtctctactcccgcatatgaaggacaaccaggacaaggtcgagtccaagcagagcaaggggaacacgccgagcaagctgcttgagctcaggagttgctccagctgcctttcttcgagattctggctgttgaccatgcgtcggatgagggcgcgattgtaccaattggttcgcagcatgatgcacatttgaccaaactgatgaatatggaaaatgaccaacctttgttgccggcaccaccagttaatctggaatcagccatccttgagcaaaatgcaaatatggtggctctcaaggaaggctgttctgtgggaagtgagctgccacctggtctgcagggtaattttggtggtaacaaagcaaacacgtgtacttcagcactgcattctattgatgaaggtgaagaaataacttgtggtttcattaaacatgagaggagttatgatttacagaatttgactatggataagtcaattcaagtgtctaatgaaacaaagtacaagtttcttgctcataagcccagagtaggctgtgaaactgctattcaaaactgtgagttggcttctgcattgccagatacagaatttcatggccctgttgcaaccatttcaactacgggtcaatcagaaggatctgacactgagattaatgttccaaactattctgacctagaagcactggtacatatagttattttcttcattgagtgtacatagctttacattccttggtgattctgactttctcaaaaaaaaaaaaaaatccagatacttgatctggacctgattccatgggatcaagaatctgacttcatccaaccagaaggtttcagtatcctgaaagcaggaaggatttgataagattagagaaaggtgtctgctcttatatgaaccgatctatcatgtctaagggtgctttcgcaattctttatggccaacgcacgaaatactacataagagagcccgaggtaagtcttgggagagaaacagaagaagtacatgttgatatcgatttgagtaaagaaggaaaggcaaacaaaatatcccgtcgacaggcagttattaagatggacgatggtggatctttctacataaacaatactgggaagttttcaattttcgtgaatagcaaagaagtaccctgcagtaaacgtataaacttaatgtcagactcattaattgagataaggaacctgaaattcatttttcacgtgaaccacgaggctgcaaggcaatacatagttcgaaaaaggagaggaagctcccaaggcgggatcacggcgtttgattggagtcagaacccatgagtagttaacgttatgatcaaggttgtttataatctgcgatagctacctctctcttcaagaaagtattggataagcgtaaagttatttataatttccgatagctaatatttctctcttccagttagcact

SEQ ID NO: 2316 - DNA, 4377 bp, Zea Mays
ctcgaactttccaccgttcacattaatagcttttcctcttctttccccatccaccctcgcaccctcaccgaaaggagaaggcttcagccttcaagcgcacacagccacgcaaatcccctcttcatcaacctcgactcgagtccgcgcgcgtccccgaatcgagaggagatgagtcgtccgcatgacggtcacaggtccttctttcccatggggaatcccttcaggatgattctcccaagaggagcccgcctgtcaccgaagctcactgagctgctcacttcgtatgaggatggcctggcctcgagcttgaggaaggtcaagccagaggccacctcagaggtgttcacactatcatggatgaagctcgcagtggagtgcttatcagagctgcacaccaatatagccaccctgattactgagcttgagttgcccttatcagactgggatgagaagtgggtggacatttacctgaacagcagtgtgaagctgctggacatctgcattgccctgagctcggagctctctcggttggatcaagggcagctgcttgtgcgatatctcctgaatgtgttggactctgggagcgacatgccatcccaggagcagatcaggagagctgaggtgtcgcttaaggaatggatagagcgagcaagtgaaaggtctccgaggcttgatagttgcttggcagcgctacaggagctttctggaaacctttgcctgatgaaggttaggcattctgctaaagggaaagtgctcatgcgagcattgtatggaatcgaggctgttaccgtcttaatctgcagtgtacttgtagctgtactgtcgggtaccttcaagccactggttgactttgatgtccctgagaaatttggttggtctacggccttcattgatcttcagaaggccataagcggtgaacttagcaggcaactgtccagaggtagtgttgcagcgttaaaagagctggaggatgttgatgtatgtgctagacagctgcatacattgacttgcactgctcagcttgaagaggagaatgccagcctggctcattcatttagccgttcaaaggaagtggtcctgacagatactacagcccagggaagaggccatgtggataatctcaagttggctgatgatagtagctgtcagcatgaagtgatcatgctgcaaagtattactacagaaggaggaattggtacagctgatatcaaggaggataccgagaccattggccatacaagggaagtgatggcgcctgagaaaataattgacagaggacaccaagatgataacacaaagcaggacactggtgttgtcactgatatcagttgcttggaaaggagagaggaactgctgaactgcatctcccagatgtcgaaaagcgctgaaaggctccagttggggttggactcgctgtcgaagcgggtggataacttcttccatattgtgcttacagggcgtgatgcactactttgtaatctcaggttttcaaacggcggcaaggttgctgcagaggtcaggtcttaatatgccatctcatgtttgtgccatgtaatgcgtgtatagacagctcagcggcccatcgtgatgtgtggtgcttctgacttctggcccctgctcagctccaccaacactaagccggggccagatctcagaagcattgtgcatgatatgtgcctctagctgtgctgtgcaaacgcttatatagcttccctttttggttaagtatgaactagtgttctgttgagtaaatagtgctgttaagttggtgtcgggtggaatgtacaccatctagagttgagcaactgtatgtatgctcatgtgtcctggtaacggaggtgaaaatgagttgcaaatgttgatccctgtttgtctgttggataacctaaactggtaatgtacaaatttcaatgtatttgtacatcatgttggcatcataagttcgacctagagtgctgttggtataagtaggaactacataccctttttgtgagtagggactggaatgttcgcgagttggtgtcggtggaatgtataacctctagactctagagtagagtaactgtatgtatgctcgtgtgtgctggtaatggagatgaaaatgagttgcagacagcaaaatgttggtccttgtctctctgttggataacttaaactgatttcaatcatgccggtgtcatctcctctacccgttcaagaaaaagatgccaaaagaatctatttccatcagccatgacgtcgataggtactgagagagagtgaggtttccttgctctccagctcggtatagaccacaggtgaccgacgacgacgaggcaaagcagagcaagaagatttggccatggctgctacgcaactcctactcctcgccgccctcctcctcctgcctctcgccgccatcctgctcgggaagcggcacgggccccgcaagggcaagaacggcgcccggctcccgccgggcccaccgggtctgccgttcctcggcaacctgctgttgctgaggcgctactcgtccgacgtggaggcgctgctccggcgcctcgtcgcgcgttacggccccgtcgtgtccctgcgggcagggccgagcctgtcggtcttcatcgctgaccgccgcgtcgcgcacgcggccctggtcgagagcggggccgcgctcgccgaccgccccgcggtcacgcgcgcgctcctgggggagagcggcaacaccatctcgcggtccagctacgggcccgtgtggcgcctcctgcgccgcaacctcgtctccgagacgctgcacccgtcgcgggtgaagctgttcgcgccggcgcgcgcgtgggtgcgccgcgtgctcgctgagaagctcgggcgggaggccgaggaggcgcaggcgagggcccaggcgccgccccccgcgatggaggcgttccggtacgccatgttctgcctcctcgtgctcatgtgcttcggcgagcggctggacgagcccgcggtgcgcgccatcgcgtccgcgcagtacggctggctcatgttcgtggccaagaacacgagcctgctcgcgttctggccggcactggctaggatcctcttgcgcggccgcctccaggaggggcttaccgctcgacagcggcagaaggagctcttcgtgccattgatccatgcgcgccgagtgctcaagcagcgggtcaagaaccaaggcggtgccgcggccgcggtggcgccaggagaggagacgacgacgttcgagcactcgtacgtggacacgctgctcgacatcaggcttcccgaggagggggaccgcgcgctcactgacgacgaggtgtccaacctctgctccgaattcctcaccgcaggcaccgacacgacgtccaccgcgctgcagtggatcatggccgagctggtgaagaacccggacgcgcaggagaagctctacagcgagatcagggcaacgtgcagcgacgaccaaccggaggtcggcgaggaggacacgcacaggatgccgtacctcaaggccgtcgtgctcgagggactgcgccggcacccccctgcgcatttcgtgctgtcgcacaaggcggcggaggatacggaggtgggcgggtacctgatccccaagggcgcgacggtgaacttcacggtggcggagatgggctgggacgagcgggagtgggacaggcccatggagttcgtgccggagcggttcctgtcaggcggcgacggtgagggcgtcgacgtgactggcagcagagagatcaagatgatgcccttcggcgccgggcggcggatttgcgccgggctcggcatcgccatgcttcacttggagtacttcgtcgccaacttggtcagggaattcgaatggaaagaggtgcccggcgacgaggtggatttgtctgagacgcgcgagttcaccaccgtcatgaagaaaccgctccgcgcgcagctggtgcgcagaacaacttgtgtatgaatgccgattaatggcccatcaccgcgtctgtagaaggccaaaaaaacatccttctggctcttggctcttctctcatcaagggtcaccaaaccgcttgataaattcggctaaccggtaattggcgtcggccggtaatttgaaaacttttaatgtcaatttttgtactatggattatttgaagacttgctactgaaaccaaatttcaaaatacacaacggatttcaaacttaaaattatgaagacttcgaaaaaaagagaaaaactgatatataggttaggattgctgattaattgctccctaaagttgataaatcgatgtgtaggaccgattagttggcggctaggtagaaggtagagtatgaaagattttacccctttttactagaaatcttttcaaattactaatgatacttgcaatatcggttaacaatacttgtact

SEQ ID NO: 2317 - DNA, 943 bp, Zea Mays
agccctcgctcagttggccggcctcgccttcgcatccgtccggccgcagtcaacctccggttcggagttcccattccccaccaaccaccgtctccatcgcaccgtcgcactgtcgcctcgccggccgcacctacgccgttgaagtcgctgtcgcagctgcaggacggaaagggcttcaacaagtgtgctaccaactgtccaactaccaagataagcatgcattgctgttttttctgtagtgatagatgcttttatgccaccatttggttcattttcacatgttttctttagcagaatcagtatggaaatactgctctttttttgctgtctttgttccattttctgtactatcttctccttttcatgatctttgttttggaaattgcgacatcaaatcccagtcaatctaaactttgtatgcttgcttggtttatctagtcatgtattaatactcatcacatttcagtgtctgctttgcaaaccaaattgatggttaagtgcttgcctatttgttctgcctgatttcatcgcagctcagttgtatgattgctgggtttcctacttttcagcttttgttttccgtttcatgttgtagtgttgctgtgtttcatgttttgatgagttttgttcatttatttgtagaacaacactctgtgttggtgtcaagatctatagagcaggcatttctatgggcagtgcatcaggactcgaaggaagcatagcatcatcggtttttgtgtttcattaattctcatttcaagatggcatctgctggcctaaagccaggggtgcctgttattctacgggagctggagccatcctcagagatgttcaagcaaggagcgtcccttcgagtcacaggaagtctccagtcattcgatgtggagtccgcgactgccaccattcaagacggcagccctgtttgatgctagcgagaagtaac

SEQ ID NO: 2318 - DNA, 1512 bp, Zea Mays
agccctcgctcagttggccggcctcgccttcgcatccgtccggccgcagtcaacctccggttcggagttcccattccccaccaaccaccgtctccatcgcaccgtcgcactgtcgcctcgccggccgcacctacgccgttgaagtcgctgtcgcagctgcagcatccatgtttaggacggaaagggcttcaacaagtgtgctaccaactgtccaactaccaagataagcatgcattgctgttttttctgtagtgatagatgcttttatgccaccatttggttcattttcacatgttttctttagcagaatcagtatggaaatactgctctttttttgctgtctttgttccattttctgtactatcttctccttttcatgatctttgttttggaaattgcgacatcaaatcccagtcaatctaaactttgtatgcttgcttggtttatctagtcatgtattaatactcatcacatttcagtgtctgctttgcaaaccaaattgatggttaagtgcttgcctatttgttctgcctgatttcatcgcagctcagttgtatgattgctgggtttcctacttttcagcttttgttttccgtttcatgttgtagtgttgctgtgtttcatgttttgatgagttttgttcatttatttgtagaacaacactctgtgttggtgtcaagatctatagagcaggcatttctatgggcagtgcatcaggactcgaaggaagcatagcatcatcggtttttgtgtttcattaattctcatttcaagatggcatctgctggcctaaagccaggggtgcctgttattctacgggagctggagccatcctcagagatgttcaagcaaggagcgtcccttcgagtcacaggaagtctccagtcattcgatgtggagtccgcgactgccaccattcaagacggcagcgtaagtctgaaggttgacacccagcatctgagggatgtcagtttccgcacgaactcggtgtaccaattcattggtgaacttcagatccgtgaagttgatgatgcgattctactcgcgcgcatcggaaggaacgtcgatggcctcgacatgaacctttaccagcaggctctactcatccgacggcagcacgaagcaaagctgctgagctccaggagagcatgatctgcttgctatcttggagcaggaggcgcatggtggttgtagttattaggtttctttgtttctcaacagtgcaattgcatatgtaaacgtgaagagaactggaccaagaactggttaattgagagggtctgctgcatatgatttgcgatctctcttgccctccaaagggctgccatggcatgtgtagatgtgactgccaatttgtgatcatcttacttgcagcagaatgctggttttattttattgacatgagaacagccttgtggatcatgtttactgggatgctttgttgtgttaaaagttgggtcatgttcttttgttgtaaaggtataaataatggaggaggtcatggtgtgaaga

SEQ ID NO: 2319 - DNA, 1434 bp, Zea Mays
ttaccggttacaaacccacacgaattgccgccaccaccccacacgacatcctacaaccccagcctcattccaccgggcccgcacctcagaccacaggtggacgaggccacctgccggccagcttctccggccaccaccgtcgaccgtgtaaaacttgcactgacgaagcctaccttcttatccggcggcggggccatggggttctcgctgtaccccaccaagtcgtcgacgcgcacgccgtggagcaccagcttcttccgccacaagttcccggccgccgcggtgtccttctgatcaggctagctccggccgcccggcggtcgacctcgctccgcgcttcaagaagagtgcttggcgcatggaccccgctagtagcctgatcagcagctccgcggtaccattccctgctgccggcgatggcggcggacagcgacaggtgtttctctttggcggcggattcgttggaggagcgccgccgttggtgggtggtgcggcggacgggcggcgcaagcggccgttccagctgacggcgcacgatgagctgcagctgcagctgcagctccagctggacgacgagctgtgcggcctggactacgagctccatgggccgcagcaggagcggacaacgaagcggcggctgacggcggagcaggtgcgggagctggagctgagcttcgaggaggagaagcggaagctggagcccaagcggaagctggagcccgagcggaagagcgagctggcgcggaggctcgggatcgcgccgcgccaggtggccgtgtggttccagaaccgccgcgcgcggtggaggagcaagcagctggagcaggacttcgaccgcctcagggccgcgcacgacgacctcatcgccggccgcgacgcgctcctcgccgataacgatcgtctccgctcacaggtgatcacgttaactgagaaactgcaaacgaaagagtcggcggcggcggcggcagagcctggagagcagacagttgccgcccaagcgacagcctacgctgtcttggaaggagacaagctctgctccggcagcgctgcagcgccggcggcggcagggaccaacgacagcccggagtcgtacttcgccggggcgcgctcgccaccgtcgtcgccagaggacgacgaccgcgccttcttcttccccccggacgccctgctcaacaactgggcatgggtatggaacgatcggcagtattaggggatgcacgcatatggctaggagtgcaaagttgactaaatttgctggttctaaatgtcatatatatcacccttgatcaaacgaacatggttcttataaagtttattaattacctgttggttctgtacttgattccttgttagatacggatgttccatgtcttcattatcatcgagaagatgttctatttcatccctaacctggtaagataccataaataaatg

SEQ ID NO: 2320 - DNA, 1441 bp, Zea Mays
cgtcttcgttttgtttcgtttcgtatcggatcgtgccgctcttcccttctcgtctagtcttgtctttctttcctcctctgttactccacctacagacctactactgccatcgggagggtaagctcttcggagccggagccgggtccacgttaacgccatcgagtgctgcgatgggcagcttaggagggagcgccggtgctggggacggcggcaaggtcgggctgccggcgcttgacgtgacgctcgcgttcccgcaggccacgcccgcatcgctcttcccgccagccgtttcggactactaccaatttgatgatttgctgactgatgaagagaaggcactcaggaagaaggtccgaggtatcatggaaaaggaaatcgcgcccattatgactgaggcattgacagagccagattatggaagtgatgcaagctccctaaggactgcagcaaccaaggtacctggtggttggcatttagatggacaaaaacgctggataggtaacagcacttttgcagatgtcctcatcattttggctaggaatgcagatacaaaccaactaaatggatttattgtaaagaaaggagctcctggtctaaaagccacaaaaattgaaaataaaattggactcagaatggttcaaaatggagacataattctaaataaagtatttgtccctgaggaagacagattaacaggcatcaattcatttcaggatataaacaaggtcctcgctatgtctcgaattatggtggcatggcaaccaataggcatatcaatgggagtttatgacatctgccatcggtatttgaaagaaagaaagcaatttggagctccactggcagcttttcagctcaatcaagaaaagcttgtccgcatgcttggcaacattcaggctatgcttctcgttggatggcgactgtgcaagctgtatgagtcaggcaaaatgacaccaggccggtctagtttaggcaaggcatggacgtccaagaaggccagggaggtggtttctcttgggcgagagctactgggtggcaatggcattttggttgattttcttgtcgccaaggcattttgtgacgtggaacccattttctcgtacgagggcacctatgacattaatagcctggtggctggcagagagatcaccgggatcgcgagcttcaagcctgctgtgtcagcaaaatcacgcctgtgaaagttgtttttttctttgttcccgaagacagtagaaatcaaccttgtacattcagatgattgggaataagaacggtaggaaagctgtaaaactcgacgtgcttcctcgtatgtactgttctgtttcaaattattcgacgttttgtcggaacggaacggaggacctgtatggctgtatatgatactcatcctatatatcacgcagcttttgaagattttgtaaaaaaacaaccataataaaaacaa

SEQ ID NO: 2321 - DNA, 1670 bp, Zea Mays
cgtcttcgttttgtttcgtttcgtatcggatcgtgccgctcttcccttctcgtctagtcttgtctttctttcctcctctgttactccacctacagacctactactgccatcgggagggtaagctcttcggagccggagccgggtccacgttaacgccatcgagtgctgcgatgggcagcttaggagggagcgccggtgctggggacggcggcaaggtcgggctgccggcgcttgacgtgacgctcgcgttcccgcaggccacgcccgcatcgctcttcccgccagccggcactcaggaagaaggtccgaggtatcatggaaaaggaaatcgcgcccattatgactgagtactgggagaaggctgaattcccattccatgccattcccagccttgccagtcttggtttagctggtggtacaataaaggggtatgggtgccctggactctcgcttacagctagtgctatttcgatagcagaggttgcacgggtcgatgcgagctgctccacatttattctagtgcactcctcgttggctatgtccactattgccctttgtggatctgaggctcaaaagcagaaatacttaccatctcttacccagttcaaaactattggttgctgggcattgacagagccagattatggaagtgatgcaagctccctaaggactgcagcaaccaaggtacctggtggttggcatttagatggacaaaaacgctggataggtaacagcacttttgcagatgtcctcatcattttggctaggaatgcagatacaaaccaactaaatggatttattgtaaagaaaggagctcctggtctaaaagccacaaaaattgaaaataaaattggactcagaatggttcaaaatggagacataattctaaataaagtatttgtccctgaggaagacagattaacaggcatcaattcatttcaggatataaacaaggtcctcgctatgtctcgaattatggtggcatggcaaccaataggcatatcaatgggagtttatgacatctgccatcggtatttgaaagaaagaaagcaatttggagctccactggcagcttttcagctcaatcaagaaaagcttgtccgcatgcttggcaacattcaggctatgcttctcgttggatggcgactgtgcaagctgtatgagtcaggcaaaatgacaccaggccggtctagtttaggcaaggcatggacgtccaagaaggccagggaggtggtttctcttgggcgagagctactgggtggcaatggcattttggttgattttcttgtcgccaaggcattttgtgacgtggaacccattttctcgtacgagggcacctatgacattaatagcctggtggctggcagagagatcaccgggatcgcgagcttcaagcctgctgtgtcagcaaaatcacgcctgtgaaagttgtttttttctttgttcccgaagacagtagaaatcaaccttgtacattcagatgattgggaataagaacggtaggaaagctgtaaaactcgacgtgcttcctcgtatgtactgttctgtttcaaattattcgacgttttgtcggaacggaacggaggacctgtatggctgtatatgatactcatcctatatatcacgcagcttttgaagattttgtaaaaaaacaaccataataaaaacaa

SEQ ID NO: 2322 - DNA, 1356 bp, Zea Mays
agtacgcggctttcttcacagatcacagcagcatccagcatcgggtcaaaacgaaacgaagcatccacgtttgtcgctcccacgctggcaatggccgccgccgcatctcccgccaccgccgccgccgtccgcgaagcggcgccggcccacagacaaattggaatccgtccgggtcatggtccggccccattccgtatcggcttcctcgccaaaccgtcctcccggtgggccgcgatctctgtgccgcctgggcctcgccgcgcggctccggcggcgtccgcggccagggagagggtcacggaggaggaggagaggcccgtgtcggtggagctggaacccatcgccagcgagcagcagctggactgggtccttggggaggcgcggcagctccagctccccatcgtcctgctgtggatggcgagttggtgcaggaaatgtatatatctgaagcctaagcttgagaagttggcagcagaatatcatccaagaatccggttctactgcatcgatgtgaattgtgttccacaaaagcttgtgaaccgcgctggagtaacacaactgcgtgcatacacaagtgacaaagcagatccctagtacgtttgttaaactaacacgcacgctaatggctccttttgttgggacttgtgaaatctgcaccgcggggctcgagcagaagatgccttgtatacagctgtggagcgactcccggaaacaggcggaggtgatcggcggcgggcacaagtcttggctggtgatcgatgacgtccggaggatgatcgagcaggaggaatgatccggcgtgtccttttagcgcagcgacctcagtattgccgcttgctcatagtcctagactgggcgtctgggccaggtgtttggtcgtcttgcatatattaggaaccatccatgatcagaggttttgaaaaatcgccggttcgtcttccatatatgaactctctccctggtgtcgcgatcaggaaaatgaaggaattgggctaccagtcatctgcgatgtccttgatgtatccatgtgtgtgtattaaaactggaacttgctgctgtatgagcaataatccagcacagcacggcaggacttattgccggtgtactgactggccttgccattagccactggatctggatggtagcactgttcatggatatgaagattagcatagcgagtacaatctctgctttagggttgtcaaaataacactggtcttgtttacaaacactagcttgtcttgtagcttgcttcttgaattctcaagagacaaattgtagccagctgggaaagtggcagcaggtttccctgtttttcttggtttgctcctgcatatactatgttctcactcctat

SEQ ID NO: 2323 - DNA, 2800 bp, Zea Mays
ttgtcgcctcgccgcttctccacctcccgtctcgtctgcaactgcaactccacctcggccgtcggccttctcatcctcgtcaccaccggccacggccggcctccaccaccgcctgcccaccgctcgctactcttgtctcccctccccccaagtggaagaagaatcgggctgttgctcactcagagctctctcagtgaggcgggcctcactagtcactagccttgctgttatgccttccccgccgctcgccagagtccaccgccaccggacaggaagcaccacctagttcctgaccctgatgcccatggcaccggaccaccccttcgatgccttcgtcgccgcagcccgtggcgccgtagcccaccttcacctccccgtcatccacatccctggatccaattccagtccccatcccaactccaagcagcacaagggactcgaggtcgactgcctgctccacctccacgtcctcgtcaccaacttcctccacaagcccctcaagtcattcgccaggtgcttcaggcccaagcgacgggcagacacacactccccgccgctccaccaggagcccagcaatggcaccaccccgcaaaagcaactggagttcctgctctgcattgcgttcgacgccttcgcccacaacctccacgcgctggatgacgcctgcaagcacaaaggcgaggaatttgctgccgctacccgacagttggagcaatttgtggttctcaggaaggtaatcgatgggaagagggccgatttcgatgggttcctttccaatctgggctttgcaaaggttggggcaccgccaccgccagcaagcatcgtgggtggtgcgtcccctgtcccagcatcagcaccagtcagcaatcaggaggatggtgccgtgattggaaacggcgagggggtggacagtgctagtggtacacaacagcaggcacagaaattgcctgcccggttgcttaacattcctttgtcgaatgtggagcgtctgcggtctacgctttctgcagtttcactgacggagctcattgaattagtcccgctgctggtgagcagatcatcgacatcggcagatgcacatcctgacaagaagaagcttttctcagtgcaagatttcttcagatatgcagaaattgaaggaaagcgattctttgaagagttggacagagatggtgatggccaagtcactctagaagatctcgaaattgcaacgaggaagaggcggttaccaaggaggaagcaaccattctccgagcgtataccacgttgtgtttgagcaagtctggaacacttcacaaaagtcaaattttgacttctttgaaaggtgctggacttccagccaatgaagataatgccgctgccatgctacgttatctaaatgctgattcagaaggatcaatctcatatggccatttccgcaacttcatgcttctacttccttcggaacgtcttgaggatgatcctcggaacatttggtttgaagcagccaccgttgttgctgtccccccacctatagaaatatctgcaggaagtgttttgaagtctgctttagctggaggtcttgcaagtgcgctttctacctctctgctgcatcctattgattcaatgaagacacgtgtccaagcatctacactctcatttcctgagctcatttcaaagcttccacaaattgggcttcgaggattgtatcgaggttctatcccagcaattctcggccagttttcaagccatggtttgaggacaggaatctttgaagcaagcaagcttgtattaattaatgtagctccaacacttccagagattcaggtgcaatcaattgcatccttctgcagcacagtcctagggactgcagtccggatcccttgtgaggttcttaagcaacgtttgcaggctggaatattcaacaatgtaggggaggcgattgttggcaccatgcgacaagatggcccaaagggtttttttcgcggcactggggccacactgtgtcgcgaggttcctttctatgttgctggaatgtgcctctatgcagaagctaagaaggcagcacagcatgttttgaggagagacttggaagcatgggaaatagtggcagttggagcattgtctggaggacttgcggcaatagtaaccactccctttgacgtgatgaagactaggatgatgactgcccctccaggcacaccagtgtctatgcagatgataatcttctccatccttcgaaatgagggtccacttggactctttaagggcgcgatcccccgcttcttctggatcgctcctcttggagcaatgaattttgcaggctatgagcttgccaagaaggcgatgatcaaagatgagaacagttccagtgagtcaacaaaagagaacttgccaagaaatcagtgatcaaggatgagtgtgaatctagggcgtcaatacaggacaagaaaaccatgatggataccacaggataatctaacgtttacctggttaacatctatggtgcaaagaaattgaaaccatggaacagtttttttttgtgtgtgtgttcatgtagcagagaagcaacagaacatctgccttttttgatacttgaatctaattttgggttgccgcgtctttttgcccctctaggaattccattcccataggccttgagatggttgtatagtatacagtacatgagagagacagatgcacatgctggagctgttgctcttttgtttgttatttgacgatgatccatagccttcctggttaaacatgatgtaaatttgctcttgtacttaccctgatgaggacagttggctttgaccca

SEQ ID NO: 2324 - DNA, 2901 bp, Zea Mays
ctcatggtctcggtttgtcgcctcgccgcttctccacctcccgtctcgtctgcaactgcaactccacctcggccgtcggccttctcatcctcgtcaccaccggccacggccggcctccaccaccgcctgcccaccgctcgctactcttgtctcccctccccccaagtggaagaagaatcgggctgttgctcactcagagctctctcagtgaggcgggcctcactagtcactagccttgctgttatgccttccccgccgctcgccagagtccaccgccaccggacaggaagcaccacctagttcctgaccctgatgcccatggcaccggaccaccccttcgatgccttcgtcgccgcagcccgtggcgccgtagcccaccttcacctccccgtcatccacatccctggatccaattccagtccccatcccaactccaagcagcacaagggactcgaggtcgactgcctgctccacctccacgtcctcgtcaccaacttcctccacaagcccctcaagtcattcgccaggtgcttcaggcccaagcgacgggcagacacacactccccgccgctccaccaggagcccagcaatggcaccaccccgcaaaagcaactggagttcctgctctgcattgcgttcgacgccttcgcccacaacctccacgcgctggatgacgcctgcaagcacaaaggcgaggaatttgctgccgctacccgacagttggagcaatttgtggttctcaggaaggtaatcgatgggaagagggccgatttcgatgggttcctttccaatctgggctttgcaaaggttggggcaccgccaccgccagcaagcatcgtgggtggtgcgtcccctgtcccagcatcagcaccagtcagcaatcaggaggatggtgccgtgattggaaacggcgagggggtggacagtgctagtggtacacaacagcaggcacagaaattgcctgcccggttgcttaacattcctttgtcgaatgtggagcgtctgcggtctacgctttctgcagtttcactgacggagctcattgaattagtcccgctgctggtgagcagatcatcgacatcggcagatgcacatcctgacaagaagaagcttttctcagtgcaagatttcttcagatatgcagaaattgaaggaaagcgattctttgaagagttggacagagatggtgatggccaagtcactctagaagatctcgaaattgcaacgaggaagaggcggttaccaaggaggtatgctcgagaattgttccgccgtacaagaagcaacttcttttcgaaatcaattgggtggaagcaatttttatccttgatggaacagaaggaagcaaccattctccgagcgtataccacgttgtgtttgagcaagtctggaacacttcacaaaagtcaaattttgacttctttgaaaggtgctggacttccagccaatgaagataatgccgctgccatgctacgttatctaaatgctgattcagaaggatcaatctcatatggccatttccgcaacttcatgcttctacttccttcggaacgtcttgaggatgatcctcggaacatttggtttgaagcagccaccgttgttgctgtccccccacctatagaaatatctgcaggaagtgttttgaagtctgctttagctggaggtcttgcaagtgcgctttctacctctctgctgcatcctattgattcaatgaagacacgtgtccaagcatctacactctcatttcctgagctcatttcaaagcttccacaaattgggcttcgaggattgtatcgaggttctatcccagcaattctcggccagttttcaagccatggtttgaggacaggaatctttgaagcaagcaagcttgtattaattaatgtagctccaacacttccagagattcaggtgcaatcaattgcatccttctgcagcacagtcctagggactgcagtccggatcccttgtgaggttcttaagcaacgtttgcaggctggaatattcaacaatgtaggggaggcgattgttggcaccatgcgacaagatggcccaaagggtttttttcgcggcactggggccacactgtgtcgcgaggttcctttctatgttgctggaatgtgcctctatgcagaagctaagaagcacagcatgttttgaggagagacttggaagcatgggaaatagtggcagttggagcattgtctggaggacttgcggcaatagtaaccactccctttgacgtgatgaagactaggatgatgactgcccctccaggcacaccagtgtctatgcagatgataatcttctccatccttcgaaatgagggtccacttggactctttaagggcgcgatcccccgcttcttctggatcgctcctcttggagcaatgaattttgcaggctatgagcttgccaagaaggcgatgatcaaagatgagaacagttccagtgagtcaacaaaagagaacttgccaagaaatcagtgatcaaggatgagtgtgaatctagggcgtcaatacaggacaagaaaaccatgatggataccacaggataatctaacgtttacctggttaacatctatggtgcaaagaaattgaaaccatggaacagtttttttttgtgtgtgtgttcatgtagcagagaagcaacagaacatctgccttttttgatacttgaatctaattttgggttgccgcgtctttttgcccctctaggaattccattcccataggccttgagatggttgtatagtatacagtacatgagagagacagatgcacatgctggagctgttgctcttttgtttgttatttgacgatgatccatagccttcctggttaaacatgatgtaaatttgctcttgtacttaccctgatgaggacagttggctttgaccca

SEQ ID NO: 2325 - DNA, 4216 bp, Zea Mays
cgtctccgtgcgccgtagatgtagcctgttccaacgtcatcgttcgcatcacacggccgtgaggagcaactctgttcctcatctcccgttcaccccgcgggcgcagggcgcgctctctcctcgtggcgatcgccgaccgtagcggccgctgcccgggttttcgtcggccgcttcgccatgtcttcgctggacccttcgccagcgacgagcacccaacagaagcaattggagagtttggtaaatctactgacgcagggaagcaggttctaccgcaaagcatataatgaactgttctcaggtgtaactactgagcaggatccggattcatcgactaatattcctgagtatatgctttttgggtggcatctcttcttaatgctccatttgagatcaccagaattgttcaaggacctggtgtcctgcatccatggattagttgctgtgttggccatacttttgattcacgtgccagctaaatttaggagcttcacgattgaaggctcttctcacttaatcaaacaaactgagaaaggcgtggatcttattgcttcattatgtcataactatcatacctctgaagaacgtttgaaagaaatgttgcacaagtctcacaatgcaatagaagacattttccatatgaaagcactaagtgcttcagagtgcaaaccagaaaatttggataagatagacacagatgacctgatgtatttcaaaggtctgattgatatggaatgtttccagtcaaatttggaaaaaatggagaaactatgtaattctaatagctgtaaaggggagcttgattttaaatcaattttgatcaataatgattatattccctatgatgagaactcgacgggggattccaccaatttaggacattcaaagtgtgcctttgaaacattggcatctcccacaaagacaataaagaacatgctgactgttcctagttctcctttgtcaccagccaccggtggttcagtcaagattgtgcaaatgacaccagtaacttctgccatgacgacagctaagtggcttcgtgaggtgatatcttcattgccagataagccttcatctaagcttcagcagtttctgtcatcatgcgatagggatttgacaaatgctgtcacagaaagggtcagcatagttttggaagcaatttttccaaccaaatcttctgccaatcggggtgtatcgttaggtctcaattgtgcaaatgcctttgacattccgtgggcagaagccagaaaagtggaggcttccaagttgtactatagggtattagaggcaatctgcagagcggagttacaaaacagcaatgtaaataatctaactccattgctgtcaaatgagcgtttccaccgatgtttgattgcatgttcagcggacttagtattggcgacacataagacagtcatcatgatgtttcctgctgttcttgagagtaccggtctaactgcatttgatttgagcaaaataattgagaactttgtgagacatgaagagaccctcccaagagaattgaaaaggcacctaaattccttagaagaacagcttttggaaagcatggcatgggagaaaggttcatcattgtataactcactgattgttgccaggccatctgttgcttcagaaataaaccgccttggtcttttggctgaaccaatgccatctcttgatgacttagtgtcaaggcagaatgttcgtatcgagggcttgcctgctacaccatctaaaaaacgtgctgctggtccagatgacaacgctgatcctcgatcaccaaagagatcgtgcaatgaatctaggaacacagtagtagagcgcaatttgcagacacctccacccaagcaaagccacatggtgtcaactagtttgaaagcaaaatgccatccactccagtccacatttgcaagtccaactgtctgtaatcctgttggtgggaatgaaaaatgtgctgacgtgacaattcatatattcttttccaagattctgaagttggctgctattagaataagaaacttgtgcgaaagggttcaatgtgtggaacagacagagcgtgtctataatgtcttcaagcagattcttgagcaacagacaacattattttttaatagacacatcgatcaacttatcctttgctgtctttatggtgttgcaaaggtttgtcaattagaactcacattcagggagatactcaacaattacaaaagagaagcacaatgcaagccagaagttttttcaagtatctatattgggagtacgaaccgtaatggggtattagtatcgcgccatgttggtatcattactttttacaatgaggtatttgttccagcagcgaagcctttcctggtgtcactaatatcatctggtactcatccagaagacaagaagaatgctagtggccaaattcctggatcacccaagccatctcctttcccaaatttaccagatatgtccccgaagaaagtttcagcatctcataatgtatatgtgtctcctttgcggcaaaccaagttggatctactgctgtcaccaagttccaggagtttttatgcatgcattggtgaaggcacccatgcttatcagagcccatctaaggatttggctgctataaatagccgcctaaattataatggcaggaaagtaaacagtcgattaaatttcgacatggtgagtgactcagtggtagccggcagtctgggccagataaatggtggttctacctcggatcctgcagctgcatttagccccctttcaaagaagagagagacagatacttgatcaattataaatggtggcctctctcgtatatagctcacagatccgtgctccgtagcagtctattcttctgaataagtggattaactggagcgatttaactgtacatgtatgtgttagtgagaagcagcagtttttaggcagcaaactgtttcaagttagcttttgagctatcaccatttctctgctgattgaacatatccgctgtgtagagtgctaatgaatctttagttttcattgggctgacataacaaatctttatcctagttggctggttgttgggaggcattcatcagggttatatttggttgtcaaaaagtactgtacttaattcacatctttcacatttttcactagcaatagcagccccaaattgctttcctgactaggaacatattctttacagcttctccatcagactgatgatcccatattcagtgtgctgcaagtgatttgacatatgtggcttatccttcagccaggacgattggttttctgcatcaatcaatcttttttaggacaagatatttttgtatgctacacttcccaaattgcaattaatccagaagtctaccttgttttattctattagttctcagcaacagtgaatgaatatgaatcagtcatgctgatagatgttcatctggttattccaaacaatctgacatcgcatctctttctgcaagtgagatgaagaaaacctgaaatgctatcaccatttaaaacattggcttctggaagttcaggtgattagcaggagacgttctgacattgccattgacatgtacggtagtgatggcaggagacgttcttaaacagcagctgctccttcagcttgtaatgtctgattgtattgaccaagagcatccaccttgccttatggtactaactgaatgagctggtgacgctgactcatctgcataatggcagatgcttaaccatctttaggagctcatgtcatgattccagctgcaccgtgtgcaaatgtgaaggccctgcaagggctttccaggccgcaccaatcctgcttgcttcttgaagatacatatggtgccacctaaataaaagctgtttctggttatgtctgtccttgacatgtcaacagattagtgttgggttgcagtcatgtggtgtttaagtcttggagaaggcgagaagtcattgctgccagcattgtgatcgtcaggcacagaagtactcaaaagtgagagctacttgttgcgagcaaacggagggcgatataggttgatagccaatttcagttctctatatacaagcagcggattttgtttagagttagcttttgagatgcatcatttctttcacatctgattctgtgtgttgtaactcggagtcgcgtagaagttagaatgctaactgaccttaattttcaccgaataatttgctagcgtttttcagtatgaaatccttgtcttaaatt

SEQ ID NO: 2326 - DNA, 1004 bp, Zea Mays
tgacaataccatctgcagaggcatggctgtgtttaatgttagatcggttcgcagtcaagttccagcattcgtctttgggcagcctttgtccattggagtatgccacagaaattgcaaaggaagcagatcagtacaacggctttaaccttatattggctgatgtgaactcaggaaccatggtttacatctctaatagacccggaggcgatcctgtgattcaaacagttgctcctgggcttcatgtgctttcgaatgctgcaattaattccccttggccaaaggcaatgcgcttaggacagagtttcaaaaggtatttgacaatacacgatgatgcagaagcctctttaaaacaaatggtagaagagttgatgatggatactgccagacctgatagatctatggtgcctgacaccggcgacgaccctgagtgggagtacaagctaagctcaatattcattgacactgcaaaggaacaggcacgatatggaacacgaagcatggtggcactagcagcgaaattggaaggtgaggtaacattctatgaaaggtacttggagaacagtttgtggaaggagaatctcatacagttccagatggagaaggcacaataggacttgagagaaacttaagaacactcgcaaagactggtcgattgcttattattttgctatcactttatctttaaagtgtatagcaaggcatatacaagagcagtgtataatatggctactattaattacccttttgtgcagatgtacagtaatgtttatccaaataccacaagaagaattggttgcatgtgctattccccccttgccgctgtataattttggaggacatcaattctttgctggcacaaaattgctgaaactacaatgtcaccctatgattctttatatgctttgtgcctgtattggagagtacaccaagagtgtttcaactgaggtcacatctgtatccaatccaaagtcagatgggcataaattaggatattacatctgact

SEQ ID NO: 2327 - DNA, 1619 bp, Zea Mays
acctttctgcaaatacagtagcatactcgcatagatagatccaaccatatttcgatcctcttcaggacgtttccacctccatcaccgctggtcggctatgtgcatcgcggcatgggcgtggcactgccacccgacgcaccgcctgcttctgctgttcaatcgcgacgagtatcactccaggccgacgcagccggcgcagtggtgggcggcgggggaggaagccaaggaaatccttggaggcagggacgagctcggcgggggaacgtggatggggtgcacgagggatggtaagctcgccttcctgaccaacgtgcgggaacccagctctctgatcggggccaagaccagaggacagctcccggtcaggtttctacaggttcggccttgtaagctttgtgatgatggcatgattatagaaggatgaagttagattactgtgtggtcgtgctctgcaagtctgcatatgctgcaaggaagagaacgctgcttaaaatgttctgtgccagtaggcaacttggtacaaatatgtaggtgttgacaataccatctgcagaggcatggctgtgtttaatgttagatcggttcgcagtcaagttccagcattcgtctttgcctttgtccattggagtatgccacagaaattgcaaaggaagcagatcagtacaacggctttaaccttatattggctgatgtgaactcaggaaccatggtttacatctctaatagacccggaggcgatcctgtgattcaaacagttgctcctgggcttcatgtgctttcgaatgctgcaattaattccccttggccaaaggcaatgcgcttaggacagagtttcaaaaggtatttgacaatacacgatgatgcagaagcctctttaaaacaaatggtagaagagttgatgatggatactgccagacctgatagatctatggtgcctgacaccggcgacgaccctgagtgggagtacaagctaagctcaatattcattgacactgcaaaggaacaggcaaaaaccatggtgttcagtatttcagtagctaccattattctgtttggaaataaattatatccatttttcttcttgatttcaggcacgatatggaacacgaagcatggtggcactagcagcgaaattggaaggtgaggtaacattctatgaaaggtacttggagaacagtttgtggaaggagaatctcatacagttccagatggagaaggcacaataggacttgagagaaacttaagaacactcgcaaagactggtcgattgcttattattttgctatcactttatctttaaagtgtatagcaaggcatatacaagagcagtgtataatatggctactattaattacccttttgtgcagatgtacagtaatgtttatccaaataccacaagaagaattggttgcatgtgctattccccccttgccgctgtataattttggaggacatcaattctttgctggcacaaaattgctgaaactacaatgtcaccctatgattctttatatgctttgtgcctgtattggagagtacaccaagagtgtttcaactgaggtcacatctgtatccaatccaaagtcagatgggcataaattaggatattacatctgact

SEQ ID NO: 2328 - DNA, 2101 bp, Zea Mays
acctttctgcaaatacagtagcatactcgcatagatagatccaaccatatttcgatcctcttcaggacgtttccacctccatcaccgctggtcggctatgtgcatcgcggcatgggcgtggcactgccacccgacgcaccgcctgcttctgctgttcaatcgcgacgagtatcactccaggccgacgcagccggcgcagtggtgggcggcgggggaggaagccaaggaaatccttggaggcagggacgagctcggcgggggaacgtggatggggtgcacgagggatggtaagctcgccttcctgaccaacgtgcgggaacccagctctctgatcggggccaagaccagaggacagctcccggtcaggtttctacagggcagcctttgtccattggagtatgccacagaaattgcaaaggaagcagatcagtacaacggctttaaccttatattggctgatgtgaactcaggaaccatggtttacatctctaatagacccggaggcgatcctgtgattcaaacagttgctcctgggcttcatgtgctttcgaatgctgcaattaattccccttggccaaaggtaagagtgtaagatatacatggattttagaaagatattgtgaatgttaggaacacaattatttttggaagttgtaatacacttcaaagttgagattctggttctttgaagaatctaatgccacaatacttgtttggtcatggctgtagtctcgacagtccaggtctatttgatcttccatcagtttattatggaaaagtcctattagtgaaacaccagaatgctcatgtaccttgcactttgttgtgacatgctagctctgccttcttaatgccattcttcgatggtttttattgttgattgttaggttatttcatcagtaaatgctcttatgttattcattgatgttacaagtccatgatcgtctgcagttaatatatggaaactagtattccataatggaacttgcacaattatgttctaccctataatgatgcctaagatatctattggagtcaaatgacgggtctatgtgtattatctttgctttctctgaaactgagcagataacttggtcaatttagctgcataggtttattcttcgtgttggtttagtagttctggatttcataagttttatgtaacactatgggctatattctagtttcatcaagtaaacctagtcttgttcacttcatatgtgctctgctccctagtccctattattaagtattgatgtacatataccatcattttctactcttttaagtaattttcagactaagtatcttccaataatttaaaatcaaacaattgtcgaacatggtttacttgtggcattcgtttctcaccgtgcaggcaatgcgcttaggacagagtttcaaaaggtatttgacaatacacgatgatgcagaagcctctttaaaacaaatggtagaagagttgatgatggatactgccagacctgatagatctatggtgcctgacaccggcgacgaccctgagtgggagtacaagctaagctcaatattcattgacactgcaaaggaacaggcacgatatggaacacgaagcatggtggcactagcagcgaaattggaaggtgaggtaacattctatgaaaggtacttggagaacagtttgtggaaggagaatctcatacagttccagatggagaaggcacaataggacttgagagaaacttaagaacactcgcaaagactggtcgattgcttattattttgctatcactttatctttaaagtgtatagcaaggcatatacaagagcagtgtataatatggctactattaattacccttttgtgcagatgtacagtaatgtttatccaaataccacaagaagaattggttgcatgtgctattccccccttgccgctgtataattttggaggacatcaattctttgctggcacaaaattgctgaaactacaatgtcaccctatgattctttatatgctttgtgcctgtattggagagtacaccaagagtgtttcaactgaggtcacatctgtatccaatccaaagtcagatgggcataaattaggatattacatctgact

SEQ ID NO: 2329 - DNA, 1221 bp, Zea Mays
tgctgatgtggcatgtctgcctccacccctccgccaccaccacagccgttgcctttgccgcgagcgaccgtagcgaggtgattgcaatggtggcctccactgcttcccgcctctcgcccccgcgcttcagcaccccttccccgtctcttcatcctccaaaccgccgctcgcgcttctcccctgttcgcgcagccaagttggaagctgtgctgtctattggtgctcatctaatcccacacccaagaaaggctgcaagtggcggagaagatgctttctttgccaatagcgatgctggcggagtatttgccattgcagatggtgtctcgggtcattctcttatctactgacagatgggcagaaaagaatgtcaatccagctctattctctcgagagctcatgagaaacagctctaatttcctcaatgatgaggcggtcagtcatgatcctcagattcttctcatgaaagctcatgctgcaacttcttctattggatctgcaacagtaatcatcgccatgcttgagaagaccgggactctaaaaattgcaagtgtgggagattgtgggttgaaagttattcgtaaagggcaagtaatgttctctatatcccctcaagaacattattttgactgcccataccagataagctcagaggcagagggtcaaacatataaggatgcattggtttgcagtgtaaatcttatggagggtgatataattgtgagtggttcagatggactttttgacaatatctttgaccaagagattgtttccataatttctgagtcgccaagtgtagatgaagctgcaaaagcattggcggagcttgcaagaaaacactcggtggatgtcagattcgattcaccctactcaatggaggcccggagtagggggttcgatgtcccctggtggaagaagctacttggaggcaaactaataggcggtaagatggatgacatcacagttgttgtcgcacaagtgaagacagtagtggtcccagaggacgaggttcagggtggcgacacagaagaacaaaaggggaatgagcagggcgctgcagctgtggttgcatacaaaatgaatgatgaagaagtagcttgagttctgggaccatcctcattttcattctcttcattttacttttctgtgatgactgtattatactgcacataaaggaattgaagcaaaataaatttgtgtgattgtgtctagctgtgcgtatat

SEQ ID NO: 2330 - DNA, 2216 bp, Zea Mays
cctgaactagtagcggtatgtttggcagagcggcaagttagagcgacgtattttgccaaattcctccttctaccccgagcgcaacaatttcctcccagccgcgacctgtctctgtctgttcttctgccccgatcggccgatcccacccacgcatctctctccgcgcccgcggtagtgttcgtgttcctcactcctcccgcttccttccccgacactgcctcagctcagatccgcggcggtttcccggtccctggatctaaagcggccggtgagcaggcctccttccgccgacgcggaccacctggagggaatttatcctggagccgtcttcctcctcgcctcctctcgcggcgcggcgcggaggccggaatcacttggagtggctagaggcacctggtttgtttcttgccgaagcccgtggtacatgtgaacagcagggcctgtcttctgcttttgcttcttagcaatggcgaatgcaagcaaacacttgcaaccttcaagcaaatcaggcaatgacagaaagtaccagggcacactggttgcttctccagcaaaggacatttcaccgaagtgtgcgaatcgcattgttccatcgaaacaactgatcttgggtggggattcaataggccatctggcatcgattctgattaaggtcgttgctctcgaggcagtcagaagagtttctaaagcaagataccctttcatatggaattctgttcaagcattgcaaatccttgtgtatcctccatttagttggatccaaagatgggcaccactcaaatttcttgtgcagggaattcagaaactatccatgccactgttgtttttgtcagtcacaacaacagtaagtgagctgtcctccaagcgtgatgatgaaccagataacaatacagaacattctgaaacaaatgaattggcatcaacttctggcacaagtgatgctgctgatggcacaaaggaaatcgtacaagagaactggcttgtgttacttttcagggagcttgagaagcaaggcatcactttacccgagaggtttactgaagatgaattacgcagattttatgttgctgcaaatggtgacttttcaagtttactctcttcggttaagaagacaattcgttggagggaaacgtttcacatacttacactgcaagaacttgataaatggtctcacttagtcttttggcatggatttgacacgatgcttcggccttgtttagtaattcgtcttggacttgcatgctccagcataccaccttgtgatagaccccgttttgggcaagcagtagtttctcaaattgaccatggtgttgtaaatttgaccaacaaagaagattcaagaattaccgttttgctggattgccatgggatttctccattcagatttccaatgcaaatgatgaggtcatttgtcactgtagctcaagaaaactacccaaatcgtcttggagtattgtttgttgtccgccttcctccagttgtcagagttattgcacagacatttcttcaagttttgaaaccatctacaaagcagaagttacgttttgagggagattcatacaagaagacgttggcggagttcttgcaggccgtgccagcgtttctgggcggtaaatgcagctgcccacgatgtgagaagcctcgtaatagttcagtggtgcaggcaggggaagggagcaagaaccaggctcgcttggtcagcgttgatggcggatcacctgtcgtggacttcgacttcgatgaagaagagatcccatcaccttatagctgcgagaacgccatcagggctgcgataatctgcctgctgatggtgtgcatcttcatcgcgtttctggctgggatgaacgaccctgcatccgttccgcccagtgcctgagagctatggaatcgcctagtctcccatagtagagcttagattgtcagttgagtatatacacatctgtgttgctatttaggatgctactagggtgttgtattccctggcagcttctttctcggttgtcgtcagatcgccttctctcctaatgtgagcggagcagatgaataaatatcctgtgtgtggcaaatgttggttagcagttcaattagcccttcgatagtgtctttctttgcgtgcttgctgcagtagggcagtgtgatttctcgttagtgtacgtaaactcaaagttttcaaccacaaggcaacaacacactgactctagtggtttcagctcttt

SEQ ID NO: 2331 - DNA, 1851 bp, Zea Mays
attgcagatcttcaaggacaagggtctgtcgtggtgtttagaggcggaggcggtgcccggccagcatacactctggtttcacagaatgaggcacactttgctggtgactggttcgaaatttgatttctactagccaggatgtacccaatgaactcatggatctagctatgaagggttctttaaatgatgttggaagtgtagatgtcttctcttggataagatgtttggatcttcgcactctcgctgtgctgacaaattccaccctgtccagctcaagtgatccacataatatatctttccattacttaatacctgaaggaggcaacgataagttgtcctacttcaagctaaaagtcttgctacctgattcagatctcactgttactagtcaaaagcaaatcaaggacaagctaaatgttgccactccaaaaggaaattttctttggttattccacatagaactgtcaccctttcttatcgcaaaatctcagttgtcgaaaaagagatttgtttatatcgctgcagattccatcataaagggcaaagtcgaagatcttggtcgcatggaactaggcggttacgccattggcgctgtagaagattgcagcaagcgtctcagcgattatatcagtatggatgttcttagtgccatacaaagagcgggagctacattcagttgggtgcctaaagaaccttataacgaggatgcatgcctacttgattttgacgtgctattgatggagcctcgcaagctggagaaaaccctgattacttccatcatgtggtgggctactggatgtttgcagcaatgtagagtaatgggaagctacaaggaaatttgctccagaaatttcacaaaatcaagatcggtcagaaacttcaagccttgaacgtggtcttcagcttcctggtcggcgagtgggaacttgatctcactgttgtgtaactgcttgttgttgtccctcttgcacagcttggtacatggagacatggcatatctttatctactttatatagaaggagcatgctttgccctggtttctcactcttgaacttgcatataagcccattgatgtaaggagagcgcaacttgcatataaactctttgatgaggttcttgatgatgttctaatctacaaatgtgttagaggatggccggatcctgtgtggctggcaagatttacaatttaaaaactatgccctcggagaatgaggagaattctatccgacttattacacgttctgatgccacatttaagaagagcaagaactgagcacctacaacccttttaagttaagcaacacaagttgaattcatgggagcatgtggtttgttaccaagatctgttgtatatacatatgacttatcaatgattttcaggttgttgtaactatccagtatcgtacaactgacttgttacctagggagaaacactgcatgagtgttgttggtatccttgtctaatatgaggcggagggggtgattcttgcagattctcctagaggtggaggaggatgaagtggtgatagacttcaagcaaactccaagtgtcgtgtcgacctctgcctccgctccctgcacacatccctcccagtcgtcttcaaggtccagacctcctccccgctcaagttcctcatcagcacgttgcacagtgtcgtgtcgtcgctttcctcggtgtccatacgcgtcgtgcgaggcgtcccgcttcatctctaatcacctttatgtgcacatcgtccatatgtgacccccttctccatataatttcaacaaattttactcttttgggctccgtgtaatttcattagtaaaatctctactaattattaatgcttcaaagttaacctgtc

SEQ ID NO: 2332 - DNA, 507 bp, Zea Mays
tctaagctagggactgtgattgcaagtgatgaatactggaagaaaaatacaaagaaactgaaatatggccctccagaaaatgaagatttcatgacacaaatgtttgaacatattgcagtggatggatctacatcatgcgctccaggtgaattttatgatgtggaaaatcatgagactgaggttgatggtattgatggagttgattttggcacatttgaggcagactgtgatgctcaatatgatgaatttgcgtctccttttgctagtggcagcaagtcaactcagtcgaagagaggcgtctcaactcagtcaaagaaaagagctagtcctactgttgttaatagcccactgaagcgctcaaagaatcccatggttaaggtcatgaataagattcataatactttggagatcaattgcaatatttcaaacaaagtaatgcttggtgagtataggtatgaatcaatcaagcaatgcatggaatgggctattgagtgtggagcaactgaa

SEQ ID NO: 2333 - DNA, 1441 bp, Zea Mays
gcgggcctgagttactttacctcccttgagcgaccactcttcccaagttcccatcccagtccgtcagtcaagcgagcgaaatcgaatggctcccctcttcgccgcggcgtcccacgcgtccctcctccccctctcctccctcgaccgccccgccgccggccacctagtccgtggcaccctcaggccccacacctcgagcctccgcctgcgccgccccccgggggcaaccgggcgcggccgcgggcgtggccgagggggcatcccagacgagtggggcgagcgctcgccgccggacaaccccgagccccccgcgcagcccgatcctcccatcgacgaagacgagtggggccgcgacgactctgccgagggcaactcacgccctatcgtcgtcgacgagtggggcgagcccggggtgcctgagcccgagccgccctccgccgcggacccgcctagcccctccgcagacgacgactggggaaaggagccggaggcgccggcgccggcccctgctccggcggcggaggaggacgagcaggaggtgaagagggaggagctcaagcggtgcctggtggacacggtgtacggctccgacctcggcttccgggcgtccacggaggtcagaggtgaggtcgtcgagctagtcacccagctcgaggcggttaaccctactactgctcccgtcgagtcgccggatctcctcgacggcaactggatcctcatatatacagcatattctgagcttctgcctattctagctgctggggcaacacctttggtcaaagtaaagcagatatcccaagaaattgactccaaaatcatgacgatagtcaatgcttcgacccttacgactccattcgcttcattttcattcagcgcaaccgcctctttcgaggttcaaagcccatcaaggatagaggtccaatttaaggaggggagctttcagcctccgacaatatcatcatccgtggatctacctcaacaagttgatatatttgggcagaagatcagcctggggccagtccagcaggcactgaatccattgcagcaagcatttgctagcattgctgggtccatttctgggcagccacccctcaaggtaccaattcccggcaacaacagagctcgatcctggctcttgactacctacctggacaaagacttaaggatctcgagaggcgatggaggcttgtttattcttgccaaagaggggagccctttgctagatcaattgtaaatctgtaattggttgctaccggaaaggatatccagaactccacagcttctactcaccgaggtggcagaaacactccagatcgcgggaaatgaagactgcaagggagactgtgctgctaacaatgccgcgtttacagtttatgttgcaacaaaaactttaaaccaatgtagctccaaaattgcagacttttcagtttatgttgcatga

SEQ ID NO: 2334 - DNA, 1014 bp, Zea Mays
cttctagttacgtctgaaggatgtttatttcacagatttcaccacatggattgttcctgttgttttcctgcagcaaaggtggaggcggtgaatggacatactcttttgctttctggagtagatttggttgatggcacggtaccaatttgagcatttccagtccttgatattaaaccatacctgccatattctgacagtgttaaaggtgcagctgttcccagttggttagaggttgacggtgcgttagcggtggagtcagtccatttttccgaacacttcatttctgcgctctccacctgctggatgcatgtacagatgtcgctgtatgcttcagcagacgagttccaggatctgatcaagcaggccctttcctgggacatcaggtcgatatcacagcggaaccgtccccatcaagtgagcgtggaagctgatgccaacggccactgtggcgaagacactgatgatgaccaccaccacagggacacaggtcgctacggtgtggtttaccacttacatcttgaaggcatcgatgtgtcgtataggatcgatcagggctccaacattttcgtcgaggacgccacccttcttccagacgccgtccagaaacggcatggttatttggcgtggagggacaaacttggcagcagcgttttgtagcatggccatggcgcagcgttttgttatcgttttcaggagtgctgcagtgtggtgtaggatgtcagtagtgatgccaatgaatttgaatgtggtggcgtctagtatctgaattggatttggaacgtataccccctgttttgcgttgagtctctgatttcttgatgttacacacaagcagaggatctggcagatcataagtacattgaaaaaaagatgagaaaaaggtgacatccgttgagagaactacgttaccatggatcactagatccgctcccttccctcctgtcaccagtagaggcgcaagaagttgtagaggacctgtctacattcccataagcacgacagaggaaacacacg

SEQ ID NO: 2335 - DNA, 1877 bp, Zea Mays
cttgatttcgtttatgatcatactatcaaaggcaagtgttatggtttaaaaactttcactcaccccagagctgctgagcaagcaattgcaggcatggacggcaagaaattaggcaatcgtattattcgagtaaatgaagtgcgtacaagaggtccccgagattttggtcgagatggttttagacgagatccaagaaggtatggtagagatccatactgggacagaagggatagggaacagagctatgatcgtgaaagagatccctaccatgacagggatagtgatagatcccgcgagcatgatagagaaagagattatgagcatggtggctttaatagagaagttgactatcccatggatcgagatcatgaagtagacgacatacatcctagagaacatgatcgtgcagcagaaacacataatatggattcagataatgacaaatataaggaacatggatcaagaaaaagccacccaaaaggtcgtgatagcaaagatttatcgagttccagtgatcttcaaaatgatgggaaacaccagttggataaaactattcagatgcgtgaggaccttgaaaatgaggcacgccatttccttaaaggccttgttctgtgttagtttgatgtggaaaccatagaatcagtggacactatcttggcgtcggtgtaaaatcatgatggatttatttccttgccagagtccccacttaagttaacttgcctacattggtttgaagatgaaaacatgctaaatgtaaatgtgaaagtaatcaaagttctccaggcttaatggatgtagatttatggatagtgatgacctgcagaattagaacatgaactcaattgcatttgcgaggtccaaaaaggataaatggctgttaaatctgtagtcacatttaggatttatcttttgcttgacttatacagaatttttcacatttagcccagttttttttgtacactggcatgcttgggtacctcagatgacagccatgcattggtcactgaatgtgcatgccttatttactcagaaaagcttcacaatcagttgcctattgcattacaatatatggtattatcttttcagctgaagttatatagtacatgggatgcatgatccatgaaccatgatacatagactgatagtacactcagttactttttagataggcatgagtacttgtgtccatgatttaactgtttcttgcattttatattatgagctttgcaggttagccagattaaggataaaatctctgcgaaaggacaacacattgcagatttgcagaagaaagctcagaaattagaggacgaactggctgctgcacggaaagtctcttcagaacgacaattagctgttacagacctgtacaaacattttcttcaactccaagactacaacgatagggtcaaaacagctgaacataggctgcagtctcttgttgacgctgccatggccgagcttgacatggccgaagatgctactaccagagatggctcgatgtatgagaacggcgtggtttgaacacccaaagggggctgccagctgtcatgtcacggcttgtgaggtttactaatttgttagatttgtagtttggatttgccatgtataatagaactgtactgtaactagaaacgggaaaatgttgtgtaaggatcagggaatgaatggctgcacagtgcacatttgctatggcttgtttttttttttcaaagttgaatttattagccggcctgactattgctgatacggtatgatctgccctaatatcagagctgttcagttaggcaggtttgacttgagaaacgttcgtgttctgtttgtcaatcacatatatcatgctggcttgttgatgcctgagcttgacgccgtcaatg

SEQ ID NO: 2336 - DNA, 1883 bp, Zea Mays
cttgatttcgtttatgatcatactatcaaaggcaagtgttatggtttaaaaactttcactcaccccagagctgctgagcaagcaattgcaggcatggacggcaagaaattaggcaatcgtattattcgagtaaatgaagtgcgtacaagaggtccccgagattttggtcgagatggttttagacgagatccaagaaggtatggtagagatccatactgggacagaagggatagggaacagagctatgatcgtgaaagagatccctaccatgacagggatagtgatagatcccgcgagcatgatagagaaagagattatgagcatggtggctttaatagagaagttgactatcccatggatcgagatcatgaagtagacgacatacatcctagagaacatgatcgtgcagcagaaacacataatatggattcagataatgacaaatataaggaacatggatcaagaaaaaggttcagccacccaaaaggtcgtgatagcaaagatttatcgagttccagtgatcttcaaaatgatgggaaacaccagttggataaaactattcagatgcgtgaggaccttgaaaatgaggcacgccatttccttaaaggccttgttctgtgttagtttgatgtggaaaccatagaatcagtggacactatcttggcgtcggtgtaaaatcatgatggatttatttccttgccagagtccccacttaagttaacttgcctacattggtttgaagatgaaaacatgctaaatgtaaatgtgaaagtaatcaaagttctccaggcttaatggatgtagatttatggatagtgatgacctgcagaattagaacatgaactcaattgcatttgcgaggtccaaaaaggataaatggctgttaaatctgtagtcacatttaggatttatcttttgcttgacttatacagaatttttcacatttagcccagttttttttgtacactggcatgcttgggtacctcagatgacagccatgcattggtcactgaatgtgcatgccttatttactcagaaaagcttcacaatcagttgcctattgcattacaatatatggtattatcttttcagctgaagttatatagtacatgggatgcatgatccatgaaccatgatacatagactgatagtacactcagttactttttagataggcatgagtacttgtgtccatgatttaactgtttcttgcattttatattatgagctttgcaggttagccagattaaggataaaatctctgcgaaaggacaacacattgcagatttgcagaagaaagctcagaaattagaggacgaactggctgctgcacggaaagtctcttcagaacgacaattagctgttacagacctgtacaaacattttcttcaactccaagactacaacgatagggtcaaaacagctgaacataggctgcagtctcttgttgacgctgccatggccgagcttgacatggccgaagatgctactaccagagatggctcgatgtatgagaacggcgtggtttgaacacccaaagggggctgccagctgtcatgtcacggcttgtgaggtttactaatttgttagatttgtagtttggatttgccatgtataatagaactgtactgtaactagaaacgggaaaatgttgtgtaaggatcagggaatgaatggctgcacagtgcacatttgctatggcttgtttttttttttcaaagttgaatttattagccggcctgactattgctgatacggtatgatctgccctaatatcagagctgttcagttaggcaggtttgacttgagaaacgttcgtgttctgtttgtcaatcacatatatcatgctggcttgttgatgcctgagcttgacgccgtcaatg

SEQ ID NO: 2337 - DNA, 2340 bp, Zea Mays
acttcagcacacatcacacagaggtagtgcctacccgcacggccgcacggcagttcgtcaccgtggtggcgtatccgccacaagcccactgcccacaggcccactgctgccgtctcgcctcagggctcaggctgcaggctgacgacgccaacgccgcccctcccggccttggcccaagtcgtcacctcctcgcccctcgcccacggctgcggccacattgtcgccggcttgccaacacgcccgtgtagatcggccgccgcatcgcgccacgccgccgtttcgatcccccgccagggcagcaggcaggaatctggcgatgaagagtaagaaaagtgtgcacggatcatcatgcaagaaggctaagttgtttgacggcctaattggtagacatggttctgaaatagatccatgttataaactttttcttgaacatttaagcaaagatcggaatacatatgtccttgatgtaccaaagggtgaccacggcttgcctttttctgtacgttatgaggaggactatacgtcctatggaaatactaagagcagaagtagtccaaattttcccaaccattcacggcgcacaagttggggcattccagatggcaaacagcctgatgtaaaagctgtcaaggctgccagcagaaatatgtgttgctccttttcaccaaagagatcatatgtgaagaagaagaccacgacctcactagtagatgaatcttatgagttatttctgagccttgtgaagttcaaggatggtttcatggttattgaaccagaaccaggtgtcaccattgtatatgagcgagaagaagatatgccagctggctatgatgaatggagaactggcagttccacaaatgaactgtctttggtgtctccacttgaaaacacggagggagactacaccatgcaaagatatgattatggccttgcaccggctaacaaaatttcttctgaacatgaaatggctgcaccttcttcagagaacattgctggtcaggatattatttgcacagatgagcatggccttgtactttatgctgaaccatctgatttaaatgcatgtgaagatgaacaagcaacacctcttgctatcagctacggtggttcatctacatttgatgaaaaactcaatgctgttttaagtcaaccatatgatcaaaacgaatacgaagagttgtggagaaaagcgactgaccggaagcctgtgagcagacaaagacacttgcgaagtgcatcaaagcgctatgttacagaggcaatcgggctgtcatatctcgattattaccctgatctagccgtacaaataaagtcatctgatcgtgataagagactgagcctactacgaaggttcttcttctggttggaggtgatctaagtttaccatccttttttcaacttcccagtgcgtaaggactctgctggtgaatttgaaaattagtgcatctgaaattattcacatgtgcttttcttttcgagatagcaaaatgctgtgaagagatttcacccaatcagtgaaaaaatatgtttcttgctgatggctacagtggtttgaaaacaaatcgtccataatatgttggtttagtggtttgcctgcttcatggtgctgtgtaagggaggtcaggaggtgtgtgtggtcaatgcctcattctttcagatctctggtgactgacccatgaatgcctgggcagtaggcagaaccaagttaaagaaaatgtgatattctccatgcctttggactaaagttaaatttattctcattttgttctgcagaacttgtgccatgagggagcctacatgccctggatctccaaacctctagcttgcaaccccatttcaccggatggatgaatatgaaccgacgcccactctcatcctcaagacacacgaagatgagccctaggggtgagcggttagcagagatttgcttgcagcatccctgcatctctgatgctacttgactgctccttgtttcgatgcgatgcaaagctgagtctgtaatcttcagtgtctatgcagtactgcagttatttttctgcaggctaaattatacaacatggcaacaaatacagcacggatattgcaaaaatggtactgctagcgttttatcgttacatggatacagcacggatattaccacacggatactgcttgcttgcaggtggttgaaatcgccattcagcctagcgtgtcaacgaagtcagggatccatgactgctcagtgctgccatccaactgcagattatcgttaaccatccttccaaggaccatctccacttcctcaccctcgttatcttccatgtccgagacacgggctccctccaactgcagctcctgtag

SEQ ID NO: 2338 - DNA, 3350 bp, Zea Mays
agcccaagaaaccaacccccgacgcgcgcgagacggcgagagagggagagataggtgtgcggcagtaatatagtgggtttgctctttgattggccgcggctaagcaccaaaccttggggaaatggagctgctcagtggtgcagtggcgcagcgggagcttggggaagcggaagcttgcgagcagccagagcactagccattacccagcgctaccatacactgacatatctatcgatctgatcgggctgctgctgagtgcagtgtgtgtacaaaaggccctgaaggcggtaagaccgagctgcacctgcactagaggtgaaggggtgtgagggagaagaaaagcgagtagcccgtgagctgctgcggtgcgagggagcccagggtttcgtctcgtctggccctcttctcttggcgcggccatggacgcctacgaggccaccaaggtggtgttctcccggatccaagccctagacccggaccacgccgccaagatcatgggcctcctcctcatccaggaccatggcgagaaggagatgatccgcctcgccttcggccccgagtctctgctccacgctgtcatggccaaggcgcgcaaggacctcggcctgctcctcccggcctcgccgacctccgttgcggccgccggccacgcgccgttcctgcagctcccacgccagaactccgggcgcgcgggcgcgccgtcgccgctctcggtgtcctcgccgtcgtcatggagccacgcgcccgtgttctccaggagcaacagcacgagtaatggcaccgcggaggaggcggcgggggctggggaggagctgcccagtcccgtgaacggcggcgcggcgccgttctttcctcgtcaggccggcgacgcgctcctggacgacttgcagctgcaggagcagctcgcgttcctcaacgagggcggcgggaacccggcccaccagctcctggggttcgacggcggggagtgccggagccccggtcccggtgatgccgatgggatgttcgcgttcggcctcgggtggcacaacgggggcccagcgcaccgtaggagttcgtcagtcaacgagctctgccttggcggcggcggcggcggcggcgatggtttcggttggaagccctgcctctactacgcgcgcgggttctgcaagaacggcggcagctgcaggttcgtccacggcggcctctccgacgacgctgctgcgctcgctggcgccaagatggaggcagccgccgatcagcagcagcagtgccaggacttcctcatccgctccaagggccagcgcctcggccccgccgccttcccctactcccccaccggctccctcccaggctcgccctccgccgctagcaagtgcctcagcttcctgctgcagcaacagcagcagcagcacgacagagccgcggcggccgcgtctctgatgctgggcggcggcgacgaggcgcacaagttcatggcccggccgcgcctggaccgtgccgacttcgctagcatgatgaaccccggctcgcgccagatttatctgaccttcccggccgacagcacgttccgcgaggaggacgtctccaactatttcagcatctacggtccagttcacgacgtgcgcatcccctaccagcagaagcgcatgttcgggttcgtcaccttcgtctacccagagacggtgaagctcatcctggccaagggcaacccgcacttcatctgcgacgcacgcgtgctcgtcaagccgtataaggagaagggcaaggtccccgacaagtacaggaagcagcagcaaggggacttctccggctgcacgacgcccactggcgggctggacgcccgagatccctttgatctgcaccaactcggcgcgaggatgctgcaacattcgaacagcgccaacgagctgctgttgcgccggaagctggaggagcagcagcaggctgccgaactgcagcacgccattgagctccagagccgccgcctcatgggtctccagctgctcgacctcaaggctcgcgcagctgcgacagcatcggcactgccaacaccaattgccaatgccttcgcgtccagccatcctttgagcaccatggcagtcgagtcgccactagagtctggagagcagctcaagctgagcagtgggtttgctctggatgggaagctcaacggtggcgacaaggaagaatctgcttgcgaggcgagccctgacgccgctgatagcgaccaaagtggagagcacaacttgccggacagcccatttgcgtcccctaccaagtctgccgcgctcgtgcacgacagtttcgccgccacggagcctgagaacaccgcgtcctgtgttgggagcaagatcgacggcggcagtaaccatctccgcccccctgcgctggaaatcccttcgcccagctcctacttcttccccatgcgcaggctgtcctccgatcacggagccatggggatgtaaagttcagcattggaagcgagtgataccccagcctaatcatagaatactagaagccaaggaaaagtgatgttggatatataggagaaaaaaaagagagttgagtgtcagcatagtgttagctcccactttcttttgttcttttagtccctacctttttagtggatagttctactaaaccacaagaggagaagatgccattagccttgattaagaaaacggcggcatatgcaatattatcgccagatataagtatatatatattatatatacaaataatcccctagtttctagtatatatatagtatctgtacttagtatttaacagtagcaggtaacgtcagcccaaagatttttactgtgacaaggtcctacaactacagccacctccactaggtttaccaaatgtgaggttaatccacagttctggtaccagccacagcgacagccacaggtcacatgtaataccagtacagctacagcctgacgcggacatttgtatgctagggcggcccagtgacaggaaaaagagcacatggccatggcagttgtctgtaagctatttttactgctactgctgcaagatcccaagctgggtcctcctatggatagagagaaagagacgtgtgtgcgtgtgttttgcttgtggccttgtatggctttgacacctactgcaaaatactactgttatatgattatatgttattgttgtgcctttgttcccatctgtttgagtggatcctagtgtagttgacacccctacagaaagaatggaagcaaagtgagtgctttgcccctccatttatctcccaccttttcagaatcggaaccgggtattggtatagctgttgttgtgagatggctgtcaggacattgactaatgattgttgctaatctattgagggg

SEQ ID NO: 2339 - DNA, 3858 bp, Zea Mays
cctgtccccgcctctgccaacgctcctgccccgcacacccacccgccgctcccgcgttgtccgcccccgtcatgaattgccctcttccatgtgcaccacagaaatctcggcgcaagatccccccgaaacctcgccataccctactgcgaggcgtaccattcgacagcgaggccctccttggcgggaacggcgtggtagtcgtggaggctaagacgctccacctcgacgtgtgcgttgaaccacacgctgtgcttgtccttgcataacctggtgaggatttggccgcatcatcccgctgagcatcgcgtgcgacggcaggccctgctgctcccaggtgtcagtgcgagataggagagcgcgaacctggccgagctccatgtgaggcagtcccaaggcacacgggcctcgcggtggcccaaggacgtcgggcggaagtcgtgccgagctacttccctgcctacgccaaagacgcccaacgcagagaagaggatgcccaccagcgacgtcccgtgctgcgaccgccacgcgaagaaggctgacggcatgccccgctccgatatgcccaacagctgggaccgggaaaaagacatgggacaaatagaagacatctaaagctttccaaggcagatgcctccagaggatatctactctctggtcatatgatcaatgcatagatcacttcagacaatcaaataacagtagtatacatagaaatgcaacatgttggatgtggctccaccagcactgcctccctacttcctctactgctgcggctactgctacatgatctatcgtgcctgtttttctaggaatcttaatggcatcaggctggcattttgtttaactcattaggtgcgtcaacactgaaattcactcttacggtcatgttttgttattgcattagagtttgcagcatgaatcagggacatccaatgttgttagatctattaatgcgatgttctctgtcttatttttatcctacaagtcatttcgagatatgtggttgctatcagatgcgggcaatgtcaactttattattggaattgttaacttgacactcattcaccttctggactgaaaaccaagacagtactacatctatttagttaaacatatattacttggctgctaacacaactaagagaaatactgaaaatcaatccttcagtactcttgcctatgctagcatatttgttcatatagtactcttgctgacatttccactatcacagcagcatctctactactatttgtgtttttttatataaatgtattttatcatattgatttcgtccatgcaagaggatctctatcgtgtttcgcaagttaggagccgtcaagcacctgttcggttttgtgtagaacttcacgctccttcctatcccggatacttatatctttactcaaatgatggtgtctagtaacaacgatagcctatcattgacttggacgagtagccataaatctctttcaacaacttatgtcacgtcgcaacgcacgggcacttacctagtaaacacccataagtttgactagatttgctcaattctaaaatatatgctcatatattgcacacggcgctttatgaagcctagtcgaaacaggcctgaaaaatagaggtattatgtgacctgagtttttttttttttttttgatatcgtgtggtcaaaacagagttaaattccgtctgcttttggacatctttttggttagtaggtagccacaatattgccggacctactgacctgtggttctcaaaagaagttgcttttccttgaacaaaaatgcagcagccagcagcaccacggcccacgggtgatagctcggtacgagtacgaagacaaagctgttggttgctttctaacagtttagatattttgcccctgcttgctgtgtggcgtcaaaactcaaaaggtttatcattcatgctcaagctacgcggagtcgcggacaaaacgagcgtctccagaatccaaatgaggcaggcgatttttcaccgcatttcgcccaaaaacctttgctccttccacttgcagggtaactgcgactccacgtaacaatggcttattccaatacccatgtgcccacacctgtccatgcatttgttacaaatatttttctaataaggtgtgattttatccttttatttagaatggttaggagtaatatcccactagccaattattccatacaattctcgtgtatgggagttctacacctccctcgtatacctatacttgtcgtggaatcgtagggagtcatggggcgtaatttctatatataaatatgtatcgataatgaacaaaaagtcacaaaagttcatttacactcttctccctctttactagtacggtgtccgtgcgttacaacagaaaacaaattattcgttaaatactcattacctatgaatatctatgttttttaagcggtgtggtagactgaataccttatttaaacaatatctatatatgtgaggtaattgttagaaacagacttattaatctctgcaacaccaattacattttgaacaacgctaattcgtcgccaaaatgtcctggctacattttgaaccgttgtattttacttttcttttcatattgagcacttgattattctggttggttattaccatccttttcacggttgacattcttgctcaatgttggatgtagacctaaccaagctcattcaaaataataaagtagaggtcaggccactagttgtctcagttatcaaaactttgcatgcaactttcaatcttctcatttttttataattgatgacaaccatacaaagatagaaattaaagtgtttaattccaaacttacacttcacgaagtatgaattaataacttggtttggatttgtgttgcttgccaagcactttgcacactattaaagttttggacaaatttcataaaccctattttgatagtatttgctcccctacatatgtgctaggtgtttggatttgaatcttgcacatatgctaatttaaaattatggaagaagcaaagctaccaaatgttgctaaggtgcctaagataaaactttgaagtgtgtataccatttgtaataccacttgtaatattgattcattatttggtttcgacccttaacacttgagatagctagacctcaaagagactagaaacatttgtgagaccaaaattactagaaagatttctagataccaattaaaaaagcaaataatattaagtctagctatcgcttaacatatgcatgctagttcatcaaattatcaatcaaaaaatattaaaatacatatcataaacaagaatgttgggggccttcgtcttccgaaggtcctcaaaaacacgactaacatatttcccaagtataatatatgtacaggaaccttcggacatgaaatgaagttatacaataatatggagagcgcggttcgggagaaggatgaatcaatgctgaagctacccgtgaagaagcttcggcttaacgatggaaaatgaaaccgacttaaaggggaaaaggttgtctagtcctcgatagatttctctaagtcaatagtaagtgtcgagggcatgaatgtaattctacacaggttgcgccctgtgcctataaatagataaatagtgacactgcactgttcacgctgactgatattcactcacacgtcacacttggacttttaccttccgttaagccgaaggtataaatgtaattcaatactgtccatgtttattcatgataatataataaaaatgttctgataatgccatatgattattcatgtcaatacccgtgtttcatatgcctctacttgacttattatatactgaaattatgaaggtacgtccttcataaccttcgtctgaa

SEQ ID NO: 2340 - DNA, 2020 bp, Zea Mays
cttgcctactggtaaaggtcccgacgacgcggtatcgccgtatacccgcctcaagtacaaagggaaagctgcgactcgctcggaagtgggaaccttcagttgaggttctctaatcgggcccgctaaagtcgagagacaggttttcgcgaacatttgcatctagccatctctactcaactgaattcttgtgctcttgtggcattcacaaagtccattttcagactgagctagttcagctgtcatttttttttcagccaaaggtcgcgttcttttggacctgctcttgattcgttcgttcgttcgtttggattgattgattgattgattcctttcgacttcccttcaccacccccctgctccgtcaagcgtgcctctgttcttctgccattgctggatcgcgtttgtctgtttgttgggttgctggcgctgcggccatggatcccttccacggcattgtgaaggaggagttcgacttggacttcgacttcacctgcgcgtctgcggcggcggcggcggcggcctcgtgggccgtcgccttgccggagatgccccggccgatggaaggactcggcgaggtgggacccactccgttcctgaccaagacatacgacgtcgtggacgaccccaacaccgacaccatcgtctcttgggggttcgccggaaccagcttcgtcgtctgggacgccaacgccttcgccttggtgatcctcccacgctacttcaagcacagcaacttctccagcttcgtccgccagctcaacacctacgggttcaggaaggttgacccggacaggtgggagttcgcgaacgaggggttccagcgtggccagagggagctcctcaggacgatcaagcgccggcgcccgccgtcgagcccgtcggcgcagcaggggcaggcgccgtcggcctgcctggaggtggggcagttcgggctcgacggcgaggtgcaccggctgcagcgcgacagggggatcctgctcgcggaggtggtgaagctgcggcaggagcagcaggcgacgcgcgcgcagatgcaggccatggagaagcgcatcaccacggcggagcagaagcagcagcagatgacggtgttcctcgcgcgtgccatgaagaacccgagcttcatccggatgctggtcgaccgggagggccttggcggctgccgcagggagctcgaggacgcgctctccagaaagcgccgccgccccatcgagtacctcccgcgcgacggcgagagaagcggcactgccacggagtcggcggtgagcgactacatttccggacttccggtcggcgtcaacggcgtggcggaggcggacgacgacgagagacggtgggagagaaggggcggcggcggcggcggcgaggacacggagagcttctgggcgaagttgctcaacctcggcctggaggagaagcacagggagggcagatgcgatggcgaggaggggaacggagctgacgtggacaacgacgtggacgacgacgtggatgtgctggtgcagagcatctaccacttgaacccgaacccgggtagccccggtggcaagtgaaagttccagaacgttccacattccagaacccactatggtctatggaagtggaagctcccagtgggcatcgcaattagtcgtaggcgatagttttttatccggcgcctgacttcttgtcgcggggctatgcaagttgcaaaagtgcttgcgtttggccggttgccaaggaatgttcgggatgctcgtcgaactacgaagcttctagaagatggagcagcgaggctgcagcctactcgtatattactatcagggagcaggcgagcagcaaggctgcagcctactcgtatatttactatcaatggcgcgggcttcttcgctgcggtttagtccgactacggggtttacagctacggctacaatcaggatgaaacaaaggcacttctcaaatgtgtacctgacgtgtcattcttattcttctgggcggagcaggtagacaaaaaaacagttgtagctttgtcttttcctgaaaa

SEQ ID NO: 2341 - DNA, 2332 bp, Zea Mays
gctcagcgcagcgggcagattagtcgactccatttcgcttccccgtccatctcattcctcttctctcctcccctccctcggcctttctcccatccccgttcgaagaagccgccgataccgcggcagtcgaggatggcggcggcggcaccaccggacgggcaggagaaggtgattgcggcggcgcagcacatcgtcaagttgctcgccagctccaagaacgctgccgacgacatgatccgcatcctctccggcttcgacaaccgcctctcgctcatgtccgacctcttcactcctccccctgccgccgccgccgttggttccatcctggaggcggacgaggggacccagagggagggggacgaggccgactacgacgaagacgacgccgctgcccgggccgaggcggagtgggacgtggcggccgaggtggtcgagcgccgggtgtcccccgctgccggggcggccgaggtggtcgagcgccgggtgtcccccgctgccggggaagcgctggtgttcgactcgcgggagggcgccgaggagtacctcgccgcggtcgcctgcctcgttggcgcgccgggcccgcgcgccgaggccgcgctgcaggccgccatgacgcggctcgaggacgagttccgccacctgctcgtgcgcggggcgccgccgctcgccccagaggacctccagacctcgctcctccggcggctctcgctcacggtgccctccttcaactcctccgccgtagacctagactgccactccttcgcccaccacccggccgccgtggggggagacgagcagcagtgcggcaggagctccgcctccgacgacgagaccttgccctacctcatggccccggacaccgtcagcgccctcagggacatcgccgacgtcatgctgcgcgcgggctacgcgcccgagctgtgccaggtctacggggaggtgcgccgggacacgctcatggaacgcctcgccgtgctcgggatcgacaagatgagcctcgaggaggtgcagcaggtggagtggggcgtgcttgacggcaagacgaagaagtggatccaggcgttcaaggtcgttgtccggggcctccttgctgaggagcgccgcatctgcagccagatccttgcggccgaccctaacgccgaggaggagtgcttcactgaggcggccaagggctgtgtcctccagatgctcaacttcgctgacgccattgcgatcgggaagaggtccacagagaagctgtttcgcatccttggtatgtatgaggcgcttgctgaggtgctgccagagcttgaaggcttgttctccggtgacgcaaaggatttcatcaaggacgaggctgagggaatactggtacggctcggtgatgcagcgcgtggcacgattgaagagtttgctaatgccatacagggagagacttctcggagtcggagaccgctgcctggtggggagatccatcctcttacccgctatgtcatgaactatgtgtgtctgcttgcggattacaatgcctcgctaaataggcttctggaatattgggatactgagctgactggggttgataatccgaacacgactccattggggcactgcgtgttcatgctgatcacacacctacagtgcaagattgatgagaaatcgaggctgtatgaggatgaagcgctgcagaacatattttttatgaacaatctgctgtacattgtgcagaaggtgaaggattcagagctcaagacattgcttggtgataactggattcgcaaacatcgtggtcagataaggcaatactctacagggtatctccggtcatcatggactagggtgttagcttgcctgagagacgatgggcttccacacacaatgggttcatcaggcgcactcaaggctgcactgaaggatagattcaaaaacttcaacttggcctttgaggagctgtacaggactcagacatcatggaaggttgtcgatcctcagttaagagaagagctgaagatttccatctccgagaaggttcttccagcataccgttcatttgttggaagatttcatggccaactagagggagggaggggttctgcaaggtatataaagtacaaccctgatgatttggagaaccaggtctcggagttttttgaagggagaaagccaaatgcttgatggtcaagggatgttcatatcaactatgcaacctcaagacatgcaaatttgatgatgctagttccaagtttccttccaaatttcttgaactaccgtacatggaacttctagcctaccctaacttggttggaacttaaagaccctgctgttggatggtagagggataacaccattgaagaag

SEQ ID NO: 2342 - DNA, 637 bp, Zea Mays
atgtctgggatggcatttgatgattcacctgcccaagtgaatgttgaaggagatgtttcagagaaaaaagtagaagttcaagaccagaatgaagtgggtgggatgccctcacgacaagaggaggaggcagcaattaagaaaaagtatgaaggaatattgcccagaaagactcctgcttatatctaaggtatagcagacaaatacagaaaagggctggcctggttaaaaacggttcaggttagcaagcatcatggcccgtatccagaaggtagcttcacgtttgagagaaggtggcttcgaacgagacctgatcgtttccttcgtcctgggcgacttggctggctcttgctcaatgggagttgacaggacagatcacggctagccagtcaggttcgttgtgatgagatccagaagcaagcagcatggctcgatgtgatgagctgtacaagaggcgatgatgcgttatcatctcaggcagatttatatcggaggagatgaatcgcgttcgcgtggctcttctctcggttctgttttactgatgtaaattttagcttatttttaactagaggaacgatgtaagtttaaccagaccaataaaacaaccgtgtatgctctgcttccaatccagctattagct

SEQ ID NO: 2343 - DNA, 775 bp, Zea Mays
cggatccacacgctaccctcggcaccgtagccgtctgccccgcgctccccgttccccttcctcgctccccaccagtccgtcccatccctcgcctgccttcgcacgggtgcgccgcccgctcgacagccacgccgcgccgcgccgcgccgctcagctgcccggcacccgcccttcctcgccgagctcgggatcgacgtctcccgcacctcctccgcgcccgttccgggctccgcatccggcctctcccccgtccccaaccccattccgcagcaggcgaccagcacaacatctcgaatcccccgcctcgcattcggctcgccgtcgctcctcctccgcgtcccgccaccctccgcacggccactagctgggtatcaaaacattgggttgccaaacaagctaccttctcagattccgatcaatagcttctcaggtccaacaaagggaagggaacggtgctgatagtgcaagtgctgtccgataaaaatggcgctgtggagcatctgaaatgctgcttcccttggctcatatgaattttagcttaggccttaggatagagcaaagtagcataatctcaagcacaagtttactatgtctgggatggcatctgatgattcacctgcccaagtgaatgttgaaggagatgtttcagagaaaaaagtagaagttcaagaccagaatgaagtgggtgggatgccctcacgacaagaggaggaggcagcaattaagaaaaagtacggaggttttatacccagaaagactccatttatatcttaaa

SEQ ID NO: 2344 - DNA, 1272 bp, Zea Mays
ggggcatgtatgacatcggtttttttttctaccgacgtccggagaatttcattagcaatcggtggccacagagagttaactaaaaataattcagcgacagatatcttcgactcctcgttcgtggttccccatcgtcatcgccatggatttctcttaggctcacccgtccgctcggctcgcttccttccccactctctctgatcccgtcgcacttccctcctcgctgcagcccctctactattgcgattaccgtttcctcgctgccctttcctttttcggtcggcagcaatcaccggggcaagcgaaccctcgatttgcgtccccgctctctgctagcgcccctaaaagaggagcgaagcgatgtctatgtcgaagacgggtcaggccgcggagaaggatgagcagcagcagtcccgagggatagcactgatgcagggcatctgcgccgtggtgtaccgcaaggccgataacacgccctgccccatcaagcagcattcaataaggacgctctcaagagtttgaacatcacccatatcttgatcgttgcaaagtcactggatccagtatttccagctgaatttaattacaagaagatcgaagatgaagctataagctctggaggcaatgttttggtccattgctttgctgggcggtcaaggagcctcacaagcctgcggttaggggggcataaccccaaccggagaggacggccgacggctacgagctacgtagccgtggtccggcaagtcggggattccaggtccttgacaagaagtttcagaaatccttgcaagtggagcaggaatggagaatgcaacctgtgcagcactgataattatactagtgttataataggtgcagaaggcctcatatgtagtgaaggcgtatgcgttgtaagagcgtcttgaccgcgtattatgacatctggataacaagcgaggccttggcaaactttatgatgtaaacagcaagcaacgttgttcatccattgggatgcagtttacatgttgaataatattcactgcaatttctcttcaaatgaaccaaagaggggtaatagttggtgctctctctcctgcatagatgcggcacatcaatcaaccttagaagaagaatactccatcgtgcatagatgcagcacaccgttgacttttctaaaaaactttgactagtcgtgttattcaaaaaaataatgagttattatttattttattgtgatttgttttatcacttaaggtaataagacgagtgtccaaagttttcaaaaaaaag

SEQ ID NO: 2345 - DNA, 1332 bp, Zea Mays
ggggcatgtatgacatcggtttttttttctaccgacgtccggagaatttcattagcaatcggtggccacagagagttaactaaaaataattcagcgacagatatcttcgactcctcgttcgtggttccccatcgtcatcgccatggatttctcttaggctcacccgtccgctcggctcgcttccttccccactctctctgatcccgtcgcacttccctcctcgctgcagcccctctactattgcgattaccgtttcctcgctgccctttcctttttcggtcggcagcaatcaccggggcaagcgaaccctcgatttgcgtccccgctctctgctagcgcccctaaaagaggagcgaagcgatgtctatgtcgaagacgggtcaggccgcggagaaggatgagcagcagcagtcccgagggatagcactgatgcagggcatctgcgccgtggtgtaccgcaaggccgataacacgccctgccccatcaagcagcattcaataaggacgctctcaagagtttgaacatcacccatatcttgatcgttgcaaagtcactggatccagtatttccagctgaatttaattacaagaagatcgaagtacttgatatcccagacactgatctgttaaagcattctgatgaatgctttggtttcatagatgaagctataagctctggaggcaatgttttggtccattgctttgctgggcggtcaaggagcctcacaagcctgcggttaggggggcataaccccaaccggagaggacggccgacggctacgagctacgtagccgtggtccggcaagtcggggattccaggtccttgacaagaagtttcagaaatccttgcaagtggagcaggaatggagaatgcaacctgtgcagcactgataattatactagtgttataataggtgcagaaggcctcatatgtagtgaaggcgtatgcgttgtaagagcgtcttgaccgcgtattatgacatctggataacaagcgaggccttggcaaactttatgatgtaaacagcaagcaacgttgttcatccattgggatgcagtttacatgttgaataatattcactgcaatttctcttcaaatgaaccaaagaggggtaatagttggtgctctctctcctgcatagatgcggcacatcaatcaaccttagaagaagaatactccatcgtgcatagatgcagcacaccgttgacttttctaaaaaactttgactagtcgtgttattcaaaaaaataatgagttattatttattttattgtgatttgttttatcacttaaggtaataagacgagtgtccaaagttttcaaaaaaaag

SEQ ID NO: 2346 - DNA, 690 bp, Zea Mays
caagatgatatgtttgatcttcgatatgtgccttcaaagcgttagttgattgattccttcgtgaagttcatttctgggcgccaacattcaaatggggcatcagcattgccaacatagccgactttgctaaaccacctgaaaagatatcttaccctcagcaagttgctgttgcatgcactggactcatttggtcaaggtacagcttggttatcacaccgagaaactggaaccttttcagtgttaacgttgcaatggcgggtacaggcctgtatcagctttcacggaagatcaggcaagattacttatccgatgagaaagatgctgcttcacaactggaagcatagataatgacaacaggcaaagaataacggattggaaagcctgcatcctaggagtctactcttgattttttttttctgggcaagcaaagaataacggatgggtcatgtttgttttcctgttattctgaaatcgtgagcaggctaatgtgaaaatcttccgccaaaaaagaaaaccaatgaagtgatgttttgagcattttttttgtgggaacaagtcatgaaagtacatggtttatctgttgttcttttgttccttcaaccgctttatttgggaaaacgctaaattgttgccaagctgattgaccataatccagcctttgctcgattcattggtaaaaatctaaaaaaa

SEQ ID NO: 2347 - DNA, 1754 bp, Zea Mays
atttgcatcgcgcattcgcgccggtctggccaatctctagttctctactgcacggtgaccgatcaacgacagtcgacagttgcagtgcagccgttcagagttcaagagttcagtttagagagagagagggggagagtgatttgccgacttgccagttgccgcacaaagctcctctagcacctctgtgtggccgacttgtccccggtatcaccaagtctgcaggcctccccagtcgtcgccggcgagggaacgcgccgcccgtgacgccgcgggttgttggcgccggcgttgaggccacaagcgcgccagcatcaggacctcacaggtgattcaatcctgaaggcatcaactatgttcaattttcaagaaatgtcttgctgttttacgtgtgcgacgggcatggaacgaaataatgaaaacgaaggaggaagcaaggtgaggattttttcctacagtgagatgaggaaagctacgcatgattttagtggagcaaacaagattggcgagggcggtttcggctccgttttcagggggaagcttaaagatggaacgatcgtcgcggtgaaagtcctttctgctaattcaagggtcccagaggattcttgtgtacaattatctcgagaacaatagtctttcatatacacttctaggttcgggccggagcaacattcggttcaactggagagcccgtgtcaagattgctgtaggcgttgctcgtgggcttgcttatcttcacgatggaattcggccccctataattcatcgagatataaaggcgagcaacattctccttgacaaggacctcaccccaaagatctctgatttcgggctggcaaggctcctccccccaaacgcaactcatgtgagcactagggttgcaggaacaataggatacctggctcctgaatacgctgtgagggggcaagtgacgaagaaatcggatatctatagtttcggcgttttgctactggaaattgttgctggtagatgtaactacaacagtagattgcctcagggagaccagtttctgcttgagaagacatgggcatactacgtgcagggaaagctagagaaggtcatagacgccgaagcaggggaggacctgaacgtcgaggaggcatgccgtttcttgaaggttggcctactatgcgcccaagacgcgatgaagctgcgtccgaacatggccagcgtcgtcctgatgctgataggagagaagggaatctccgtggacaggatcaccaagccagccgtgatcggtgacccgtacctcgaccggaggccaagcaacgcagactctaccacgatgaagtccttcgccacgaccgaagctttaacgtcatcagaggcaaacacggagtggtctctgtgatggggggaaaaaacgtcatcatcgatggagatttgtttttgtggatgctgcagttgccaaacaaataccgcatcgcttctgttgattatgtttgtttgttatttttgtgtgtgtgtatatatacttgaaatggaaccacgggagtgaaacgaggattgaatatgctttacccatctttggtacaagtagaatcgtttgtgtttctatcatattcactctctttttttttcttctggaacatgtatgttatcttttcagtctgatcacctttgtaggtcagttccagcagactgatgatgtgatgcgtagcgttgatgcaacggacatacaccaccaccctttgtagcaagttgcatcgaacagtttcgttttccggaggaatacg

SEQ ID NO: 2348 - DNA, 1548 bp, Zea Mays
gtccattgccctgccctgccctgccctgcccagacactggtcaagcgacgcaagggaaggatgtggttagctagcagcctgaaattctccgcccatcaactcagtcagcaggaagcaacccgcctagcgccctcgatccaaggacctcagagattcggccgtcgccactccggggccaagaaatgctcctcctgctcttcttctctgtcctcgccgccgttgccgccttcctcctcttcaagttcgccaccgtcgtcgatggggacttgacgctcgtatcccgcggtccgccgctgcgggagagggtcgacggcaaggtcgtgtggattactggagctagccgcgggattggtgaggtgataaatttcctgactgcagtgttattttttagcgagccttatgcctttgttagttcattgaggaatggggaggttcttgcaatgcacttcgcaaatttaggagcaaagctgatactatctgcacgtaacaaggacgcgcttgcgagagtgaaaaaaaacatcctcagcaagaatccagatagcagagttgaaatgttacccatggatttatcagctggtgaagaatctctgaaagaagtcgtacatgtggcagaatcatttttttctaatgcaggcgttgactatatggtccataatgcagccttcgaacgtcctaaacggagggctctagaagaaagtgaggaaggtcttaaggctacattgaatgtcaatgtcttcggaactattactttaactcgccttctagcaccttacatgcttgatagagagatgggccattttgttgtgatgagtagtgctgctggaaaggttcctgctcctggtcaggccatttactctgcctccaaacatgctcttaatggttactttgcttctctgcgatctgagttgtgtacaaaaggcattaaggtcactgttatctgccctggaccgattgaaacactacaatcttctgctgcagcttcttcatcgcaaacacattctgctgagcagaaacgtgagaaacgtgtttcggtggaacggtgtgttgaactgacaattgttgctgctactcatggactgaaagaagcatggatatcatatcagcctgtgctgactgttatgtacttggtgcaatacatgccaacaattggttattggctaatggacaaggttggtgcaaaacggctggatgcggccgcaaagaaagggaacacgtatagttggagtctcattttcagcagcaagaagtcagcatgaccaaattgctcgtagctgctatcaccatctttctcgattcatatggtcacgtgacttatattgttgtacgcaaaaaggtcggcctgaaaaggatcagatcatgtatagaaacaatatagtttagtgaaaaattggacccgtcactatgaccaataattatgattcagttgtgttagatttattgtgtggcgtaatgatgtactgtgtgtaatatatctttgtaataagcatatacccattttactctattattaatacagctttctaccctgtctagggctaaagttttcat

SEQ ID NO: 2349 - DNA, 2344 bp, Zea Mays
gtgagaaagacgaggatatagggccagccagccaaagagatatacctcgcgggtaggcgccattcctccaattctgacagacgggggttcatcctacttcgctttcgctcgtcgcgcgcctcgcgctcgattgagctcaccttagccagcgtgtactctctccctccggccctccccgattctcaccaggagcgacggcgactccggtgcgccgctgcttgcgagggcgaaggccggcgtgtggcgcgcggctgcaggcgagggcgaaggctggcgcacggctgcaggcgacgccgcctcgcacttgattcaactcgccccttcaattgcggcgacgctggtcgagcgactgagcccttcgctaggtcttcattgggttcttcgtcggcgagaacccgcaccagaaagagaaatattcttgttttgatcagtcaacatcatatctgcatgtacaatgtcttagggacttcccgactgaaaaactttctggagaggtagttgtggtgcgtcttgattcttcacttatcttggggcacttaggaccatgcacttcctcacttgaaagagctttgctaactatcaaatacttgtgcaaagcaagagcgaaagtggccatagccaccagctgggatacaattcttcagtatgataatccagtgactgaatcagttgcctcttttgcaggagaagttgctaattgcaaagatttttctcagaagcttgcttcaggtgccatgatatttgtcaatgattctttctcactgtctcataagattcttgcatcaactgttgggatcacgtgcttctgctatgcgtctcttgctggtttccattttgaagaggagcttatgaaattgataaagatcacggactccacgaggcgcccatatattgccattattggaggcagtaatttcttgagaaaagcacctgctcttcagacgttaacctgtctatgcgatgggttgttctttgttggaaaattatcatttcaaataatgaatggttttggaatgacagtgccctctcaattcatagaaagaaatgcagttaaggaagtactacaaattattcaagttgctagggataggaatattcctatttattatccaacagatctctggtgcttgaaaaatggcgacagtgaaatatcaggggtcatcaactctaccggacaattggctggctggacaccagctgatataggaccatcgacattggagaagatttcttctataattacatcatacaagaagatactgtggattggccctacaaactacggtttgacagaaaaaaattcagttggtggaacacagttgggtgaaatactggaaagtgcaagctctgatggctgtgatgttattttagtgggggatgcagcatgcaaggcagtaaaaagaaaaacagattcctcaccgcaatatacagaatttcaaaagtccactgttgtttgggaattcctcaaaggaaggatattgcctggtatagcagcattggataaatgttacccctaccggattccatggagtactgtcttctgtgaacctacactacccttagtggttgatatcggaagtggaaatggtttgtttctttttcaaatggctaaaagttgtgaaagttcaaatttccttgggtttgagatgaatgaaaagcttgtcattaggtgcctccaaggtatggcttcagatgagaaaaggaacctatattttgtgtcaacaaatgcaacgtccacatttcgttccatagtttcaagttatcctggacggttgactcttgtcacaatacagtgcccaaatcctgacttcaacaaagagcaaaataggtggagaatggtgcgaagaatgctcattgaagctatcgtcgaccttcttcataccaatggacaggtttatctgcagtcagatgtggagtccgttctgctcgtgatgaaggagcagttcctctcctacagcaagggtcagcttgtcacggacggcgatggtggcaactgcatcgataacccgttcggcgtggtatccgactgggagcgccatgtcctcgctcgcggagctcccatgtacagggcgatgttaaagaaaatgtgattccatttcctccgtctctgaggtctgaacattgcattgttttgtcaccatggctgcttcggacatggacaacgttcatggattcactcggttagataaaactctcttcttttcggagaaaactacatgacaaaaaaattgtgtggttaaatcttaaaatcgaatcaatccaatgggagaaacgcatatcttcccaattgtggctatgtcatctgccgccggagaggccgatgtcagacatggtggcaacgctt

SEQ ID NO: 2350 - DNA, 2701 bp, Zea Mays
actcttcctcaacccgccgccagtcccaaatacgcaaacggcaaatcagccgccgccccctcccgacctgcacaggctgcacgcagctcccatctccggctccggtgaccggcgctccccctcctcgcccaggtccagagccgccccctctcgacctgcaagctgcacgcagcggggccagggccagagccgccacccccggtgaccggcgccccgcgcccccagtccccctcccccacggctgacggccccactgccacctgccaggcgccccagccgcctcctctcccggctcactcaccggtaaccggcgtccggccgggacctggacgtgccgcgtgcggcccaacgccccaagcccccaacccaggaatcagcgaccagccgaccacagcagccagcagagaagggaatacgaataaccaaagaagcgaagaacagatagagaaactgataaagagaaaggtagatagatggggaagcgcaagcccatgccttccgccgccgctgctcgaggaccgaagaaccggccaaagaggccaaagtctgtgaagcagggagctgagttacgggagcagaatctccaactgccggaacacgattacgaaaatatagatactgaatctggagcagcagagaccgttcaccgtgataaaaaagcaaatgggatctttcaagacacatcacagagtgatgaagaagaaatagaagacgagtatgatgctcctagtaatgacacgccaggtgatgcgacaaacaatggaaatggttgttttgatgaaacagagatttcatgttcatttcatcgccatgtaagccacgtcataacaaatgaagaagtcaagatgttgatgaagaagaactataaatttaaatgggaaatgcctgctgtgggcattccaaggtccaaatgggttggaacaggtgaaaaagtgcaggaagcatgtgatgatcatcttcatgatgtcaaaggaaagttgagagaccattggcaacatacactgtccgatcatttaaattctcgaatgagcttttactctctttgtaacagttatcgtgacataatgcattgcaataagaagccattttatctgaaaagtaacggtcctgattctagtaccatggacgcatatcttatgcatgctttgaatcatgtgcataggacgcgagatgttgtaattagaaatgacgcaaagcttaggaatgacactgacagagatattacggatgataagacataccttgatcagggttttacacgcccgaaggttctttttttgttgcctctcaaaagttttgcacggcgcattgtgaagagattgatccagctttccccattgccacaaaaggatagtgccatgggacaatttaaaaaggagtttggtgaatcagatgacgaggggatacctgaacatagcacaaaacctgcagactttgacctcctttttgccggagacattgatgaccactttgtttttggcgtaaagttaacaaagaaatctattaagctgtacagtaacttctattcttctgatataatagttgcatctcctttagcgctgaaacgcaaaattgatggaggaggacatgacaagaaggattttgatttcctatcttcaattgaaatagtggttgttgatcatgcggatgtgatgtctatgcagaactgggaccatctggaggctgtgtttgaacaacttaatcagttgccatcaaaagaacatggaaccaatgtgatgcgaattaggccgtggtacttggatcagcatgcacagtactatcggcagacaatactgttaagctcataccttacaccagagattaatgctttatttaacggattatgcttaaattatgaaggaaagattaaaatggtgaccgagtatgcaggagttcttcccaaaatacaacttgaagtgcggcaggtgtatgaaagatttgatgcatcttctattgctgaagctgacggtgctcgttttgattatttctgcaacaaggtatatccaaagatccaggacttggatgagggtgggctgctgctattcgtcagttcgtattttgaatacattcgaataagcaatttcttaaaatccaaggaagcgtccttttgtcgaatcggagagatatatcccgtgcaaggctctggttttttgagggcaagaaaaagatcttgctttacagcgaaagatctcacttctaccaccgatacaagatcaggggaacgaagcatctactagtctattcgttgcctgggagaaaagaattttatccggagcttgtaaatatgctgggcgaatcagaaaaccgcaagtgcaacgtcctcttctctcgtctagaccttctcaagttggagcggatcgttgggaagtcttcggcgcgaaggttgatttcctcggagaagggcatgtttgtcttctgctgatgtagcagcctagcccgtactgtagagcaggcgaatggttttatacattgatccctagcaaatgtacccacagcagggggtcacgttgttgtttgcctgtcaggcaagaatctggaccatgttatgtaggcaaaaaaaaaaaaaaatctgaatcccgtttgtacggctaacattatacttttatgcccctatttgtttccatcaaacttatagattatatagtcacctaatgacttgcttatttgttatcatagtctaggtatgtaaattatatattcc

SEQ ID NO: 2351 - DNA, 2716 bp, Zea Mays
actcttcctcaacccgccgccagtcccaaatacgcaaacggcaaatcagccgccgccccctcccgacctgcacaggctgcacgcagctcccatctccggctccggtgaccggcgctccccctcctcgcccaggtccagagccgccccctctcgacctgcaagctgcacgcagcggggccagggccagagccgccacccccggtgaccggcgccccgcgcccccagtccccctcccccacggctgacggccccactgccacctgccaggcgccccagccgcctcctctcccggctcactcaccggtaaccggcgtccggccgggacctggacgtgccgcgtgcggcccaacgccccaagcccccaacccaggaatcagcgaccagccgaccacagcagccagcagagaagggaatacgaataaccaaagaagcgaagaacagatagagaaactgataaagagaaaggtagatagatggggaagcgcaagcccatgccttccgccgccgctgctcgaggaccgaagaaccggccaaagaggccaaagtctgtgaagcagggagctgagttacgggagcagaatctccaactgccggaacacgattacgaaaatatagatactgaatctggagcagcagagaccgttcaccgtgataaaaaagcaaatgggatctttcaagacacatcacagagtgatgaagaagaaatagaagacgagtatgatgctcctagtaatgacacgccaggtgatgcgacaaacaatggaaatggttgttttgatgaaacagagatttcatgttcatttcatcgccatgtaagccacgtcataacaaatgaagaagtcaagatgttgatgaagaagaactataaatttaaatgggaaatgcctgctgtgggcattccaaggtccaaatgggttggaacaggtgaaaaagtgcaggaagcatgtgatgatcatcttcatgatgtcaaaggaaagttgagagaccattggcaacatacactgtccgatcatttaaattctcgaatgagcttttactctcttgtaacagttatcgtgacataatgcattgcaataagaagccattttatctgaaaagtaacggtcctgattctagtaccatggacgcatatcttatgcatgctttgaatcatgtgcataggacgcgagatgttgtaattagaaatgacgcaaagcttaggaatgacactgacagagatattacggatgataagacataccttgatcagggttttacacgcccgaaggttctttttttgttgcctctcaaaagttttgcacggcgcattgtgaagagattgatccagctttccccattgccacaaaaggatagtgccatgggacaatttaaaaaggagtttggtgaatcagatgacgaggggatacctgaacatagcacaaaacctgcagactttgacctcctttttgccggagacattgatgaccactttgtttttggcgtaaagttaacaaagaaatctattaagctgtacagtaacttctattcttctgatataatagttgcatctcctttagcgctgaaacgcaaaattgatggaggaggacatgacaagaaggattttgatttcctatcttcaattgaaatagtggttgttgatcatgcggatgtgatgtctatgcagaactgggaccatctggaggctgtgtttgaacaacttaatcagttgccatcaaaagaacatggaaccaatgtgatgcgaattaggccgtggtacttggatcagcatgcacagtactatcggcagacaatactgttaagctcataccttacaccagagattaatgctttatttaacggattatgcttaaattatgaaggaaagattaaaatggtgaccgagtatgcaggagttcttcccaaaatacaacttgaagtgcggcaggtgtatgaaagatttgatgcatcttctattgctgaagctgacggtgctcgttttgattatttctgcaacaaggtatatccaaagatccaggacttggatgagggtgggctgctgctattcgtcagttcgtattttgaatacattcgaataagcaatttcttaaaatccaaggaagcgtccttttgtcgaatcggagaggctacgtctcagcaggatatatcccgtgcaaggctctggttttttgagggcaagaaaaagatcttgctttacagcgaaagatctcacttctaccaccgatacaagatcaggggaacgaagcatctactagtctattcgttgcctgggagaaaagaattttatccggagcttgtaaatatgctgggcgaatcagaaaaccgcaagtgcaacgtcctcttctctcgtctagaccttctcaagttggagcggatcgttgggaagtcttcggcgcgaaggttgatttcctcggagaagggcatgtttgtcttctgctgatgtagcagcctagcccgtactgtagagcaggcgaatggttttatacattgatccctagcaaatgtacccacagcagggggtcacgttgttgtttgcctgtcaggcaagaatctggaccatgttatgtaggcaaaaaaaaaaaaaaatctgaatcccgtttgtacggctaacattatacttttatgcccctatttgtttccatcaaacttatagattatatagtcacctaatgacttgcttatttgttatcatagtctaggtatgtaaattatatattcc

SEQ ID NO: 2352 - DNA, 1105 bp, Zea Mays
cgtcatccgcggcgcacgcctccgtccccgccccccagcccgtcgtcgtctctctccaactccatcgtcacccgcgccgcctacgcctgctgcgtcccggatagccccgcggcgccgtccgaccacgaatccggaatcccctcctcgctcgccctcctgcttgatcccgccgcggccgcctcagccgccactcctccctgtccctctagggctgccctgccgctccctcgtatcgcgcaatcggaggcctctccttccgccctccaatgcctgggtcagaggaagcaaaaaacaaactcaaacaacttggtgcagatgaggtgttcacagaaactcagctagacatgaagaatgtcaagagcttgctgggtgctttgccagagcctgcattaggatttaactgtgttggaggaaatgctgcttctctaatactcaagcttttgaagcaaggaggcaccatggtgacatatggtggaatgtccaagagacctgtcactgtccctacttcatatttcatttttaaggatctatccctacgagggttctggctccagaagtggctgaactcagacaaaacagaagactgcagaagaatgattgactacctcttgggccttgtgcatgaaggcaaactcaaatacgagatggagtccatttctttcggcgagttcagcttggctctggagaaggccctgggcaaacatggaagccagccgaagcaagttatcaagttctgagaccagggcgggttagaggatctgagagcatgcgattgccatcgatctgtatgaatgatgaatccaacagttagctatgtcaagtgccagagttttaaatacaaataaagtaaaggcagcaatgtttaatggaattgtgaaatcagcagcttagctatatttgagcgctgtgttgattttgcaatgaaatcagcagcttagctatatgtcaagtaaagggtgcgtcaatttctattgcatctacagtgttattcttttgcagccacagctggtcagctgcagagcgcatcgtaaattctggacatgtcaattcttttgcagccacatgcccacagctacagtataataaacaagcctggaatgcgtag

SEQ ID NO: 2353 - DNA, 1797 bp, Zea Mays
cgtcatccgcggcgcacgcctccgtccccgccccccagcccgtcgtcgtctctctccaactccatcgtcacccgcgccgcctacgcctgctgcgtcccggatagccccgcggcgccgtccgaccacgaatccggaatcccctcctcgctcgccctcctgcttgatcccgccgcggccgcctcagccgccactcctccctgtccctctagggctgccctgccgctccctcgtatcgcgcaatcggaggcctctccttccgccctccaattttatcgcagcagacacttcaatctcgaatgtatcagtttatcgcagcaggcagatggcgccgcagtcccggttgctgccgccgctgttgcaggttcttcgccgctgccgcgcatcgcgctcccacttctctaccgccccctctcttgtctcgccaccatccaaggccgtggtctacgacgagcatggcctgcccgagcaggtgctgaggctggtggacgtaccaccggcggagatcggtgaccgcgacgtctgcgtcaggatgatggctgcccccatcaacccctcggacatcaaccgcatcgagggcgtctaccccgtcaggcccccgctccccgccgccgtcggaggctacgagggcgtgggccaggtccacgccctcggccctgctgtcaccgcccggctgtcaccgggcgactgggtcataccgtccccgccatcgttcgggacctggcagacgtacattaccaagcatgagaacgtctggcacaaggtccgcagcgatgtacccatggagtacgctgccactatcaccgtcaacccattgaccgcacttaggatgctccaagactttgtaaaactcaatcctggtgatgccatagtccagaatggcgctaccagcattgttggccagtgtgttattcagcttgccaaagtacatggaatccacaccatcaacattataagggacaggcctgggtcagaggaagcaaaaaacaaactcaaacaacttggtgcagatgaggtgttcacagaaactcagctagacatgaagaatgtcaagagcttgctgggtgctttgccagagcctgcattaggatttaactgtgttggaggaaatgctgcttctctaatactcaagcttttgaagcaaggaggcaccatggtgacatatggtggaatgtccaagagacctgtcactgtccctacttcatatttcatttttaaggatctatccctacgagggttctggctccagaagtggctgaactcagacaaaacagaagactgcagaagaatgattgactacctcttgggccttgtgcatgaaggcaaactcaaatacgagatggagtccatttctttcggcgagttcagcttggctctggagaaggccctgggcaaacatggaagccagccgaagcaagttatcaagttctgagaccagggcgggttagaggatctgagagcatgcgattgccatcgatctgtatgaatgatgaatccaacagttagctatgtcaagtgccagagttttaaatacaaataaagtaaaggcagcaatgtttaatggaattgtgaaatcagcagcttagctatatttgagcgctgtgttgattttgcaatgaaatcagcagcttagctatatgtcaagtaaagggtgcgtcaatttctattgcatctacagtgttattcttttgcagccacagctggtcagctgcagagcgcatcgtaaattctggacatgtcaattcttttgcagccacatgcccacagctacagtataataaacaagcctggaatgcgtag

SEQ ID NO: 2354 - DNA, 1442 bp, Zea Mays
caaactgatagcctgtccccacatgtcaagcactcaagcagcccttcctgtgctggtactagttgtcgctgctgccctgttgcggcgacgactccgtgactcctagtccctacccagatcggcgcccgacgcaaggccgagcaggcgatggccgcagcggcgtcaatggggcacccttacgcgccagccgagctggaccttccgggtttcgtgccgctgaagctgtcccaggtcgagatcctcgtgtcctacctcggcgcctccgtcttcgttttcctcgccgtctggctcgtctccggaagatgtgtcagattatccaagaccgaccgtctgctcatgtgctggtgggcattcacagggttgacccacataatgatcgaggggcccttcgtcttcactcctgatttcttcaagaaggagaaccccaatttctttgatgaaggaaagagtatagtaagggagactctaggtatgttgctagggacactgcaactgttacggtcgaagggatcaccgctgtattggaaggccctgcatcactacttgctgtctacgctattgcatccaggaagtccttcagccacattctccagttcgccgtctgtctgggccagctctacggatgcctggtttacttcatcaccgcgtacttggacggcttcaacttctgggtcggcccgttctacttctgggcgtatttcattggcgcaaacagcttctggatctggataccgatgctcatcgccataaggtcctggaagaaaacttgcgccgcgtttcaagctgagaaggtgaagaagaccaaataaaagctgtctttagctaccgttttattggagaccgtcattttgatggcttaaattcttgtgttggttggtactggaaactgcatgatgtactctttgctcaaacaaatgaagaccggtttacaaattcaaggaatcgagcgctggggaaaaaacgatttttttgcttaccaggtaaccaagagaaaaacaacaatcagaggaagcatgggtgaacaatcagaagatgaaaacttaaggaagatatctcctcttacttttctgcagaaaggttcagtgcatataggataaatgaaacttataataatttgaaacaaaatttgttatcacgttctcttaatttagaaaatgtacaaaggagtcctggagccgaaaccgttttttttttaacattagagcatctccaagagagactctaaacatgatcctattttaaatatagagctcaaaactataaaacatccttccaacagcggccctattttataaaatttcatcaaatggttatagggctcggtctctcgggtcctaaatatagtacccatatactagagccctatcctcatttccacttaatctccaaccatttatttcctaatatcatgatttatttcttaaatagcattatttaaggcc

SEQ ID NO: 2355 - DNA, 2160 bp, Zea Mays
gcgctctcttttgctctctctatctctctcgtggcaacgactgcgcgagcgccggcgcctacgccaggtgcccaggcctccgtcggtcatttcgccaggcattcgtcgcgggctcttcgccggcgacgagcacacccaccaagagaagcatgaacacggtggcactttccaaccatcaaaaggccagaagcagcagctgtgcacaacatgtgcaaaagggcatacttgtcaatcggtcatcaaccggacaagacaaatgcgagctctaatcgactcaaagaagccttaccaagcacactctgtattcaagcacttaatggatgaggggcacaagccttcattggtcacatacacaattctactgaccgccctgacgaaccagaggatgtttgagtcgattccatcactgcttgctgaagttgaactagctggagttaggccagactccatcttcttcaatgccttgataaatgcgtttgttgaggcgaagcggatgggcgaagcgataaacacattctggaaaatgaaacattctggctgccacccaactacaagcaccttcaacacactgataaaaggttatggcattgtaggcaaacccgaagaatcacagcgcgtcttcgacatgatgggcgttgaaggatcagtcaggcctaacctcacaacatacaacattcttgtgaaggcatggtgtgatcacagaaatcttgaggaggcctggggtgttgtgggcaaaatgcaagcaggtggttttgagcctgatattgtaacttacaataccatagccagtgcatatgccaataatgacgagacatggagagcagaagagctcattgtggagattcagactagagtgcgcaccagtgagcgaacatggggcataatcattggtggttattgccgggagggcaggttggaggaagcattacgatgcgtccagcaaatgaaggatgcaggaagtgttcctaacgtcgtcatcttcaacacactgctgaagggctttcttgatgcaaatgacatggctgctgtcaataagatcctgggtctgatggagaaatttggcatcaaacctgacatcgttacctacagtcaccagttgaacacattcagctcgctgggccacatggctaaatgcatgcatgtatttgacaaaatgatcgaagcaggaattgagccagatcctcaggtatacagcattctcgccaaaggatttgttcgtgctcagcagcctgagaaagcagaagaccttctgttgcaaatgagccatcttggtctctgcccaaatgtcgtcactttcaccactgtcattagcgggtggtgcagcgtggccgacatggagagtgccatgagagtctatgacaagatgtgcaagtcaggcgtctatcccaatctcaggacatttgagactctgatctggggctacagcgaacagaagcagccatggaaagctgaggaagtccttcagatgatgcgggagactggtgtcaagccgaagcaaagcacctactgtctcattgctgatgcatggaaggctgttggtttgactgagaacatcaacaactcaaatggttcccccaatggtccttatgcaatcgagaaattggatcattcaaatgacaattgcaacgtgcgaatatcagaagacaataataacaagctgcagttttttgatgaaagtaatgggcgtgcaatgaatggccgttcacgttccagttttcttcagataacaaatgcactaggcagcagtggtatagtttctgccaaggtcatgaaggctggagaatttccatctgaaagactgaaggctatcaaaaacacatcctttccacaaggatttcaattgttgcatctcgagttttgtaggaagcagcttcggaagaatggtggattctgtagtcagagcatcaactcattcaaaatgggtttctctagcagaggatgcatttattaattcgatgtacacattgggctgaaacttaaacaaaaacaaatctcggtgttccaagtctccgcctatgatgcgggccatttttatgattcagacgcagttcctgcagtgtcaagcatttcaaacgtttaaaaaaaattccacaagcagtttcaaaatacgtgctgtttaaatgcaatagaaactgataagactacacacatgtctaaaaa

SEQ ID NO: 2356 - DNA, 2394 bp, Zea Mays
cttttgctctctctatctctctcgtggcaacgactgcgcgagcgccggcgcctacgccaggtgcccaggcctccgtcggtcatttcgccaggcattcgtcgcgggctcttcgccggcgacgagcacacccaccaaattctcgtgacagtgccttcctggtcgcctttcgttgaagttactgaatctgaaatctgaccatcatgaaccaggttgaggattggtcctttacgagcatgttataatgggagagaacggagttcagctgacactgacctccactttgaagagcacaggcaagccacggatcaatgcggacgggctgaataatggatcacatactaccaaagtaagcatcggaaagcgtagagatatagaggagaagcatgaacacggtggcactttccaaccatcaaaaggccagaagcagcagctgtgcacaacatgtgcaaaagggcatacttgtcaatcggtcatcaaccggacaagacaaatgcgagctctaatcgactcaaagaagccttaccaagcacactctgtattcaagcacttaatggatgaggggcacaagccttcattggtcacatacacaattctactgaccgccctgacgaaccagaggatgtttgagtcgattccatcactgcttgctgaagttgaactagctggagttaggccagactccatcttcttcaatgccttgataaatgcgtttgttgaggcgaagcggatgggcgaagcgataaacacattctggaaaatgaaacattctggctgccacccaactacaagcaccttcaacacactgataaaaggttatggcattgtaggcaaacccgaagaatcacagcgcgtcttcgacatgatgggcgttgaaggatcagtcaggcctaacctcacaacatacaacattcttgtgaaggcatggtgtgatcacagaaatcttgaggaggcctggggtgttgtgggcaaaatgcaagcaggtggttttgagcctgatattgtaacttacaataccatagccagtgcatatgccaataatgacgagacatggagagcagaagagctcattgtggagattcagactagagtgcgcaccagtgagcgaacatggggcataatcattggtggttattgccgggagggcaggttggaggaagcattacgatgcgtccagcaaatgaaggatgcaggaagtgttcctaacgtcgtcatcttcaacacactgctgaagggctttcttgatgcaaatgacatggctgctgtcaataagatcctgggtctgatggagaaatttggcatcaaacctgacatcgttacctacagtcaccagttgaacacattcagctcgctgggccacatggctaaatgcatgcatgtatttgacaaaatgatcgaagcaggaattgagccagatcctcaggtatacagcattctcgccaaaggatttgttcgtgctcagcagcctgagaaagcagaagaccttctgttgcaaatgagccatcttggtctctgcccaaatgtcgtcactttcaccactgtcattagcgggtggtgcagcgtggccgacatggagagtgccatgagagtctatgacaagatgtgcaagtcaggcgtctatcccaatctcaggacatttgagactctgatctggggctacagcgaacagaagcagccatggaaagctgaggaagtccttcagatgatgcgggagactggtgtcaagccgaagcaaagcacctactgtctcattgctgatgcatggaaggctgttggtttgactgagaacatcaacaactcaaatggttcccccaatggtccttatgcaatcgagaaattggatcattcaaatgacaattgcaacgtgcgaatatcagaagacaataataacaagctgcagttttttgatgaaagtaatgggcgtgcaatgaatggccgttcacgttccagttttcttcagataacaaatgcactaggcagcagtggtatagtttctgccaaggtcatgaaggctggagaatttccatctgaaagactgaaggctatcaaaaacacatcctttccacaaggatttcaattgttgcatctcgagttttgtaggaagcagcttcggaagaatggtggattctgtagtcagagcatcaactcattcaaaatgggtttctctagcagaggatgcatttattaattcgatgtacacattgggctgaaacttaaacaaaaacaaatctcggtgttccaagtctccgcctatgatgcgggccatttttatgattcagacgcagttcctgcagtgtcaagcatttcaaacgtttaaaaaaaattccacaagcagtttcaaaatacgtgctgtttaaatgcaatagaaactgataagactacacacatgtctaaaaa

SEQ ID NO: 2357 - DNA, 1668 bp, Zea Mays
ctcttctaatttaaacctctgctgcaagggagcgagagagagagagagaggagaggcacacagcgcgcagagagactagagagagagggtttgtcctcctgcctgccttggcttggctagcttggcctcccctccacctccatcggtgtattacatccgagggcactccatctcttgcgtcccttaacccctccaccaatccaatccaatcccttaaccccgcaccgaatccagacttcgaagcttcctcttcctcccggtcccggccccggccccggccccggagccctgttcttggtacttaggacaagacgctccgagaccctcgagattgagagctcgctcgctcgctcggtgtcttcgccagctgcccaccctccttcctgctcgtccccccgctcgcgcctcctcttcctcggactgatgggcgaccatctcgcgttgatcgtggaccggctgctgacagagtcgacgctggaggcggcgatcggcggtgggaagcacatggtcgatctgcgtcaggagacggtggatgtcgagtactgccatcgcgggctaggcggcggctcggcgaccaaggtggtggagtgcaggatttgccaggaggaggactgggacacctgcatggaggccccctgcgcctgttgtggcagcctcaagtatgcgcatcggaaatgcattcagcgctggtgcaatgagaaaggcgacactatgtgtgaaatatgcctgcagcaattcaggccaggttatacttctccacaacagctgtttcactatggaagtataccaatgaatttcagagggaactgggagattgccaggcaagatctcaatgattcccagataataacaatgatgcccacggagcgtgattttatggacaattacgatgactactttcctatcaggacaagaagcagcaccttgtgttgccggacaattgccataattttcatgtcactcctggtccttcgccacactcttcctcttgtgattggtgacaatggggagtactcattggccttattctcgcttctggtgctgagaactgcgggaatcctctttccaatcctggtgatggtgagagcattggcaagcttccatcatcgacggcggcagcagatcatttaacactgcaggaaagccaggaagcatatatatcttcatcagagagcgaggaggaagaggaagagtatacagttgccaattctgcacaaacaaactactcgcaaccgcgcttcataccagtctactgacatggccaagaacaagccttccaacctcacatctgacagggaattccagcgcctgagtttagctgacagatgcaaggatgaatggatgatcacaaggggggaaattacaaaattgtgaatgtggtgacatagtaagatagcctgaagccactcgcttctatgcccatagagaagaatgtagtggccctgctacttgtacataggagagagtacagcagcagagtgctgacaaacccggatactgtgactcgagtctctactgcagtaacccttgtgcactgctctccccgtctcaaattatttgttatgaccttacgtagtttttgttatgcatctagatatcaactatatctagatacatcacaaaaatatttacctaagaaagttaaataatttataatttgaatttaag

SEQ ID NO: 2358 - DNA, 1763 bp, Zea Mays
agcatacaaaacagctgcagtttcagtgaagctgttgccgggcgatgatacgatatgatatgatgtaataggataccagtgccatttcccacccattaaccttaccttgcctctcttctaatttaaacctctgctgcaagggagcgagagagagagagagaggagaggcacacagcgcgcagagagactagagagagagggtttgtcctcctgcctgccttggcttggctagcttggcctcccctccacctccatcggtgtattacatccgagggcactccatctcttgcgtcccttaacccctccaccaatccaatccaatcccttaaccccgcaccgaatccagacttcgaagcttcctcttcctcccggtcccggccccggccccggccccggagccctgttcttggtacttaggacaagacgctccgagaccctcgagattgagagctcgctcgctcgctcggtgtcttcgccagctgcccaccctccttcctgctcgtccccccgctcgcgcctcctcttcctcggactgatgggcgaccatctcgcgttgatcgtggaccggctgctgacagagtcgacgctggaggcggcgatcggcggtgggaagcacatggtcgatctgcgtcaggagacggtggatgtcgagtactgccatcgcgggctaggcggcggctcggcgaccaaggtggtggagtgcaggatttgccaggaggaggactgggacacctgcatggaggccccctgcgcctgttgtggcagcctcaagtatgcgcatcggaaatgcattcagcgctggtgcaatgagaaaggcgacactatgtgtgaaatatgcctgcagcaattcaggccaggttatacttctccacaacagctgtttcactatggaagtataccaatgaatttcagagggaactgggagattgccaggcaagatctcaatgattcccagataataacaatgatgcccacggagcgtgattttatggacaattacgatgactactttcctatcaggacaagaagcagcaccttgtgttgccggacaattgccataattttcatgtcactcctggtccttcgccacactcttcctcttgtgattggtgacaatggggagtactcattggccttattctcgcttctggtgctgagaactgcgggaatcctctttccaatcctggtgatggtgagagcattggcaagcttccatcatcgacggcggcagcaggaaagccaggaagcatatatatcttcatcagagagcgaggaggaagaggaagagtatacagttgccaattctgcacaaacaaactactcgcaaccgcgcttcataccagtctactgacatggccaagaacaagccttccaacctcacatctgacagggaattccagcgcctgagtttagctgacagatgcaaggatgaatggatgatcacaaggggggaaattacaaaattgtgaatgtggtgacatagtaagatagcctgaagccactcgcttctatgcccatagagaagaatgtagtggccctgctacttgtacataggagagagtacagcagcagagtgctgacaaacccggatactgtgactcgagtctctactgcagtaacccttgtgcactgctctccccgtctcaaattatttgttatgaccttacgtagtttttgttatgcatctagatatcaactatatctagatacatcacaaaaatatttacctaagaaagttaaataatttataatttgaatttaag

SEQ ID NO: 2359 - DNA, 1831 bp, Zea Mays
acaatcccattgactaattcaactcctccctcgccttggtcatctccgccggctcgaggggggtttgtcacgactcacgagtcacaacacgatcaccagtcaccaccacggccaccctcctcttgtatagtcaaaccggccctctcctccttcttgtaaccttgggcaagaggagcagaaaggtcccagctttccgtgttcttctgcttctttccccgcctcgccttccttccccccgtcaccagatctcgaggcagcggagtccggggacgccgttctttccgttgtgcttcctttgcctcttgctgccggtggccggtgattttcccgaggtctgtttgggcggcaggtagaggctattttcttggcggctggtgggatggatagccacgccgccgggtcgagctccggcgggtccggggatggcggcgcgcagcccaggaggagctccaggaaacccacgtattccaagtttactcagcaggagcttccagcttgcaagccgattcttactccaaaatggtattcgttcttgttggcgtgatttttgtctcgattggtattgtttcgctgcgagcttcacgacaggttgtcgagatcgttgatcggtatgatgatgcatgtgtccctgctggtgtgactgacaagcttgcttacatccggaatgatagtataccaaaaagctgcacaaggaatctgacgattacaaaggatatgaagcagccgatttttgtgtattatcagctggatgacttttaccagaatcataggaggtatgtcaagagccgtaatgatgcacagctaagagataaaagtaaggcgagtgactttaccaattgtgatcctgaggccaaaacggtagacggaaaaccaattgtgccttgtggtcttattgcatggagcctgttcaatgatacatataaactcattcacaacaatgtaaccttgagagtggagaagaaggacatctcttggaagagtgacagagaccacaaattcgggagtgatgtcttcccaacgaactttcagaaaggacctcttaaaggtggaaaaacacttgatccaagtattccgttgagtaagcaagaggacctcattgtttggatgcggactgcagcacttccgacattcagaaagctgtatggaaggatatatgttgatctcaaggaaaacgacacaatcacagtccagttggacaacaactacaacacctatagctttggtggcaagaagaagctggtgctttcgaccgcaacctggctcgggggaaagaacgattttctgggccttgcgtacctcaccgtcggcggactctgcttcttcctggcattcgcgttcaccttgctatacttgataaagccaaggaaaatgggagataacagctacctgtcatggaacagacccccttcaggtcgctgatgatgtgctttggaagttaaacgcgatacacaggcagcaccaaacaaattcagattatggtcggaatgtatcttgtaccacagagaaattttatccgtgctcgtcggtgtagaatatatacggcacccttgcacatattgtacattacatcgaaacacatagcttttgttttctacaaaattgtatactcaaaagtctcagaagtggacgccagtagttccatgctttgtttttttgttccccttaataaaacagctaaacctaacctgcatgactgagctatgagatgaacatgagctcttcgtaagtgatcagttctcgaaggctaggcatttgcagaaatttggacttttggattccaaacagtgcgtttcgtgtttttgccattcgtaacacagacttcaaagaaata

SEQ ID NO: 2360 - DNA, 891 bp, Zea Mays
agataagatcgttgtcgtgactcgtgattcgtgaacggcggcgacaagaagccgggagagatgccgctggccacaactgctccgacgccggcgccgccctgtcctccgccgagtccagcagcggcaccagtccggacgcagctcctctcctccgtcgcgaagctcgcgctcacggccgcgctcgtgtgcggctctggcggtcccgctgccgtcgtcgtcgttccggccgccgctcaggccgtcccgttcgtccgtcctcctcctcctcccctgcaaggaaggcccttcgcctcctccactccttacgcgcagtcccagaagctgcagcttggcctcgacaagctcggaaagatcaggccatgcccgtccaccaacccggggtgcgtgtccaccaacccgctgggatcctccggctccttcgcctcgccactgctcatcccggaatcatccgcaggggagaagaccgtcgccaaaagaaattctagctcttcccctttccaaattaaacatagcgtcaatcgtgtgatgctttgcttttgcgtttctcaattgatctcttgctactttgtggtggccggcggcgtacgtacctgctgcaagtcgctgcggcaagccatcgagaagacgcagcgtaatgtggagtttaaggtcgacgaagacactccatatggacactacatcgaggcggagatggacggcggcgtcggccgggacgtgatggagttcctggtgaagaaagacgccggcgtggtggcgtaccggtgcatggccaccaaggtcaccttcgtctaccccttcaccaccgctgtcggcgactccaagggccagaagcagaggatcgcggccatctcgcaggagctcggatggaccttatggcgatgagcatcggta

SEQ ID NO: 2361 - DNA, 2031 bp, Zea Mays
ctggacggtgcattgctatcggggccaggccaaccggcacgtttccgaagcctcacggacgggacgggtcacgggtgcaccattcttgacgcccacccaaatccatggcgagctcgccgcgatctccgccggcgcctacgccggaattcgagatctctcggcagtcccgcctctttgcggcgctgctactgggctatctgcccaatgaccgcgcgctgtggcctgtggctgtgggagcagaggagctggcaaagaagagaggacagtacgctgctttcaaagtttatggccaccaatgcctgactagatagatcctctcccaaaaatagagaccccgaatcctgaatttgctaaagtgcaaacagaaggccccactacaacgtaaatgcagaacatgttcacaatgggttcctgcacaggtcagagtaacccgagaggagcaccctttaagccttgggaagaccagtgcttggaatcagttttttgagtactcggagattatggagcagattgaccgcgatgtaaagcgcgcccaccctgacatgcatttcttctgtagcgactcgtcttttgcaaagtccaatcaggaatctttgaaaaatgcactgttaatctttgccaagctgaatgctggaataggatatgtacaaggatgaatgaaattctggcaccgctctttgtatttcggagtgatccggatgataaaaatgctcgggttcattgttttgtttcgtcgagctggttagtgggtttagagacaacttctgccagaaactagacaacagtgctgttggagttcgagctacactagctgactagccaagttatcacagcttgtagcaaagcatgatggaggtctccaacaacatttggaaataactacagaagttaatccccagttctatgcgttcagatggataccgttaccgctgacccaggaattcaacttcgcagataccattcacattttgggacacagtattaagtgatcgtgatagcctccaggataccttgctcagaattacctgccaacgaacatcagccataacctctactccgccaacaaattgcagtgcaccgatctcttttgcgcccgaagcgctgctgtgtttgttcagccgggtgtggctgagtcccagcagcattgcaaaaggaatacagaactgaacccttgcggcgacggtttatttatcatgaccattaacctgacgccctgcatgttgtagcctgtacatgttcacctgacaacgatttattgcatcccagttaatcaaggtgaataataaattgtatcctgccatgtttacgctacacctgggacacatacaacagaacagaacagaacagttggcggcaatcacacaacacagtgtagatctcaccattgttggtttgctgctgccattcttctgcactgtacggtttcttttactactgctgaagtatcactacagggatagaactgagaacccatgtatggtgcgcgttagtgtccccccccagaattccataccccagaacagtgctgtgttttggtggagggaggaagggggcagcttcggtgacgccgaaaggctacaccgctacgactggccctttgcccctcgttcccagagctgctcagcttcagcttcacagctccagaagtgccggcgcgcgtgccgcttcctccgcattgggcgatgcccagctggctggcagttggagctgcggacggacgcggccgccggcgcagccgcgctggtgcagggtgttgagatcctcaagccggaaggccggaaccggaagttgtccggaaccggtctcggtgcaagtgacaggcgagctgctgcaccgcagcaccgtcgtcgtcgatacgcgcgcatgaatgctcggcgttgtgttgcccggcgtggcgtcagaaacggatcggcgatggagatggagttgcagttgctcggagggtgcaatgcaagcacaaacaaagcacagcacaagacgaagcaagcaacacatgacacatgcatagtggcatacgggtgcgaccgctag

SEQ ID NO: 2362 - DNA, 2236 bp, Zea Mays
gaggatgtcgagcgagttatctccggctcgaacccgtactcctcaagcaaaaccactggaggagcaccaagagttatctccggctcgaacccgagccaggtcctgactcctgatccgcaccgcacacggcaagggggcatcgccgacgggccgtcagcggcgagacccaagccaacacagcccagcgatgtcggcgcgtgaccgcgagacggccgaggcgctggtgcgcctcgccgcctcgctggacggggcggtgctcggcctcggcacggctgccgtcgccgtcgcgtcgtgggtcaagtacctcgccgtctcggggcagctacgcctcgtcgcctccgcggcgacggcctccatcgccgacgcccgctccctcctctcaggcgacggcgccgagccgcggatcgccgcggtgcggggctacgtgcgggcccatgacaagttcttccgggccccgttctcaggcgaggcgggcgtcgtcacgaagcacacccagatgtgtttgttcacagaatggagaggcatctttggatggacctttgatctgcatgctcttcttttcagatcatggaaagagcaaattgtgacgtcttttagatcggttccatttgttctggttagtactgaattaggaaatcctacgggagtggtacatataaatgtggataaggcggatcaaccgttgcctcttaccacagtgtttcataaacttatcccacttgagacgactccttacacattgtttcaaactattattggcaacggctatccgattgcgttgttggatgaagaaaaaatactaccgattggtaagaaaattacagcaataggactatgtcaagcaaaggatgcagaaagtgttgagataacatcgtgcccagagatcccctttttcttatctgaactaaccaaggatgagatgcaagctcagctggcttcacgtgctaggatactcttctggggtagtattgttttgggaaccttgtcggtttgcctagtgggccatgccatttacaggggctggacgagaatcaaactacgaagagaggctaggcatgcacgacagatgtttgaggaggctgaagatgctattcacagggatgactctagtgatgatgatgaaataggagacgggcaactatgtgttgtgtgcttaaggaagagaaggagggcagcttttattccatgtgggcatcttgtctgctgttccgaatgcgcattaacaatagagcgtacacctcatccattgtgccctatgtgtcgtcaagacatcagatacatgatgagggtttatgactcttgagtactactactatgaagaaccccctgagttgctgcgtgtttaatttgttcacagatgagacatctatctgtccattttgtctgaattttaccataatctaagtagcatatgaaatagagttcaggatgaattcgtttgattttatttgcaggtatgctgctgataagatctacacgcttccttgctgacccatgcaaacctgaggagcacaactgttcgtcctgctgggcgttttcctagtcaaggtggcctaccctggatttgtgaatataatgtcttgaccctccaaattatgctcttgattgcctgggacaaatagcttagctgaagtcatgaactaacgtagagttattttttgtttgctttgcgcatatgtctatccatcatgtaaagcacagggtttactgcaaataggttaaagatttggacattttctgccatctgatcgtcacctctagtgctgtggaagaggttgcaaaaaaaaaaatgctgctcgtcgtgatgaacgcaatgctgttcctgctctacggtaacctggcaccagataacagcggtgtcggagccttatgcttgccagcggataacatcgccgaagcgtgaagtcttgttctgatgctggctgcgtggtgtttggtttgctagaacagtggtgtccactctacgccgaatcattgagaaactctagtgttagcaaactgtaattttagaacaggcgtagagtggagtttttaaaactctaaactggctgcctggtgaatgctgttctagcaatactatggttttaaaaaatttattgcatgtataatgctccatgattttgttactgcggatgacgatgatggaaacgaagtcagtgacacttaggtctagttttgcaacacaatttttccaagagatttttaaaataatcttttttttcttatgaaaaaaaaa

SEQ ID NO: 2363 - DNA, 1958 bp, Zea Mays
cccaacaaaatcctcgtccttcgcgtcatctcgacgccacaactctccgagccccgctccgcaatagacccgtaagacgctgtctcgatccgtccccctacctcccccgccgccgacgctcgactcgatacattggagcaggaggcgccgccgccaaaacccaagctaggagtgggagattccgatcctccgcgcgcgcgcgcgcaccatggagccggtgccccggaagcgcaagggcgcgcccccggtgtgctccgccgccaggtccctccaagatttggcctcccgcaagcgcgcctgccgcggctccgtgccgcagcaatcccactgcaccgacgcccccgcccccgctgtggtgatgacggcccccgcggcgagcggcgcgtcggcgtcagcgggggtcctcccggggcgcgggctcaagcggaaggtgggctgcatcgacaacgccacgcggatcgggcggcggaagcggctggagaacgagtacgacctcggcgaggagatcgggcacggcaagttcggctccgtccgcgtctgccgccccaaggcccggacccggggcgaggaggagttcgcctgcaaggcgctgccgaagaacggcggtgacacggcccaccgcgaggtggagatcatgcagcacctctcgggccacccgggcgtcgtcacgctcagggccgtctttgaagacaccgacgccttctacctcgtcatggagctctgccacggcggacggctcctcgatgaggtggccagggagggtaaactctcagagcgccgcgccgccaatgtgatcaaggagctcatggcggtcctcaagtactgccacgagatgggcgtcgtgcatagggacgtcaagccggagaatgttctgctcaccaagtctggaaggttgaagcttgcagattttggattggccgtgcgagttgctgatggtgtgtcaagagtcgaagtggtgctaacttggtagttgcagtcgagttgttgtcatctggaggtagttgttacttccacggagttctggatatttgggttcacagcatcaatagattgacatcatgatggtcaggtcagcaattgactggtgttgctggcagcccggcatatctggcacctgaggttctactaggaaattactcccaaaaggtagatgtatgggctgccggggtgcttctgcatgttctgttgatgggcactcttccgttccaaggaaaatctgtcgaagctatctttgatgctataaagactgctgaacttgactttcacagcagtcagtgggcatctgtgtcactgcttgctcgtgatctcattggccgaatgcttaatcgagaggtctcttcaaggcccgatgccgaagatgttctccggcacccttgggtcttattctacactgattgcccgcagaaagctgaattctctaacctatggggtactaacaaaactgcagctcccatgattcatcaggagatagtcaggtttggttactgcgagtcttcatcttcaaaatcctcaagtgacaactctgaagagcgagatgaatgcggtatagttgacgcactggcgacagcaataacacaggtgaggatctcagagcccaagaggagtcggctgttcagcctacccaacgggttgttgccaccaagcaggaacagtctccgaacatgaagaggatgaatccgtgtgtggctttctaacttgacctacctagctcccatccccatgcatgtataaacgagataaacgagctctgtgattttatagatggaaaattttcaccgtggttgatgttttgcgattgctagctcgctgaggctgcaatcctctgtaaatatatcactgttgtcatcgtttctatacatcgatgatcaccgtaattgattcgattatttaggttttttcctgtggccgtgggtagtgcttgttaaggaatacttatgatcgcttcggattaaagccag

SEQ ID NO: 2364 - DNA, 1865 bp, Zea Mays
caaccgaacaaacaggccagcgctctgtaccggcgtttctcctcctgtctcctccccgctcgcgctgtcgcttcgccgcttcagatccaaacccgcgtattaaaaagcgctccaagcgaccaaaaccctaaccctaatcaccgcaattccccaatcatcggccccgcgcaaaaccctagcccagcgccacctacccgtccctctcgccgccgccgacatggcaggctcatccggcggcgcagcctcctcttcctcctcccgtggcgtgccggagaacaggttctataatcctccccacgtacgacgccaacagcagcagcaggggcaacggccgttgcggcccgcatcaccgtcgccctcgccgcggccggtgcggcagaagccccctccgccggcggcggccgttgccgcgtcggcggatgtggacatccgggtggattccgacgactcttcgtcgacgacctcgtccaagccatcggtggcgtccaccgcggctactgcagcagcgggtgaggtgaatgtggccgtggcggaggcggaggctgggaatttggagaggttcctcgcctccacgacgccctctgtgaccgctcagttcttgcccatgtcaagcctaaggatgcggcgaggtggtgatgctatggattcacgaccttatttctgcctgggagatctttgggaatcattcagggaatggagtgcttatggggccggtgttccacttgtgctaaatggcagtgactctgtgattcagtattatgtgccatatctttctgctatccaactatttgcagatccatcaagacctgcttcaagaaacagtgagagcagcattgagaatgacgttgagcggctaagagtctcatcatcactggaaggtaaacatcgactggaaaatggtggcatacgaagtgatgatggtgaaggcgatgcatcttcaagttttccaatatttcagtatatggagagggatcctccatatggtagagagcctctgacagacaaggtatcaactcttgcacacagatttccagctctgaagacattcaaaagctgtgatcttctgccatcgagctggatgtctgttgcatgattgtgaccctcctacgccagcatgccctggctttgggggaattaaccgcggcacgactgcagctgggaaactatctttgcctatctttgggctggcaccttacaaattacgtgcctccatttggacatctgacaaaactcaagaacgggacctcgtcacctctctgatgcaggaggctgacagctggctccgcagaatacaagtagaccatccggatttccggtttttcgtatcccatttcagtacaacgtggagatgacccgtggctgtaaatggttcatttagtatgaatatggcatagagacacctgagtgcccttttgtaacgggggggaatgtatgagttataagcctgcgtgcataactttttctcttgtctccagtaagctgtatcttttgtaggtttgttttgttgtggggtgaaagtaaagatggatggtggaaaaagcaaaattggaggcattgtggaactgaagtgaaatatggggaaaaaagaataaagatttccagttattagagttgagaaaggtccagtgtttcatgtttaggttacctgagctgcccgtgtgtttggtccatcactcatcggttctacaataaatagaggaaatacaccagaagtacagatactgatcttcgaagtgcagatgttggtcctcttcgttttaacagtgggtttcttcaggtagttttttttaaatagagcgtttaggccttattcaatctgactgttgcaatacaattaggcaaaatcttattcaatctgagagcaa

SEQ ID NO: 2365 - DNA, 1925 bp, Zea Mays
aattggcctggctacccagacaagagcacgcaacgcaagcaactgcgacgtctcccgcccccgccgcgccccggaccttttccgcagatattttttttatccccccacgcccccggctcgttcccttccattccaccacctctcgccagacaacgagatgtgcgaggcaccgcggctcggcaaccgcgccggaggatccccgcgcattcctctgtcctggcctcggcgtcgccggtgctcggcagcatcctggagcgtcgcctgcggaaggacagggagagcggcaagcccgggcggtccgtcgtccggatccgcggcgtcaccgacgacgccgccgcggccttcgtccgcctcctctacgccggcaggtgcggcgaggatgaggatgacgacatggaggagcacgcggtgcaggtgctggtgctggcgcacgcgtaccaggtgccgtggctgaagcgggcgtgcgagggcgccatcggcgcgcgcctcaccgcggactcggtggtggacgtgctgcagctggccggcctctgcgacgcgccgcgcctgcacctgcgctgcgccaggctgctggccaaggagttcgcggccgtggagcgcaccgaggcctggcgcttcctgcaggagaacgacccctggcaggagctccacgtcctgcagcgcctgcacgaggccgacatggaaacggtggacatggtcggacctccgtgtcgcgttcgtgcgcgtacggcgtacgaacgacatgacgccagtgttcttttctatgtggttggtgcgtctgtttgggccggcccgtccacgccgaatggtcgggcgaatgttcgcatctctccgacctcttacctttccgactctgttttgattttacacgttttcatctggctgggggtagacaaatcgtgagaccaagtaatttgtgccttggtttgaccaaagttagcagaaatcttggcggctactccatcagttccatctacaaacattcttcgtagggcttcaaaagtccagcggagaacgtttcaccaataataacgtttgttggaaacaacagttccacgatgcacgtttttttttgtgtaccgacgaccgacccagcctcttagctaaagcactgacccgatgcgcgctcggttccttcctggacatgcagcggcggcgcaagtggcggcggaagcgcgcggagcagcgcgtgtacatggagctgagcgaggccatggactgcctggaccacatctgcacggagggatgcacggaggtcggcccggcggggcgggcgccggcgccggcgccgtgcgcgcgctacgccacgtgccggggcctgcagctgctcatccgccacttctcccagtgccaccgcaagagctgcgcgcggtgccagcgcatgtggcagctgctccgcctccactccgcgctctgcgaccgtaccgaccgctgcaacaccccgctctgcatgaggtttaagcagcaggagcaggataaggcggctgccaagggcggcgatgatggcgacaaatgggggcttctggtgaagaaggtgaagactgccagggtcttctcttctctggccaacaggaagcagatgagcaccaccaccacccagtgctgaggagcagcctgggatgcttaggggtcaaagttagattagtgagagagaatgaagcgagcagtttttttttgggtctgttttgagatgtcagatctcttttgagatatgtacatgtacatgcctactttgtcaccctacgttggtatagctcttttatcgaggtgggagttggtcagccggaagtctatgtaaaaagtgcgcatgtatcattatataataatagggaaatatgagaagtattttagtcttatgatacctttcagtattatggtaccctgacaaaaatgatcaatccaaaacgacacgacgcagaatggac

SEQ ID NO: 2366 - DNA, 2060 bp, Zea Mays
aattggcctggctacccagacaagagcacgcaacgcaagcaactgcgacgtctcccgcccccgccgcgccccggaccttttccgcagatattttttttatccccccacgcccccggctcgttcccttccattccaccacctctcgccagacaacgagatgtgcgaggcaccgcggctcggcaaccgcgccggaggatccccgcgcattcctctgtcctggcctcggcgtcgccggtgctcggcagcatcctggagcgtcgcctgcggaaggacagggagagcggcaagcccgggcggtccgtcgtccggatccgcggcgtcaccgacgacgccgccgcggccttcgtccgcctcctctacgccggcaggtgcggcgaggatgaggatgacgacatggaggagcacgcggtgcaggtgctggtgctggcgcacgcgtaccaggtgccgtggctgaagcgggcgtgcgagggcgccatcggcgcgcgcctcaccgcggactcggtggtggacgtgctgcagctggccggcctctgcgacgcgccgcgcctgcacctgcgctgcgccaggctgctggccaaggagttcgcggccgtggagcgcaccgaggcctggcgcttcctgcaggagaacgacccctggcaggagctccacgtcctgcagcgcctgcacgaggccgacatggtacgcacgcttttttttcttcttccatggattgctaccggaccggaccggaccggaccacggtcggtcgatgtaaatctgactgacacatgcttgcacgcaccgcaccgaatggaagtgcgagtgcgaagaaattatcatgcatgcatgcatgatggcgcacgccggcggggtggggtgggcactggggagcatgctttctttaccgtcaagcttttgttccaggaaacggtggacatggtcggacctccgtgtcgcgttcgtgcgcgtacggcgtacgaacgacatgacgccagtgttcttttctatgtggttggtgcgtctgtttgggccggcccgtccacgccgaatggtcgggcgaatgttcgcatctctccgacctcttacctttccgactctgttttgattttacacgttttcatctggctgggggtagacaaatcgtgagaccaagtaatttgtgccttggtttgaccaaagttagcagaaatcttggcggctactccatcagttccatctacaaacattcttcgtagggcttcaaaagtccagcggagaacgtttcaccaataataacgtttgttggaaacaacagttccacgatcggcggcgcaagtggcggcggaagcgcgcggagcagcgcgtgtacatggagctgagcgaggccatggactgcctggaccacatctgcacggagggatgcacggaggtcggcccggcggggcgggcgccggcgccggcgccgtgcgcgcgctacgccacgtgccggggcctgcagctgctcatccgccacttctcccagtgccaccgcaagagctgcgcgcggtgccagcgcatgtggcagctgctccgcctccactccgcgctctgcgaccgtaccgaccgctgcaacaccccgctctgcatgaggtttaagcagcaggagcaggataaggcggctgccaagggcggcgatgatggcgacaaatgggggcttctggtgaagaaggtgaagactgccagggtcttctcttctctggccaacaggaagcagatgagcaccaccaccacccagtgctgaggagcagcctgggatgcttaggggtcaaagttagattagtgagagagaatgaagcgagcagtttttttttgggtctgttttgagatgtcagatctcttttgagatatgtacatgtacatgcctactttgtcaccctacgttggtatagctcttttatcgaggtgggagttggtcagccggaagtctatgtaaaaagtgcgcatgtatcattatataataatagggaaatatgagaagtattttagtcttatgatacctttcagtattatggtaccctgacaaaaatgatcaatccaaaacgacacgacgcagaatggac

SEQ ID NO: 2367 - DNA, 1269 bp, Zea Mays
  misc_feature (1269)..(1269): n is a, c, g, or t
tctccccaactaagcctatctctctctctcttctctcccagaccttccctccggccagcctcaatctcccgcgtgagctcctcgaacgcacctctctcgatccgactgacatggccggcgcccagtcctggaggacctacctgtgctgcgtgggcggcagcgcggcggtcgaggacgacggctcgacgctgcggcggcggcggaggcgcggctgcggcggcggcagcagcaaggacagcccgaggtcgtcgtcgtcgcggatgtcgctcacgagcctcggctcgtcgtcggagacgctctcccccgaggacctgtcgctgacgctgtccgggtccaacctgcacgccttcacgtacgccgagctgcgctccgccacggccagcttctcccgcgccaacttcctcggctgcggcgggttcggccccgtgtacaggggcgccgtcggcgaggccctccgcccgggcctgcgcgcgcaggacgtcgccgtcaagtacctcgacctggagggcggcgcgcaggggcacaaggagtggctggctgaggtgttcttcctcgggcaactgaggcacaagaacctggtgaagctcatcggctactgctacgaggccgagcaccggatgctggtgtacgagttcatgagcttcgggagcctggagaaccacctgttcaaaagtgagctctttttttcctgcttctggtcgcctcgcgtgctagcttggtcgattttttttttgagcccaacaagcaaagcctccggtttccgttgcttctgtttaaagtcgtaggactaggtgagctctgtaatgtgccttctggaggagcaaaatatttttttgcctagtagatgctgtatacgctgccaggtcgcatgcctacacatgcacaagccttggtcaatgccggggaggaagtaaatactcacatgaaacgtccttgtcgctgcaggtaccaacggcgccctcccatggatgacgaggatgaagatcgccgtcggcgcggccaagggcctcgccttcctccacgacgctgacccgcaggtgatctaccgcgacttcaaggcctccaacatcctgctcgactcggactacaacaccaagctgtccgacttcggtctggccaaggacgggccacagggcgacgagacgcacgtgacgacacgtgtcatggggacgcacgggtacgcggcgcctgagtacatcctgacgggccacctaaccgccaagagcgacgtgtacagcttcggcgtggtgctttctagagctgctctcn

SEQ ID NO: 2368 - DNA, 1604 bp, Zea Mays
ctagtagtaggtagtagtagaggagaacagccactcagccagccccctttacttgcacacaatagacaacctcgaacagaaaagaagcagttttgccgtccgagatgagccgccactgtgtgactctccttgtgatcatctttggattactgcagatggctgtggctctctactctaatccaagttcaacgcacccgaactgcacggagagatgtggcaacgtcagcatccaatatcctttcggcttcggatccggctgcttccggcagcccgatttcagcctcacctgcgacggcggcggcggcggcaaccagccgcccaagacctttctgcatgacggcatcaccgaggtcttgcccgattccggtgtcacggtgggtctgtcaaggcttattgatgtagccatttcccacaccatctttatggcacctggtattcctagttacaacttctcgtggaatctcagttctttcactatgttggatggctcattcaacgtaactgggtgtgacttcgatatatatcgtcaagaaccgggcaagaatggttccataccgcggtgtacaaatagctgcccccaaaacatcaccgagacggtggccagacagaactgcaatggaaccgggtgctgccgtctttacgttggagaagttgttcctgatttccagctgaaatttgtgctccacaataatgacactagaggtgatcatgatgctctttctaatggaagcaccctgtggaatacaataaacattaccagcaactgggcccaaatcttatgggatatagatgatcaaccgacatgctccagagcgaaggacaaaaatataaactacgcatgtgtcagcaactacagccattgctttgacgctgaactgtttgatattggttatagatgtggttgtaacagcggttacgtaggcaatccctatgtagttgatggctgcaagcgtgacgaaggatatagtccaaatcaactgaaggaaaactgctcgaggtcctgtggtaatatcagtgttccatatccctttggtttagaggaaggttgctctgcaaggaagctatttaaactcaactgcagaaatgcgacagcgtctatgctccaattcgatgacgaccgtgttgtggcgtttataaatgttgcagagagtctcgtgggcatcaggtttacctcacatttcgaagatgatcagcttgggatatatgtaccaggtgaacccgatctctttatgggtcttggggaatcagtggtctcaatgcactgggcagctgccaatcttacatgcgacgaggccctgaaaaataaatcacaatatgcatgtgtcagttcaaacagcaaatgtttaggagtcaattcaaaggatggttatattggatacagatgcaaatgcttagatggtttccaaggaaatccatataccatcagtgatggttgtgaaggatgacaaagccgagtccgaagccaaagagtaagaagacgaagccgaagtttagtggatgacgaagtcaaagccgaagccaaagctcaatggacactaatgaagcttgaatagataactataggaaaaactctaaaaacccttgtaataacctttgtaaagaac

SEQ ID NO: 2369 - DNA, 1713 bp, Zea Mays
ctagtagtaggtagtagtagaggagaacagccactcagccagccccctttacttgcacacaatagacaacctcgaacagaaaagaagcagttttgccgtccgagatgagccgccactgtgtgactctccttgtgatcatctttggattactgcagatggctgtggctctctactctaatccaagttcaacgcacccgaactgcacggagagatgtggcaacgtcagcatccaatatcctttcggcttcggatccggctgcttccggcagcccgatttcagcctcacctgcgacggcggcggcggcggcaaccagccgcccaagacctttctgcatgacggcatcaccgaggtcttgcccgattccggtgtcacggtgggtctgtcaaggcttattgatgtagccatttcccacaccatctttatggcacctggtattcctagttacaacttctcgtggaatctcagttctttcactatgttggatggctcattcaacgtaactgggtgtgacttcgatatatatcgtcaagaaccgggcaagaatggttccataccgcggtgtacaaatagctgcccccaaaacatcaccgagacggtggccagacagaactgcaatggaaccgggtgctgccgtctttacgttggagaagttgttcctgatttccagctgaaatttgtgctccacaataatgacactagaggtgatcatgatgctctttctaatggaagcaccctgtggaatacaataaacattaccagcaactgggcccaaatcttatgggatatagatgatcaaccgacatgctccagagcgaaggacaaaaatataaactacgcatgtgtcagcaactacagccattgctttgacgctgaactgtttgatattggttatagatgtggttgtaacagcggttacgtaggcaatccctatgtagttgatggctgcaagcgtgacgaaggatatagtccaaatcaactgaaggaaaactgctcgaggtcctgtggtaatatcagtgttccatatccctttggtttagaggaaggttgctctgcaaggaagctatttaaactcaactgcagaaatgcgacagcgtctatgctccaattcgatgacgaccgtgttgtggcgtttataaatgttgcagagagtctcgtgggcatcaggtttacctcacatttcgaagatgatcagcttgggatatatgtaccaggtgaacccgatctctttatgggtcttggggaatcagtggtctcaatgcactgggcagctgccaatcttacatgcgacgaggccctgaaaaataaatcacaatatgcatgtgtcagttcaaacagcaaatgtttaggagtcaattcaaaggatggttatattggatacagatgcaaatgcttagatggtttccaaggaaatccatataccatcagtgatggttgtgaaggtcgggaggtctgatgccttgttaatggaaaatgggtcgcgtgctcatgttcttggtgttggtacggtcattcttaagtttacctcgggaaagacagtgccattgaagagcgtgtagcatgtgccctctatcaagaagaatctcgttagcgtttctatgctatgttgagatggatacaaagttgttcttgagtctaataaatgtgttgtgtctaaacatggtatttttgttggtaaaggatatgactgtggaggtttgttccgcttatcactg

SEQ ID NO: 2370 - DNA, 1377 bp, Zea Mays
gtttggtatggtttggtttgggggaggaaatagcctgcctgatccaagaacgcccattgcttgagcaagggacggcggcggcggcggcggtggatcatggaggcccagctgttcctcgagcgaagcgagcgcaagcactgccaagaaaagcagagctgaccggccgtcgtcgaagcggagcgccgaacgcgctcgccgagggaggaataatttcgacctagcacgcctgacagaagtgcaagattacaggatcttcgctgcgacgtggaacgtgggtggcaagtcaccacccagggggctaaatctagatgaatggctccatacttctccttctgccgatatctatgtcttagggtttcaagagattgtccctttgaacgcgggaaacgttcttggcactgaagataaccttccagccaagaagtgggtgtcccttatcaggcggacgctgaacaagaatcctggatctagtggctgtggtggtggctaccatacaccctcaccagtcctggatccggttgtcgagttagacgccgacttcgaggggtctgcgagaaggcaggacaacttctcattcttccaccgtcggtcgttccacaatctcagccgtagcttaagaatggacggggacttgatgttcccgcagccaaggctagatcgcaggttcagcgtctgcgatccagtcaacctaggaggcagaccaagcgattttgatggaagtctgcgttgccccggatcacctgatgaggatacaatcgatatggaaatgggtgacagcgtacaagtttcaccattccctcatagctacagtgcatctgcaccttccgaacagaacgatgaccaatcaaacagctccaggtattgcttagttgccagcaaacaaatggtcggcatatttctcacggtctgggtgcgcaatgaaataagagacgacgtcaggaacttgaaagtctcttgcgtgggtagaggattgatgggttatctcggaaacaagggttcgatttcagtgagcatgtgcctgcaccagacgagcttctgcttcgtatgttgccacctgacctcgggggagaaggaaggcgacgagctgcgcaggaactccgacgtcctggagatcctaaggaagaccaggttcccgcgggtccgcggcgccggtgacgtcaggtcacctgagacgatcctcgagcacgatcgggttatatggcttggggatttgaactaccggatcgccctgtcttactgctcggcgaaggctctcgtggaaatgcatagctggaagcagttattggagaaagaccagttatttcagaagtggagggcttaaaaaatttattccttgcgacggcacacctttgagcttacctcttctgaaactgaaac

SEQ ID NO: 2371 - DNA, 2768 bp, Zea Mays
ctcttccctccctgggggtttgggcgacaaggccgagagagagagaaaaaaaaaaggtggaggagagacaaggccaaagcaaagcagccagcgcgagcaggggaggtagagagagagagaaaaaaaagagcagcgccacgaacagaacaacaagcctcgcctcactttctctctcctccaccatccctttttttctctctctctactctctccccttgtcgtcctccggccctctccgcattcctctccccctgccacctcgtgtcctactactccaactcctagcacccccaccccacctccccctgtattctctctagtagtagcaactagcaagtgctacggggctacagcctacaagtagtaggccttggtacccagccgacgaatcccggctcccgcgtcgtcctagaggccggctaaagctggcgaggagggtggcggcgcggcggcagctgcactgccggcaggagagagcttctcggcctgcgccgtttgctgctccccactggtcgttggagggctggcggttccgccctctggaaaaaaaaaaaaaatccaatcttggctcggctcggctcgtggcggccggctgcctgatcgggcctcgccccgtggctagttcgatctgagattcgaagaccacccccgggtgaaaacctctccgcctctgaggagtggatcctggattcgagtcttcccgctgcagggagatcgcggcttgaggaggtacggtggtggtggtggcggcgcggcgacagatccccctatgcgccgcctgccgtgccgtgtgctgagcgcggagcaggagctatgagacaatgacggaagaaagcgccaagaagagcaagctttcgtggtccaagtccctcgtcaggaagtggctcaacatccggcccagggcgcaggacttccatgccgatttcgacgccggccaccaggcaagggacggcggcggcggcggcggtggatcatggaggcccagctgttcctcgagcgaagcgagcgcaagcactgccaagaaaagcagagctgaccggccgtcgtcgaagcggagcgccgaacgcgctcgccgagggaggaataatttcgacctagcacgcctgacagaagtgcaagattacaggatcttcgctgcgacgtggaacgtgggtggcaagtcaccacccagggggctaaatctagatgaatggctccatacttctccttctgccgatatctatgtcttagggtttcaagagattgtccctttgaacgcgggaaacgttcttggcactgaagataaccttccagccaagaagtgggtgtcccttatcaggcggacgctgaacaagaatcctggatctagtggctgtggtggtggctaccatacaccctcaccagtcctggatccggttgtcgagttagacgccgacttcgaggggtctgcgagaaggcaggacaacttctcattcttccaccgtcggtcgttccacaatctcagccgtagcttaagaatggacggggacttgatgttcccgcagccaaggctagatcgcaggttcagcgtctgcgatccagtcaacctaggaggcagaccaagcgattttgatggaagtctgcgttgccccggatcacctgatgaggatacaatcgatatggaaatgggtgacagcgtacaagtttcaccattccctcatagctacagtgcatctgcaccttccgaacagaacgatgaccaatcaaacagctccaggtattgcttagttgccagcaaacaaatggtcggcatatttctcacggtctgggtgcgcaatgaaataagagacgacgtcaggaacttgaaagtctcttgcgtgggtagaggattgatgggttatctcggaaacaagggttcgatttcagtgagcatgtgcctgcaccagacgagcttctgcttcgtatgttgccacctgacctcgggggagaaggaaggcgacgagctgcgcaggaactccgacgtcctggagatcctaaggaagaccaggttcccgcgggtccgcggcgccggtgacgtcaggtcacctgagacgatcctcgagcacgatcgggttatatggcttggggatttgaactaccggatcgccctgtcttactgctcggcgaaggctctcgtggaaatgcatagctggaagcagttattggagaaagaccagagatacggacgagttttccagggctggaaagaagggaggatctacttccctcccacgtacaaatactctttcaactcagaccggtacgccggcgagggcaggcaccctaaggagaagcggaggacgccagcatggtgcgaccgcatcctctggcacggcaacggcctgagccagctgtgctacgtccgcggcgagtcccgcttctccgaccaccggccggtgtatggcatcttcctggcggaggtcggcgtcgtgcgccagcggaggaggaacaacgccgggtacttcggatctagggtcgaggtggaggagctgttgccgcgctctcggagctatagactgagagatgatgaagttttgctgagctgacttatagcatgatataatagaaggtaagctaacttgtgtgtgtgtgttttttttttttgtgtgtgtcactgataagtagtccccaaatgataccacagcttgcactctctgatctggctgccaaatctcgaggccctgcagagataatatgccctctgcgctttgttgactttgcgttcattttttttcttctgtttccctgttggcaagcgttggctttttact

SEQ ID NO: 2372 - DNA, 1082 bp, Zea Mays
gttacaacgctttaccacctcagtagcgcttaaaaggcgcttaagcgcctttttaataacactgctactttgtgaaaggaaaaatagttttgagatccaccagtaagatttccaataaactatttcttgaaaaatgtggcatgaccacacttcaataaacatatcttgtagtctgtgtactgtggttactagtgaaacagctcatttttgttcttcctttttaaatacagcacacatctggagataggatattcatattgtgttcgtatcaaatgcacatgacccatcacccatctggagtgcacatattaaatctggacccttcgttcaacaattcagcaatcaatgactgaaagaggatgtaaagggaatgcaggtagagctaatggcccaagctaaaagaatgaatcatgattatcattcgaggcaattcctttatcatatttcatctgctgtattctccaagtgacattttcactgatgtatgctcgataactccaataaaggcataaagcgagagatgctacagctttgttgaatgcaaacaggtttgctcgtgttgaattattgtaaggccgcgcatagcagagcgtgcatatgttgaattattgttgaatgcaaacattgttttgtaccgtagactatattgtttacagagtagagtttgaaatagattagagtttgaaatagagtaaagtttgaaatagagtagagtttgaaatagtgagtaagataggagatgagatagagaggctgctggagatagcctatcgtattacaagtgcagaaacttgctccagcttgcttgggacaaaagaatctgatgccatttttgttgttattccagaacagcacaactcaactatcagggtttttttatctggttataagctgttgttttgtactgagatttcattgttcacttgaagaaacccttgctgggagagcagaatgcatggtgctgtttaagtgatcccgtgttatatttactcatgtagtcatggcatacatgtcaagtatgctggttgcttttctgctgtccggcgtcatgttctaaattaatatatgtagtgatatttctg

SEQ ID NO: 2373 - DNA, 1290 bp, Zea Mays
tggcccgcacaaccgtttccgcgtgggacacgaacgcagcgggaaagagaaaaaagtagaaaaagcgaaaagcctagtagcacaaggctacaagcctacaagcaaccgcgtccgcgtgtggagcaaggaaggcgaggggagccgagcgggcaaccggcggcgacagacatggcggagcagcacaaggaggagtcgggcgtgacagtgctggacaagatctccgacaagctccacgggcgcgggggcggctcgtcttcgtcgtcggactcggacgacgagcgctcgtcggcgacggccgccgtgaaggccaagatctaccgcatcttcgggcgcgagaagcccgtgcactccgtcctcggcggcggcaagccggccgatctgtttctatggaggaacaagaggatctctggtggggtgctcgcaggcgcaactgccttctggctgctgtttgaggtcatggattaccacctcctcaccctgctatgccactgcctcatcctcaccctggccatcctgttcctctggtccaatgccacgactttcatcaacaagtgattgcaggactgtggatcctttctgttcttgggagctgctgcaatttcctcaccttgtcttacatagtttttatggtactgtacactgtaccggtcctgtatgagaaacatgaggataaggttgatgcttttggtgagaaggccatggtcgagctgaagaggtactacgccatcttcgacgagaaatgcctatcaaagattccgaagggcccattaaaagacaagaagcaacattagaagcttagaatcagataagggtctgcggtgatttatcatctcttttgaccattattcgtcggttttggtggatggatgtgattccatgtctaaatacctggacgtgctctagtgttttagtgtggtcagtagcaatgttctaaattatctgagattacgctgaatcatgttctgaagtccacgtttaacgttgctctccctatcctttggaagtggcaatttcctcaatgtctgtaatatatctagtctagtgctatttcttaatctgacctagcgtcatgatgaacccttcttggatatttatttatttgtgccactggacatggtaattagagagcacgtaaattgtacatttgccatcatactcattagacgtgagacgtgttagtgtggtatcgatgcttgcactggagatacgatgctcaataacgccaagtttagaaaagtagcccttagagcatcttcaacaatatatagggttctattcagaaaaaaaaaa

SEQ ID NO: 2374 - DNA, 1116 bp, Zea Mays
tggcgatagtcatcacaaatgttcttctagtgttgcttaatgcacagtcacatatatgtcacctgagagaattcgtaatgagaactattcttatgctgctgatatttggagtcttggactaacaatattggaatgtgctactggaaaattcccatatgacgtaaatgagggccctgcaaatctaatgttgcagatacttgatgatccatcaccaacaccaccagtagatacttgttcattagaattctgctcattcatcaatgattgcttgcagaaagatgctgatgcaaggcccacatgtgagcagaggtatgcaggaactgaagtggacttggcagcatatgtcaaaagtgtagttgacccaacagaaaggctaaagcaaatagctgagatgcttgctatacattactacctcttgtttaatggacctgatgggatttggcatcatatgaagacattctacatggaacaatctactttcagtttctcagagaacgtgtatgttggccagaatgaaatttttgatattttgtcaaatataaggaaaaagctaaaaggtgataggcctcgagagaaaattgttcatgttgtcgagaagctacattgtcgtgcaaatggtgaaactggggttgcaattcgtgtgtctggatctttcattgtgggaaaccaatttcttgtatgtggcgaggggataaaagctgaagggatgcctagcttggatgagctctctattgacattccaagcaaacgcgtaggccagttcagagagcagtttatcatgcaaccgggaaacttaatgtcatgctattacatatcaaagcaagatctgtacattatccaatcctgattgaacatattatttgtaagattattctctgaagcacatgtatagaggatttagaagaattcctttcggacctggttttgaatcttatttactttgtggaactgaaattttgggccaaacctctgacaagaattgaaaagtttaagtcttcaactatattcatgtttagaactgtttttatatttggttggtattgataattttcgttttgtcgtgaggtcccaggaggatgtgtgatttgagtaatggctgaaatttatcatttttta

SEQ ID NO: 2375 - DNA, 1135 bp, Zea Mays
tcttggcgatagtcatcacaaatgttcttctagtgttgcttaattgtgctacctttgtaggcacagtcacatatatgtcacctgagagaattcgtaatgagaactattcttatgctgctgatatttggagtcttggactaacaatattggaatgtgctactggaaaattcccatatgacgtaaatgagggccctgcaaatctaatgttgcagatacttgatgatccatcaccaacaccaccagtagatacttgttcattagaattctgctcattcatcaatgattgcttgcagaaagatgctgatgcaaggcccacatgtgagcagaggtatgcaggaactgaagtggacttggcagcatatgtcaaaagtgtagttgacccaacagaaaggctaaagcaaatagctgagatgcttgctatacattactacctcttgtttaatggacctgatgggatttggcatcatatgaagacattctacatggaacaatctactttcagtttctcagagaacgtgtatgttggccagaatgaaatttttgatattttgtcaaatataaggaaaaagctaaaaggtgataggcctcgagagaaaattgttcatgttgtcgagaagctacattgtcgtgcaaatggtgaaactggggttgcaattcgtgtgtctggatctttcattgtgggaaaccaatttcttgtatgtggcgaggggataaaagctgaagggatgcctagcttggatgagctctctattgacattccaagcaaacgcgtaggccagttcagagagcagtttatcatgcaaccgggaaacttaatgtcatgctattacatatcaaagcaagatctgtacattatccaatcctgattgaacatattatttgtaagattattctctgaagcacatgtatagaggatttagaagaattcctttcggacctggttttgaatcttatttactttgtggaactgaaattttgggccaaacctctgacaagaattgaaaagtttaagtcttcaactatattcatgtttagaactgtttttatatttggttggtattgataattttcgttttgtcgtgaggtcccaggaggatgtgtgatttgagtaatggctgaaatttatcatttttta

SEQ ID NO: 2376 - DNA, 2801 bp, Zea Mays
tcacgcaaccaccactgcctcacgcaaccacctcagcccggtccacctctaccaccggccacccactgcctccacccccgccctagatcaccaccgcactctcaggcgcaagaacgagctcaccaggcaaagtcacggcggcgacctccgccttccaggtctcgcccttgctggcgcgcgcctctgctcaccacccagcgccgcgtcttccttctccagtccggtcgctggccgaccgccagcgcggctccgggccctgctttccgcacgcccaagcctgcgcgctccggacgcacctctcctgctcttctgggcttgggaaagagaagaaaccagcataaaaacactagatctgtgaaggatttgaggaagaaaccaaaccgaaaccctagtgacgatgctagagttcggacctcgctctgagtcgaaacgaccagagaccgctgccttccctccccattttcctttcccatgaaccaagcagcgtatgagctttccatccctcctcatttacctatcccacctctcatatcccgttatccaaacggcacctcagggtactgcaatccagaagcaggggccctggcctcagcgcacctggatggcagggctggaggagttgaagaagaagctacaacccttgctgttcgatgacctggacagagttggcgccagtaccagggtgcccttaccagaagatacttgcgattcctacgcagtttctgatggtgggactgttaatttacttagtagatccttgggtgagtataaaatcaatgagcatggctttcataaacgaagtgctgggccagacgagttagattctgatgagaaggcttaccgttgtgcctctcatgagatgcatatatttggtcccatcggtaatggtgcaagcagtgtagtggagagagctatatttattccagttcatcgaatcttggccttgaagaagataaacatattcgagaaggagaagaggcaacaaattctgaatgagatgagaacattatgtgaagcatgttgttatcctggtttagttgaattccagggtgcattttacatgcctgattctggacaaataagtatcgctcttgaatacatggatggtggttccttggcagatgttataagggtcaagaagtctataccagaaccagttctttcacatatgctacagaaagtattgcttgtatggatcttccatgtcttttcaatccatatctgtagtttctagacattagtaaaagccatgatatggctttctgtatatttgacttggtacattcttctgtttataattcaaaagggtctgcgatacttgcatgaagtaaggcatctagtgcatagagatataaagccagcaaatttactggtaaatcttaagggcgaggcgaagattacagattttggtgtgagtgctggtttggacaatacaatggctatggcacagtcacatatatgtcacctgagagaattcgtaatgagaactattcttatgctgctgatatttggagtcttggactaacaatattggaatgtgctactggaaaattcccatatgacgtaaatgagggccctgcaaatctaatgttgcagatacttgatgatccatcaccaacaccaccagtagatacttgttcattagaattctgctcattcatcaatgattgcttgcagaaagatgctgatgcaaggcccacatgtgagcaggtaaagataattagggtatgatgattttcgtataatttcagttgggtagatagggtttcttttttttttctcgaaaacgcaggaatgtagataaagtttcaatatatacatctatcataacttggtctcttagacagttttgatttaatcatagaatgtcaaattgcgattttcccaataatttcagcatgtcagtgaactcaaatagattatgttttgttccattattactttgattacactgaatacgatttgcagcttctgtcacacccattcatcaagaggtatgcaggaactgaagtggacttggcagcatatgtcaaaagtgtagttgacccaacagaaaggctaaagcaaatagctgagatgcttgctatacattactacctcttgtttaatggacctgatgggatttggcatcatatgaagacattctacatggaacaatctactttcagtttctcagagaacgtgtatgttggccagaatgaaatttttgatattttgtcaaatataaggaaaaagctaaaaggtgataggcctcgagagaaaattgttcatgttgtcgagaagctacattgtcgtgcaaatggtgaaactggggttgcaattcgtgtgtctggatctttcattgtgggaaaccaatttcttgtatgtggcgaggggataaaagctgaagggatgcctagcttggatgagctctctattgacattccaagcaaacgcgtaggccagttcagagagcagtttatcatgcaaccgggaaacttaatgtcatgctattacatatcaaagcaagatctgtacattatccaatcctgattgaacatattatttgtaagattattctctgaagcacatgtatagaggatttagaagaattcctttcggacctggttttgaatcttatttactttgtggaactgaaattttgggccaaacctctgacaagaattgaaaagtttaagtcttcaactatattcatgtttagaactgtttttatatttggttggtattgataattttcgttttgtcgtgaggtcccaggaggatgtgtgatttgagtaatggctgaaatttatcatttttta

SEQ ID NO: 2377 - DNA, 1832 bp, Zea Mays
cctgtcagcctcgtgttccccctctcgttccttctgcctgcctgccatagcacggcggctccacaacccctggcggcctggccttgtgcttcgtgcgtgcctacccccctataagtacgcggcaccgtctcgcagacaccttgcagaaccatcactagtgagtagtagtgagtgacctgcaaagacacgcgaggcacgcagagctggagcagctgatctgagaaccaggaattaggatggcgatggagaaaggctggaaggcgagagacgctgctggtgctttcatgatggacttggagctggtggccgaggaaaccgacgacgcggtgccgtcgataccgccaccgcagacgccgctggagcccatggagtacctctcccggtcgtggagcgtgtcggcgtcggagatttccaagattctcctcggtggaggcaagaagagcagcgttgcggcggcgagccggcttccggaggtgaccataccggagcagtctgcgctcgccaccacgtcctccgtcgttcctctaccgtgtcatcagcagaactactgcaaaacatacaaacagagagccgcaagaaggtcttccacgagcagcggccaccaccaccagtcgatcggcaagtggttccaggtccaccacagggaaacacgccgggcgaagcagagcagcaaggagaagcagcgcgccgagaaggcccacgtgcacgccatggtgtccgtggcccgggtcgctgccgccgtcgccgccgtcgcgtcggccacgagctccaacgcccaggctaccactaccaagatggcgacagccatggcgtcggccaccgagctgctggcctcccactgcgtcgaggcagctcagcacgcgggggcgcgccacgaccaggtggccgccgccgtgcaggccgcggttggcgtcagaagccccggcgatctgatgacgctcacggcggccgcagcgaccgctctgcgaggagcggcgacactgaggcagagggcgcagcgagagacgaggagcaacgcgagcatcctgctcccgtacgagaaagccgcgaattcgtggagcccggacatctggtgcaaggagggggcgctgctgaaacgcgcaaggaaagggggtttgcacaagataagagtatgtatctacatcaacaagaggtcagaggtgatactgaagctgaaaagcaaacacatcggaggcgcgctgacaaagaagaacaagagcgtggtttacggcgtatacagcgagcttccgacgtgggctgagccagggaaggactgcatagaggagacatgctgctgctttggcctcagcacggcgcagggcctagtggagttcgagtgcgagggcaacgcgagcaagcaggagtggatcgacgacgtgcagaacctgcttcgtcaggcggctctgcatgaccgagtaggggataaactgggattagtaaaactcagctagtgcagtctcagtatataaccctctttcatggtagcagcagattgctgtgtcctgctgctcctgcatcagcgatgcgaggggtacattaacatatattggtcgtactcttgtcactgacatgctatacaacatctatagtgatagacatacggaatatattagtatatgttttgtaaagggccggagcagacaatcaaaatcgttgggaggacgctgatcccagtttattttttagaaaaaaaaaaacagctagcccgagttttaattaagttcggttaggcctagaggggtggacgttcggtcttcaacccatcagctgttcggactaattattcacgatcggaatttcgtagcattgtatctaacactgtcatatcataa

SEQ ID NO: 2378 - DNA, 981 bp, Zea Mays
caggcgtgcgatggcgccattgtgtggcctggcttccgttccgcccgccgaggccagtgtggcaggcagctcccgcgcgagcgcgagcgcgatccagaggctggcgcacctgcgtcactcgctccgcgctgccgcgatctcctctgacgtcgaagtcgcccgggggatgacacagggggaaggggtggtgtgggaggggtgaacaggagctcggtgacttttgtgagggccgccagatggaggagcgccggctcgacacgccggcgatgaggagaatcagcgagtggattctttcactagagttcccaagcgatattaccatccaggttggggaggcgaccttcaacttgcacaagctcccgttggcatcgaggtgcggctacataagggagcaggtgtcggggatcaatggctccagggtcacccacatcgacatcacgggcttgccgggcggcgccgcggcgttcgagctcgtcaccaaattctgctacggcgagaacttcgagctcacggaggacaacgtcgccatgctgcggtgcgccgccgagcacctgcagatgaccgacgacgacagcaggggcgggaacctggccggcaggaccgaggcctacctggaggccgtggcgctgatgagcctcgcgggcgcggtcaccgtgctccggaggtcggaggacctcctcccggtgtccgaggaggtggacctcgtcggcaggtgcgtcgacgccatcgcctacttcacctgcaacgacagtcagttcagcatgtccaacggtaacggcatggacgtgtcgtcgtccaaggtcatcatcgatgattggttggctgacgagctcacgtcgctgcggattgacacgttccagagagtcgtaattgccatgaaggcgagggggttcaagggcattgctctgggcacgctcatcatgctctatgcgcagaagtcgctgcgaacgctgctgataatttgctgagcttgtgttgcag

SEQ ID NO: 2379 - DNA, 2109 bp, Zea Mays
ccattgtcatcgctcagtcacagaggcagccactgccgacgggcgacggccgacggcctcccatttcgatcccctcctactcctatgctgcggtccagcataagttcgggacttccggcaatccgccggcgcccgtcggctcaaatcgcatctaccgcggctagaagctctctcttcctccctccgatccggggagcggcagtgagaagggagggaattaaggcaagatgttcatcgagagcttccgcgtcgagagcccccacgtgcggtacggcccgacggagatcgagtcggagtaccggtacgacacgacggagctggtgcacgaggccaaggacggcgcctcccgctgggtcgtccgccccaagtccgtcaagtacaacttccggaccagcaccgcggtccccaagctcggggtcatgcttgtggggtggggaggcaacaacgggtccacgctgacggctggggtcattgccaacagggaggggatctcatgggcgaccaaggacaaggtgcagcaagccaactactacggctccctcacccaggcttccaccatcagagtaggcagctacaacggggaggagatatatgcgccgttcaagagcctcctacccatggtgaacccagacgaccttgtgtttggaggctgggacatcagcagcatgaacctggcagatgccatgaccagggccaaggtgctggacattgacctgcagaagcagctcaggccctacatggagtccatggtgccacttcccggtgtctatgatccggacttcatcgccgctaaccagggctctcgtgccaacaatgtcatcaagggcaccaagaaagaacaggtggagcagatcatcaaagatatcagggagtttaaggagaagaacaaagtggacaaggtagttgtgctgtggactgcaaacactgaaaggtacagcaatgtatgtgctggtctcaacgacacaatggagaatctgctggcatctgtggacaagaacgaggcggagatctcgccatcaacactatatgccattgcctgtgtcacggagggggtgccgttcatcaatgggagcccccagaacacttttgtgcctgggctgattgatcttgctatcaagaacaactgcctgatcggtggtgacgacttcaagagtgggcagaccaagatgaaatcggtcctggttgattttcttgttggtgctggaataaagcccacctcgattgtgagctacaaccacttgggaaacaacgacggcatgaacctgtctgcccctcaaacattcaggtccaaggagatctccaagagcaacgtggtggatgacatggtctcaagcaatgccattctctatgggcccggcgagcatcccgatcatgttgttgtcatcaagtatgtgccgtatgtgggagacagtaagagggctatggacgagtacacatcagagatcttcatgggcggcaagagcaccatcgtgctgcacaacacctgcgaggactcgctcctcgccgcaccgatcatcctcgatctggtgctcctggctgagctcagcaccaggatccagttaaaacctgagggaacggacaagttccactccttccacccggtggccaccatccttagctacctcaccaaggcaccactggttccacccggcacaccggtggtgaacgctcttgcaaagcagagggcgatgctggagaacatcatgagggcttgcgttggcctggccccagagaacaacatgatcctggagtacaagtgagcgaagtggcgtggcctgcagctagatatggaggaggctgcacgaaggggactagagaggcgagattagctgtggaattgtgttggcttctcgtgttttcttttgcgttcttttcctggtcatcgctgtggcgcttttgtattttatttgttggacccgtaacactatcagggctctgctattagcgcttgaagcctgtaatggcattggcatcgtatgataatgtgatcgagggtgctagttcccctaagcattatttatataagttcaaatggcggcccggcccggtccggcctgagcctgagcccgctgtggcctggcacgaattgggacaggcccgttacgtcac

SEQ ID NO: 2380 - DNA, 2442 bp, Zea Mays
gttgacccggcagacgacacgccaccagcaccaaccatccggcgagagcgagatggagaccccgccgcggggccggtggccgccaggcttccgcttcagccccaccgacgaggagcttgttctctacttcctgaagcgccggatcgcctccggccgcccctctccctacgtcgccgacgtcgaagtgtacaagtcacacccctcccacctccccgagaggtcggcgctgcagacgggggacaggcagtggttcttcttcagccggatggaccgcaagtaccccaacggctcgcgcgccagccgcaccactggcgacggctactggaaggccacggggaaggaccgcttcatctgcggcggcggccgggcggttggcaacaagaagacgctggtgtaccaccatggccgcgccccgcgcggggagcgtacggactgggtcatgcacgagtataccctacttgccgatgcgctcccgcctgctgcgcagggtcgggagttctacgcgctttataagctgttccagaagagcggggccgggccaaagaacggcgaacagtacggtgctccctttcgagaggaggattggttggatgacgacgatgagagagtgattgcgggtgcagccgctaatcctgttcctaacaccaacagcccaccatctacaatggaggagcatgcaattactgaccgtgagcttccgattgagggtcttgatcaaccactgtcagattttggaaatgatccggagttgttttctgaagcacagcctgtttcttcccatggtcaaggtcagggttggctcagtgaggggggtgacaaagctgaggtcgtggatgcttccattagcaatgatgttgtggtagtagcagagaacacctgcactgatatctctcttggggatattgagcagtttctcatgcaaatatctgatgatcagcaaaacgatgaattgttctcagatttatcaacaccacttccaaaattgcagttccagtgcgatgatcgtcaggtttggcttgatgccgaaatgggacatgaagtttatgctgcggatcctactgccagcagtggtgctgttgtaactgcagaatgcactgtcacagaacttccacttggagatcttgaagggcttctgctgcaaatagccaatgaccagcacatggtcgaatcccaatcagatctttctgcaccaactccacatcataacttcaatcaggaaagcacattttgtgaaccacggactgaaccaagtgatcaatttccacagtctaatgtaaccaatttgccatttagcggagaagcaaattcttctgaagggaccagtgtggcacattctgtgtcaggtttgatcagttaccacagtcaagatgctgatgaagagttccttgaaatcaacgatttctttgatctggaggatgtaggtcagaatgcaaattgtatgacaactgagtacatgatgtctgcaacaaatgggatgtttgacaatttggaatactctgatgcttcttcgtttctacctgggtcatttgacacagttggattggtagctgaaaatcaatattttgataccgattacagtggaattcaaaaccagggatatcaaaatacaaccgaagtaaggacatataatcaggctgctcttactgtgcggagccatatgaagcatgatcatgtagtcttatcctcgcatgcatcaggcactctgaatatccatgcggcaaatgagctacataaccagagctccacatcttcacaatcatggttcaatgcggctctatcagccttgttggactctgtacctagtagtccagcattagctgctgaaatcgaaaacactgttatcaacagaacactccagcgcatctctagcttccgaccacatcaaactgcaggtgaagaaaacacttttatcaacagaacacttcagcacatctctagcttcaggtcacagcaagcaacaggggaagaaccaggcacccctagtattcaggttaccagaggtggcaggctgatgttcatatctctactggttatacttgcttctgttatatggacctttacttcaggctccgccctcaacttttgcaagggtttatggaaatcctcttctacgtgacagattaagtgggaacctggtgaccttgtcctctgtaaattttttggtcctcggtaccatttatggtttgaatatcatttccctttcaaaagggtgaagaggtagaaacattttgagggtggtaatatgattataggttgtagagcctatttaaaacggtaaaatgcaagggggaaaagcatatctgatggtaatatttgaaactaatgggttactgttctcatttgtattttgacagatatatgtactgaatgcaattaacctattaatatagcttcagtttctgtgcataacatcataatagcattaggggaaagaaaattcag

SEQ ID NO: 2381 - DNA, 1414 bp, Zea Mays
cacccctcctccccccgagtatattagtttactcgctgcctgtgttccaaaacctttcgtcttttcccccgtctacaaaggcttgacaggcactcgcagccccaggcagagagactccttccctgcgaaggcttctcctctcccctatcccccccccccccccccccccccaactcgtcgcattctcctcggttcagcagcgacgggatggcgatagaccacgcggcgcgtctcggactgacgagcagagggaggcggcgggtgcggagacgacgtcgacgccgagaaccggcggtggccgccgtggctgaagccgctgctgtgcacgagcttcttcgtccaatgcaggatccacgccgacgcgcacaagagcgagtgcaacatgtactgcctcgactgcatggacggcgcgctctgctccctctgcctcgcgcgccaccgcgaccaccactccatccagatacggaggtcgtcgtaccacgacgtgatccgggtgtcggagatacacaaggtgctggacatcgccggcgtgcagacgtacatcatcaacagcgcgcgcgtggtgttcctcaacgagcgcccgcagcctcgcccgggcaagggcgtcaccaacacctgcgaggtctgcgagcgcagcctcctcgactgcttccgcttctgctccctcgggtgcaagatagtgggcacggcgcgtggttaccgtcccaagaagaagcacggcggcggaggcggcggcggtaacaagaggaagagagcggcgcttaaggacgtgcgctctgactcggaggagtcgtgcaccagcaccagcggcgccagcagcgacaagagcagcgtcgtgcagagcttctcgccgtcgaccccgccgccggcctccgctagctaccgccgcccagggaacaagcgccggaagggcgtcccgcaccggtcgcccttcggtagcctcatcgtcgagttctaggactccttcgtcagcgcctaggcaatgcgctctctactgtacaggacatgacaaagcccggaagggaagggaataacaggacgcgcttctggacgtggaggccggccggcggcgcaaatgccagcgacgggcgagagcggtaagcacacaccagcggtgcagcccgtgctgctatagttttgcttctttttcgcgctttgttacttcagttggtactaagttttgcagccttgtacattgtaatatactagtactactctccaatgctagatgtacatatacatacacagtgttggcagtatcataatgtgggggtagcagtaggcagcgaggtgtgttcgtatgcgcatcatcagctgtgtaataaaaataaagaaatgcttgctccaaatcatgccggaatggcaccgttggtcgcgctcccccggcattcgctgctgctggactgctactact

SEQ ID NO: 2382 - DNA, 2293 bp, Zea Mays
agcccagtccgaggtgctggaggctattcagctgttttggcttggcttgtggccggtgagaggtggacacgacgacggtgacggtgaggtggagagcggagtggcggatcgtggctccgatccacaagggacggctccacacatcgggttcctgcctctgctcagcagccatgccggtgaggcggcggcagccgcgtcggccggagacgggtgcggcggagaggtacagggagatggggatcggggctgcgctgtcgcggccctgggactatcccacggcctgcggcgagcttgcagcgctgctgcgcctcggatacgcggacctccctaaggcagcccaggcgctcgttgcctccgacgtgctactcgcgtttcgcctccttcccgatgtgcagacaggatatgcagtaagcacagctaatgttcttctccaagcagtagaagttgctctaccaaagcaaaagaaggcgcaggctgtttcagagttcaagcactctattattgcacataaaaggcgtgcaagagtccaacaaatttcaggttcaccacacataccacaagatatacttgtccatatcttcagtttcctggacatgcattctttggtagcagcaggtcttgtctgctggtcttggaattcagcggcaaatgacaacaaactgtggaagatgaattactcgattttctttggcctcagccatttgagttgcaacaacattcctgtatctggtgtgcaatacagcacgaattcggtgccaaattatccaaactttagctggaaggagtccttccacactaagtatgcagaatgcgcgtcatggaaatttgtatcaaatagagcactatgtgcgcattgcagatcagttatttggctgagcaacctcacatgtgcttctccacaccattgccctaagaatagacaccatgaagttcttattataccacacgggcgaaagggcctctagcctagcggttaaggacttccgagtagcacctccaagtcctgagttcgattcctatcgggagcgaattttcagacttggttaaaaaaatccccttgctatgccccatccgctctcgggttgtgatgtcctgtgcgccacccttcggttggaccgttgcagagtggacagttgacgccagcccgttagtgatggggagctagggtccggggattttctcggccgggaccattgtttcggtttcttcttatatggaataccgggagggcggtctttccctccctgaccgagtttttattataccacaccgttaactatatagtctgtctgatcagctatagaaatttattcgtgtaataatcataatttgttttgtcttttcatcgggtatgtattcactgaaccttctgcttaaccaagtcctggatcaggttgctaaatacatattgcgcgttgaagatctagcagcttcatcatctgaaagtgatgacacagatgactcagattatgagaattggcacccaagattttgggcgctataggacaatgatattcggattgtgactatttatgtcctcgattctactagtttgctgtatttagtatgtagcaactacaaacatcatacgaatggaacacattgtatattgtattgtctattgtagtcttggtacaactatatttaggagaagcaactgttgggttgatttcatttagggcgtcgagctagggagcgtggtgccgagcgaggagagggacgccgccgcgccgggagctaggcgctggggagcagggcgcaacaggaataacgacgacgatggtgtggtctacagaggttcttggtttggaaacgaccgaccaatgctaatagtgctcaacggctgatgggagactagcatgatgtgatctgcaggagctaacaggtacatatgtgctactagtgctcaatagctgaaacgaccgtgcaaactactgtgatgtggtgtgtaggagcaggcgttgccaaatagatacagttgctgctactacatgcactgccagtgagtgatgactgatgaagcaatgctactgcagaaaccgatacagacaatcagacataaaagaccgtgctagcgaaaccagtgatcactctttattccgagtttctaatgagtgtttggtttgagaaatgatatagtccatcatcttctcactccttattttttttatttggtttgtataatggagtgagttaatctatcatcacctcatttctcatagttagttgtttagtactaatatgtggaatagagttatcccaccaaatttgaggaatggacctatgatacacc

SEQ ID NO: 2383 - DNA, 1782 bp, Zea Mays
gttttaatttgcctgtaccttttgagcaataagcaatctcatcatgttattaataaaaaagttagcccacatttggaatggaagcccaaatcagtaagccccagcactgctgcacctcctggtgctccatcacctgttgatgatggaagtaaaacagaagtgtctgctttgtctaagaagctttcacatgctaatgtatcacatgaacatgtcattataccggagcacatcaggataccagattctgaaagaactcatttcatcttcggttcttttgaatctgaaatttatccaaaggcttctttagcagcctattatgatgctgtggctaaagaagacttgaatgatcactctccatcaagcgtggcagcattgggtttcacatcaactgatgggactcttaatgataggatggataatgttggttcctgcagtccacttccacagtcagagcctgctgtttcagtttctgaacatgagcagtcattgacggagtgtgtggatgttcggagccctggtgttgtcggtggaacaaatgagacgatttcaagcaaggtaacacattctcaacctcgactccagcatcaggaagctgcacagaattttaaggcatatgagccagattctggttatgggatgtcatttattactaaagttgatggtgaagcagcccaaggtatagcttattcatctgaggctatggttttacattctgtaaatggctatcagttacctgcatctacagcaactcaacaaccagtgccccagatgttttctcaacaattccaagcacctcagtatccaaactttttgccatatcggcatgttttctcaccacagtttgggtctctaatggttgttccaaactattcaagcaaccatgcatttcctcagttgccacatgccagcagctatctggtaatgccaaatggagcctcacaactagctgccaatggcatgaaatatggatcaaaccatcagtataagcaagtatttcaaggagcccctgctggatatggctacggaaatcataatggttaccctaacggtgttattggcggcacaggtgctattgaggatatgaatatgagtaaatataaggacaactgcctctatgcacccaatccacaggtggaaacagcagatgtatggattcaaagtcagaaagagagtcccaatatgccatctgcaccgttctacaatatggtgggacaaccagtgtctccacatgcagcatacttaccaccacaaagtggccacactgccttcagtcccgccccttcccatcctggtcacttgcagtacccgggctttgtgcatgcactgcagccaacatccatgaccatggtgcagaacccgcagaccatgatacatcagccggctgcaccgccattggcaggaaatctaggcctggacatgtcggccatggttcctggaaatcaagtaggagcgtttcaacataaccagcttgcccatcttggctggaccacacaatccttttgagattttggtgtgcttctatggctggataagtgaaatttcggttccgtgtggatagaacctaattgaagtgatatgctgtaatatgcaggataggcctgatgaataccaggtttttctttgttttaattataaaaggggaaccgttttttcgtgccgttgtgatttgcaagaacgtgtttaatgttcacttccagtttttgttccaaaattttgttgtaagtgctagtttggaaactcaaattctctttcgggattagaatgaccctacaatctccaatc

SEQ ID NO: 2384 - DNA, 1877 bp, Zea Mays
cgtcatcctagggccaaggaaacgccaccgctccagtcatatccccgccgcccgcgccgccgaaggccgaaccctcgtcgcctcccctgcccacgcccgccgcctccagcaggaccacaccgccggattcgacttttttgtcctcgccctctccccctcctctcgtctcctttgatggcgtcgaggggaggctcctccggctttatcgagtattttcataacagcacaaagcgtcatggcagcaatagagagaacacaagtcagcaaggcatgaatgctatcagggtgcaaaaagaaatgaaaaaagaatgggcaagacctggaagagttttcaatagaaatattactagaggaggctactctcgaagttcattgcctgtaccacatctgttcattatgtcgttatcctgtttctgaagctcaaccaaaaagcttgctgcccaacaccacttggttacttgcaatgttaatgggcatggagcggcccatgctgacaatggtatcaaaattgcggctcaagcccatgacaaggaagtcaagccttctattgtccgaaaaatggaacaatatgaagggacacaagcatcattggttggatctcatgcagttcttggaaagggcaaccagaacacggtggacactgcagcatcagggaaaaataattttggtggcgaactttgctgttcttcatcagatccaatccatgtgccctctcctggttctaaatcagctggaacttttggagccataaagcgtgaagttggagtagttggtgctaggcaaaggccagctgatagtgcagcaatatacacatctacttctaatggcttagtcaaagtggtatcagcaccaaaggttagcccacatttggaatggaagcccaaatcagtaagccccagcactgctgcacctcctggtgctccatcacctgttgatgatggaagtaaaacagaagtgtctgctttgtctaagaagctttcacatgctaatgtatcacatgaacatgtcattataccggagcacatcaggataccagattctgaaagaactcatttcatcttcggttcttttgaatctgaaatttatccaaaggcttctttagcagcctattatgatgctgtggctaaagaagacttgaatgatcactctccatcaagtccacttccacagtcagagcctgctgtttcagtttctgaacatgagcagtcattgacggagtgtgtggatgttcggagccctggtgttgtcggtggaacaaatgagacgatttcaagcaaggtaacacattctcaacctcgactccagcatcaggaagctgcacagaattttaaggcatatgagccagattctggttatgggatgtcatttattactaaagttgatggtgaagcagcccaaggtatagcttattcatctgaggctatggttttacattctgtaaatggctatcagttacctgcatctacagcaactcaacaaccagtgccccagatgttttctcaacaattccaagcacctcagtatccaaactttttgccatatcggcatgttttctcaccacagtttgggtctctaatggttgttccaaactattcaagcaaccatgcatttcctcagttgccacatgccagcagctatctggtaatgccaaatggagcctcacaactagctgccaatggcatgaaatatggatcaaaccatcagtataagcaagtatttcaaggagcccctgctggatatggctacggaaatcataatggttaccctaacggtgttattggcggcacaggtgctattgaggatatgaatatgagtaaatataaggacaactgcctctatgcacccaatccacagccttttattttccgtgattgtca

SEQ ID NO: 2385 - DNA, 1949 bp, Zea Mays
cgtcatcctagggccaaggaaacgccaccgctccagtcatatccccgccgcccgcgccgccgaaggccgaaccctcgtcgcctcccctgcccacgcccgccgcctccagcaggaccacaccgccggattcgacttttttgtcctcgccctctccccctcctctcgtctcctttgatggcgtcgaggggaggctcctccggctttatcgagtattttcataacagcacaaagcgtcatggcagcaatagagagaacacaagtcagcaaggcatgaatgctatcagggtgcaaaaagaaatgaaaaaagaatgggcaagacctggaagagttttcaatagaaatattactagaggaggctactctcgaagttcattgcctgtaccacatctgttcattatgtcgttatcctgtttctgaagctcaaccaaaaagcttgctgcccaacaccacttggttacttgcaatgttaatgggcatggagcggcccatgctgacaatggtatcaaaattgcggctcaagcccatgacaaggaagtcaagccttctattgtccgaaaaatggaacaatatgaagggacacaagcatcattggttggatctcatgcagttcttggaaagggcaaccagaacacggtggacactgcagcatcagggaaaaataattttggtggcgaactttgctgttcttcatcagatccaatccatgtgccctctcctggttctaaatcagctggaacttttggagccataaagcgtgaagttggagtagttggtgctaggcaaaggccagctgatagtgcagcaatatacacatctacttctaatggcttagtcaaagtggtatcagcaccaaaggttagcccacatttggaatggaagcccaaatcagtaagccccagcactgctgcacctcctggtgctccatcacctgttgatgatggaagtaaaacagaagtgtctgctttgtctaagaagctttcacatgctaatgtatcacatgaacatgtcattataccggagcacatcaggataccagattctgaaagaactcatttcatcttcggttcttttgaatctgaaatttatccaaaggcttctttagcagcctattatgatgctgtggctaaagaagacttgaatgatcactctccatcaagcgtggcagcattgggtttcacatcaactgatgggactcttaatgataggatggataatgttggttcctgcagtccacttccacagtcagagcctgctgtttcagtttctgaacatgagcagtcattgacggagtgtgtggatgttcggagccctggtgttgtcggtggaacaaatgagacgatttcaagcaaggtaacacattctcaacctcgactccagcatcaggaagctgcacagaattttaaggcatatgagccagattctggttatgggatgtcatttattactaaagttgatggtgaagcagcccaaggtatagcttattcatctgaggctatggttttacattctgtaaatggctatcagttacctgcatctacagcaactcaacaaccagtgccccagatgttttctcaacaattccaagcacctcagtatccaaactttttgccatatcggcatgttttctcaccacagtttgggtctctaatggttgttccaaactattcaagcaaccatgcatttcctcagttgccacatgccagcagctatctggtaatgccaaatggagcctcacaactagctgccaatggcatgaaatatggatcaaaccatcagtataagcaagtatttcaaggagcccctgctggatatggctacggaaatcataatggttaccctaacggtgttattggcggcacaggtgctattgaggatatgaatatgagtaaatataaggacaactgcctctatgcacccaatccacagccttttattttccgtgattgtca

SEQ ID NO: 2386 - DNA, 2373 bp, Zea Mays
agttgggaatgggaattgttaatgccagggcctagatatttaatagtattttcataacagcacaaagcgtcatggcagcaatagagagaacacaagtcagcaaggcatgaatgctatcagggtgcaaaaagaaatgaaaaaagaatgggcaagacctggaagagttttcaatagaaatattactagaggaggctactctcgaagttcattgcctgctcaaccaaaaagcttgctgcccaacaccacttggttacttgcaatgttaatgggcatggagcggcccatgctgacaatggtatcaaaattgcggctcaagcccatgacaaggaagtcaagccttctattgtccgaaaaatggaacaatatgaagggacacaagcatcattggttggatctcatgcagttcttggaaagggcaaccagaacacggtggacactgcagcatcagggaaaaataattttggtggcgaactttgctgttcttcatcagatccaatccatgtgccctctcctggttctaaatcagctggaacttttggagccataaagcgtgaagttggagtagttggtgctaggcaaaggccagctgatagtgcagcaatatacacatctacttctaatggcttagtcaaagtggtatcagcaccaaaggttagcccacatttggaatggaagcccaaatcagtaagccccagcactgctgcacctcctggtgctccatcacctgttgatgatggaagtaaaacagaagtgtctgctttgtctaagaagctttcacatgctaatgtatcacatgaacatgtcattataccggagcacatcaggataccagattctgaaagaactcatttcatcttcggttcttttgaatctgaaatttatccaaaggcttctttagcagcctattatgatgctgtggctaaagaagacttgaatgatcactctccatcaagcgtggcagcattgggtttcacatcaactgatgggactcttaatgataggatggataatgttggttcctgcagtccacttccacagtcagagcctgctgtttcagtttctgaacatgagcagtcattgacggagtgtgtggatgttcggagccctggtgttgtcggtggaacaaatgagacgatttcaagcaaggtaacacattctcaacctcgactccagcatcaggaagctgcacagaattttaaggcatatgagccagattctggttatgggatgtcatttattactaaagttgatggtgaagcagcccaaggtatagcttattcatctgaggctatggttttacattctgtaaatggctatcagttacctgcatctacagcaactcaacaaccagtgccccagatgttttctcaacaattccaagcacctcagtatccaaactttttgccatatcggcatgttttctcaccacagtttgggtctctaatggttgttccaaactattcaagcaaccatgcatttcctcagttgccacatgccagcagctatctggtaatgccaaatggagcctcacaactagctgccaatggcatgaaatatggatcaaaccatcagtataagcaagtatttcaaggagcccctgctggatatggctacggaaatcataatggttaccctaacggtgttattggcggcacaggtgctattgaggatatgaatatgagtaaatataaggacaactgcctctatgcacccaatccacaggtggaaacagcagatgtatggattcaaagtcagaaagagagtcccaatatgccatctgcaccgttctacaatatggtgggacaaccagtgtctccacatgcagcatacttaccaccacaaagtggccacactgccttcagtcccgccccttcccatcctggtcacttgcagtacccgggctttgtgcatgcactgcagccaacatccatgaccatggtgcagaacccgcagaccatgatacatcagccggctgcaccgccattggcaggaaatctaggcctggacatgtcggccatggttcctggaaatcaagtaggagcgtttcaacataaccagcttgcccatcttggctggaccacacaatccttttgagattttggtgtgcttctatggctggataagtgaaatttcggttccgtgtggatagaacctaattgaagtgatatgctgtaatatgcaggataggcctgatgaataccaggtttttctttgttttaattataaaaggggaaccgttttttcgtgccgttgtgatttgcaagaacgtgtttaatgttcacttccagtttttgttccaaaattttgttgtaagtgctagtttggaaactcaaattctctttcgggattagaatgaccctacaatctccaatc

SEQ ID NO: 2387 - DNA, 2959 bp, Zea Mays
aattccgtgccgtccctcgcttcttgtgggccacgaatctagggtttatgcatggcttctgaccctcccggagatggcaccagtggtgaggagacggcgccgggccctgcccccgccgtggaggcgccgcctgctcccgccgttccggccaggtcgcgctgggccgctgagatcaaggtctacacccgtaagcacccccgcaaaaaccctaaacctcctccagaatcagcggctgaccccgtttctgttccttccccggctccgaatcccctttctgaaaccttatcctcgattcgccgctccatccaccgcacggaggcggtggacgctgcggcgctgtccgatccggcagcgccggcctcggttcccacccgggcgccgtctggggaacgtggcgccgcctctggggatccctcgtctgggctgaaccgggtcggcggcggtattcctaacggccacggcgacgaccgggcggccgccgctgctgtgaaagctgagaaagcacggaaacgcaggttaaggagtgagctgcggcgctgtctggcaggagagctcgaccaggtccgcgtgctctccaggcgactgaaggaggctgccgaggccctggcgcaacaggaggcttctgagcccgtgcctttgcctttgatggtgctgccaacacagcagcaggtggtggatgctgggtatgttcagcaccagttcttggctggtgatatggcggtgcccatgcctactcagattgcagctgccgttactcctgcccgctcgctgctgcatcgcagaccactaaccgtgtcagttgttcataatgaagcctttgagaaggagaaacggacgccgaaggccaatcaattgtaccaaaattcagagttcttgcttgccaaggataggattcctccctcagattcacatgtgcgcaagaaacccaagcaccacaagaagaaacataggtccctagaatctcgtggcgcagactttgatgccgagcggcgcctgtactctcatgcgttcaagaagtcctcatcacttctgagccgcttaatgaagcacaagtttgggtgggtgttcaacaagcctgttgatccagtcacacttggtttgcatgattattttactattatcaagcacccaatggatcttggcacaataagggggcggctgagccgtgggcagtacaggaaccctaaggagtttgctgaggatgtccgtcttactttccataatgcgatgacatataatcccaagggtcaggatgtgcatttcatggcggagcagttgttaggaatctttgaggcacagtggcctgagattgaggctgaggttaactacctcgcatcatgtcctccattgccgaagaagtttcccccgccaccaattgacctgcgcttcctagagaggtcagattcaatgagacaccatgtggcattggacaccaattcaagaccgatcagtcatactcccacttatacccgaactccgtcaatgaagaaaccaagagcaaaggatccaaataagagggacatgacaatagatgagaagcgtaagcttagtgagaacctccagaatttgccgccggtgaagcttgatgctgttgtgcaagtcattaagaacaagaacttatcagtttgtgtcgaactacaagaagaacctgagcaagcaaaagagaaaggccgagcgagcgatgcttgcccgacaagatgcagagttgcgtgcacagcaccctatacaacaaccacaaccaaccccagtcccccaagaaccttttggtgaaaaatctccaaaacaagttgtgaaagattcgctggaaggcgagcaactgccagcatctgcaccagaacaaaatggtgagaatagacagaatgcgagtagttcaagcaattcaagcagctccagcagtggctcaggatcatcttctagtggctcagacagtgatagctcctcttcagatggatctgatgctggcaattcatcttgagatataggttcagaagttctgtcgagtaggcaataactgcctatttgacgcgacaatagcaccataagattgtacatgcttaccttgtctggcttagggaacccctgtagtttaagtaggttttgtatgtcgattcacccgctgatgaaggcagtaacttgtaggtttcgtggtgtacccgcctaataagactaggcttgttgctgacaccgtcccttggtacaccgcacttttgctaggagccctctggctggcccagacagtactagcatgtacattagcggcagcttgaacgctgattttgtttagctgtgttgattgcagtatgtaggaaggcgactgctgtatgcatttttttcttacttttgtttaacttacggatgaaagcattggcaggccatacaacccctgatggtgtttagtttgccaccatctttctgtggagtaccagtgactgcggaggcttcatcaccacaccatgcgcaaaagtctgttcgattggctgctctaaatttgggtcttgggtttgcataaagtttgttgatgcacatgatgttcctcatcacgatcattgatggtccattgttatgttatggagtgatgaggaataggtggttgtgttgggcacgagcacgagagatgatgtgtagcagttcggacctttgggtgggtagcagtaggtagcctcccctcctttcccctggtctggtgatgatggtttgttggagatgtggctatatgtgcgtatgatatgccgtggctccttttgagctgtttgctggctggcgtcttccagcgatggataatacgtgaaggctgggctgcgacggcctccagcatgcagtcagttgaagtgaagtgtacgtgtggatgttccgtctgttgggtgtgccttcctttggcactgtacgtttggttcgtcagctcaggtgtctggtctacgaggagcaatgtagtaaaggcagcaggctgttcgtattggtt

SEQ ID NO: 2388 - DNA, 1313 bp, Zea Mays
ctgcttgctcactttcgccctcgaaatctggcggaagcatacgaagcctagatgtttggtgtatcgatttgtaatatgtatttatcagaaaaagggtaaatacagggaaggccttttttgtttttttggtaaatatgcttcctacaaggattgtgtatattgagcagagaacagtgagaatcccccttcaacatgccctcaccttccctgcctaccgtgttgtcaatggctattcaagggaaggggatcgttccttttttttatcttgatgcactttgtttgttttattcttacttttagcttgtctcattcttctctccaatgttgctactgtgccctttctgttatgggcacgatgttgtctgttatttcttccaccaccaccagaacaaagccttttcgttctaagcaagttcgggtatgctatatttgaaacctaacaaaaactacaaatcaaggttcagtcacgtggacagctatttttcatttgcttttattcaagtctaagtctttgggtgcattccattctttcaagtctgcttttactgcatctttccatgccaacttcgacttccccctgtctctcttcccatttactataacaccttagtattccactacacactggtgcctctggatgtttccattggatatgtccaaactatcttaatcgatgttgcataaactgtttttcaattggtgatacctctaacctacacatattatcgattcagacacgatcacttcttgtatggccacaaatccaacgtaacatatgtatttctatagcacttatctactgaacatgacgtctttcgtagactaacatcctgcatcatacaacttagtaggtctaattaatgttctataaaactttccttttagcttatgtggtatcctcttgtcatatagaacgttagagacttgatgccacttcatcccaccatgctttgattatatggctaacatcttcatcaatatcccatttttctgtagcattgatcctgaatactgaaagacatccttcttagacactgcttgaccttccaaactaacatctccttcctcgtatctagcagtgccgaagtcacatctcatatattcggcgttagttctactgagtctgagtctaaacccttgtgtgttagtgcttccatttctttgaaatccaatgtgctagccacctaaaccaaaagaacattatggtggttgttgcttcattagagaagcattttactttcatcaagcgttctcccttttcatttcccgtatcatgtcttgcttggatatggatctttgtctccattacttgg

SEQ ID NO: 2389 - DNA, 4494 bp, Zea Mays
cttttcatgccccttgcacaaggagcaaaataccttacctgagtcgctccgatcacaagcgtcgggcgaccaccttcctcctccgcggaatcctgctgtatctggtgcctagcgctggtcgtcgagaggacgggcggggaggcgtccgccggcgagggactgagcggtggagacctcggtgggcaggcgcctacgagcccccggctgacacggtcgaagctgctgcggacggccgggctccaagcgcaccctcggtgtccgcgtcgccctccgttctcttctttgactcctgagtttcagtggacgttggcggcgtttgagacccggcggcggcgtatccgccggccactgcacatcccccgcggcgcgccactcctatggtgtttctgatcaaatggagcaagcctgcaatggcgcactgccggctcctccaccgctacgtctcgtccgccgccgccagagccgcagcgccgatccctgcccggcacgtgccccggtcgcccggcacgtccgcgcaaagcgcccgcatacgggagctcggccgcctcggccgcttgcacgaggccagggaggtgttcgactcgatgcccttccgcgacatcatcgcctggaactccatgatcttcgcctactgcaacaacgggatgcccgacgccgggaggtcgctcgctgacgcgatctccggcgggaacctgcgcacgggcaccatcctgctgtcgggctacgcgcgcgccgggcgcgtgcgcgacgctcggagggtgttcgatggaatgggcgtgcggaacaccgtggcgtggaatgccatggttacctgctacgtccagaacggggacatcaccctcgcgcgcaagctgttcgatgcaatgccgagcagggacgtctcgtcatggaacacgatgctcaccgggtactgccatagccaactgatggaggaggcaaggaatctgtttgaacgaatgccagaacgcaacggggtttcttggacagtgatgatttctgggtatgttctaattgagcagcatggcagggcttgggacatgtttcgcacaatgctatgtgaaggaatgacaccagagcaaccaaaccttgtttctgtgctttcagctgtacgccatcttggtaaacctggcattctagagagtatccacgttcttgtgcataagactggctttgagagggatgttgttgtcggcactgctatacttaatggctacactaaggatgtgaatatgcttgacagtgcagtaaagttctttgaaggtatggcagctaggaatgagtacacatggtcaaccataatcgctgcactatctcaggctggacgaatagatgatgcttttgctgtttaccaaagagatcctctaaagtctgttcctagtaggacttcaatgctcacaggccttgctcgatatggaaggatcgatgatgcaaagattctatttgaccagattcatgaacctaatgttgtatcctggaatgccatgattactgggtacatgcagaatgaaatggttgatgaagcagaagatctttttaacaggatgccctttagaaacacaatatcttgggctgggatgattgcagggtatgcgcgtaatgggaggagtgaacaagctttggtttcactccaagctctccataggaaaggaatgttacctagcctgtctagtttgactagtagcttctttgcttgttcaaacatcgaagctcttgagacaggaaagcaagttcattcacttgcagtaaaggctggctgtcagtttaatagctatgtttgtaatgcactgattactctgtacggtaagtacagaagcatagggtctgtgagacaaatctttgatcggatgacagttaaagatacagtgtcttataactcttttatgtccgcgcttgtacagaataatctgtttgatgaagcaagagatgtattcaacaatatgccgagtccagatgttgtatcttggactacgataatatctgcatgcgcacaagctgaccaggggaatgaggcagtagagattttcagaagtatgctgcatgagcgtgagctacccaatccacctatattaacgatacttcttggtctcagtggaaatcttggtgctccccaacttggacagcaaattcacacaatcgctattaaacttggaatggattcaggacttgtagtggctaatgctcttgtctcgatgtatttcaagtgtagttctgcagattcccttaaggtttttgattcaatggaggaacgggacatttttacatggaataccatcattaccggctatgctcaacatggccttggaagagaagctatcagaatgtatcaactaatggtatctgcaggagtgttgcctaatgaggtcacttttgtgggccttttacatgcatgtagccattctggtttggtagatgaagggcaccagttcttcaagtctatgagcagtgattatggattaactcctctgctagagcactatgcttgcatggtcgacctacttgggcgagctggtgatgtgcaaggagctgaacattttatttatgatatgcctattgagccagattcagtgatctggagtgcgcttctcggggcatgcaagattcacaagaatgtagaaattggtaggagagcagctgagaaacttttctctatcgagccatcaaatgctgggaattatgtcatgttgtcaaatatatactcctcccaagggatgtgggacgaagttgcaaaggtacggaaacttatgaaagaacgaggtgtgaacaaggatcctggttgtagctggatgcagataaagaacaaaatgcactcatttgtcactggagatgaggaacatgagcaaattcaaaacatatatgctaccctttgggagttatacactttgctaaaggccacagggtatgtacctgacacggactttgttctccatgacatagatgaagagcagaaagagagctcgcttctgtaccatagcgagaagcttgctgttgcttatggccttcttgttacacccaagggcatgcccatacagataatgaagaaccttagaatatgtggtgactgtcacactttcatcaagtttgtatcctctgtcaccaagagagaaattgatgttagggatgggaatcgattccatcatttcaggaatggaagctgttcatgcggtgatttttggtgataaactatcagagcatgagcaggtcttcttcatgctatcccctcaaacacagagttacaagtgcttcataaggaatcgaatagatctgaaagttttactgtgccaacacatgcacacactggtggtgcctgcatctagcttttcagatcaaagcctgacaggtatcatagggcaaagtgaagaagaaacagaagagttgagcaagatcacactagagaataaggatattcagcttgatatcgatataagagtgtctgatggagccgaccctatggagctgcatgtttatgattttaaaggacctggtgtggccttatcgatgtacaatagcgatgaggtacagtagaacatcaataggacttgttgctgattgctatattctcttgactggtattctaacttcctatctctatttagtttattaggcctttcgctgaatcctccatggatatggctctttcaaaaaagttgtctctttatctcagcaccaagaatacaatcctcaagaagtatgacgacaggtcacaattggaccatggtgctccattttgcttactgtgatatgtgcagcgaagcgatggcgatggtgtttttgatgttcaggacagaatcaatggccgcaccttatgtgattgtgatagcatagttgtttgcgaggtaattacaaagctgcaggctgccgcctggaggcagtgggaggccctgggcgaccgaagggtgcatgatattctagtttcagatcaatgctgagtgcagggagaggcaatgtcttacctcttggatgttcatctctatattagtccatccataggtatgcagctttggaccgtcgatgttaaatcttgtctcaccagcgactacttctgatggtgtggctacctgagcagcttgtaccgattctgccttagcttgccgatcaacgctgtccaccaggacagagctgaaaacttgaaatggcaagaccagaaccctgaagttgaagtgttggcaagaaactcagataggtggatgaacgttgtgagccacctagctaagagcttgaagacgacagatggtaggtgttagaaatggaaggccatgcggctcccatgttatggaaaaaaaacccaatcatgaattttggaaagctcaagaacctttgttgaaggagataaggcggatccgttcaaggtcaacaatcgtgatgagaaattacagaaaagaggaagaatattgtcgatgaaaaaaagtgctcaaagtaggtgatgtaagtaaaggtgacagactctaaattttacactataagatttaaagacccatttatagttatttttaaaca

SEQ ID NO: 2390 - DNA, 4978 bp, Zea Mays
cttttcatgccccttgcacaaggagcaaaataccttacctgagtcgctccgatcacaagcgtcgggcgaccaccttcctcctccgcggaatcctgctgtatctggtgcctagcgctggtcgtcgagaggacgggcggggaggcgtccgccggcgagggactgagcggtggagacctcggtgggcaggcgcctacgagcccccggctgacacggtcgaagctgctgcggacggccgggctccaagcgcaccctcggtgtccgcgtcgccctccgttctcttctttgactcctgagtttcagtggacgttggcggcgtttgagacccggcggcggcgtatccgccggccactgcacatcccccgcggcgcgccactcctatggtgtttctgatcaaatggagcaagcctgcaatggcgcactgccggctcctccaccgctacgtctcgtccgccgccgccagagccgcagcgccgatccctgcccggcacgtgccccggtcgcccggcacgtccgcgcaaagcgcccgcatacgggagctcggccgcctcggccgcttgcacgaggccagggaggtgttcgactcgatgcccttccgcgacatcatcgcctggaactccatgatcttcgcctactgcaacaacgggatgcccgacgccgggaggtcgctcgctgacgcgatctccggcgggaacctgcgcacgggcaccatcctgctgtcgggctacgcgcgcgccgggcgcgtgcgcgacgctcggagggtgttcgatggaatgggcgtgcggaacaccgtggcgtggaatgccatggttacctgctacgtccagaacggggacatcaccctcgcgcgcaagctgttcgatgcaatgccgagcagggacgtctcgtcatggaacacgatgctcaccgggtactgccatagccaactgatggaggaggcaaggaatctgtttgaacgaatgccagaacgcaacggggtttcttggacagtgatgatttctgggtatgttctaattgagcagcatggcagggcttgggacatgtttcgcacaatgctatgtgaaggaatgacaccagagcaaccaaaccttgtttctgtgctttcagctgtacgccatcttggtaaacctggcattctagagagtatccacgttcttgtgcataagactggctttgagagggatgttgttgtcggcactgctatacttaatggctacactaaggatgtgaatatgcttgacagtgcagtaaagttctttgaaggtatggcagctaggaatgagtacacatggtcaaccataatcgctgcactatctcaggctggacgaatagatgatgcttttgctgtttaccaaagagatcctctaaagtctgttcctagtaggacttcaatgctcacaggccttgctcgatatggaaggatcgatgatgcaaagattctatttgaccagattcatgaacctaatgttgtatcctggaatgccatgattactgggtacatgcagaatgaaatggttgatgaagcagaagatctttttaacaggatgccctttagaaacacaatatcttgggctgggatgattgcagggtatgcgcgtaatgggaggagtgaacaagctttggtttcactccaagctctccataggaaaggaatgttacctagcctgtctagtttgactagtagcttctttgcttgttcaaacatcgaagctcttgagacaggaaagcaagttcattcacttgcagtaaaggctggctgtcagtttaatagctatgtttgtaatgcactgattactctgtacggtaagtacagaagcatagggtctgtgagacaaatctttgatcggatgacagttaaagatacagtgtcttataactcttttatgtccgcgcttgtacagaataatctgtttgatgaagcaagagatgtattcaacaatatgccgagtccagatgttgtatcttggactacgataatatctgcatgcgcacaagctgaccaggggaatgaggcagtagagattttcagaagtatgctgcatgagcgtgagctacccaatccacctatattaacgatacttcttggtctcagtggaaatcttggtgctccccaacttggacagcaaattcacacaatcgctattaaacttggaatggattcaggacttgtagtggctaatgctcttgtctcgatgtatttcaagtgtagttctgcagattcccttaaggtttttgattcaatggaggaacgggacatttttacatggaataccatcattaccggctatgctcaacatggccttggaagagaagctatcagaatgtatcaactaatggtatctgcaggagtgttgcctaatgaggtcacttttgtgggccttttacatgcatgtagccattctggtttggtagatgaagggcaccagttcttcaagtctatgagcagtgattatggattaactcctctgctagagcactatgcttgcatggtcgacctacttgggcgagctggtgatgtgcaaggagctgaacattttatttatgatatgcctattgagccagattcagtgatctggagtgcgcttctcggggcatgcaagattcacaagaatgtagaaattggtaggagagcagctgagaaacttttctctatcgagccatcaaatgctgggaattatgtcatgttgtcaaatatatactcctcccaagggatgtgggacgaagttgcaaaggtacggaaacttatgaaagaacgaggtgtgaacaaggatcctggttgtagctggatgcagataaagaacaaaatgcactcatttgtcactggagatgaggaacatgagcaaattcaaaacatatatgctaccctttgggagttatacactttgctaaaggccacagggtatgtacctgacacggactttgttctccatgacatagatgaagagcagaaagagagctcgcttctgtaccatagcgagaagcttgctgttgcttatggccttcttgttacacccaagggcatgcccatacagataatgaagaaccttagaatatgtggtgactgtcacactttcatcaagtttgtatcctctgtcaccaagagagaaattgatgttagggatgggaatcgattccatcatttcaggaatggaagctgttcatgcgagttcttaaaacttgacccagtttggagcgccgtccgcgctacacgggtacgacacaagtcacttgctgacgtgtgcatgttctatgcattcattcgctacgaaaagctgctcgaggaagacacctctcgccatgttgtcgcactgctcgagggcatgggcgcggccatccaacgaaggacacgcttgggccccgcctccactctcctctccttcttgtcctcattggcttgctgccctacccttctcctcttcccaccaccctccctctcatccacgccctcctgccctcccacgctagatgctcgacatccccatccgcgcgctcgaggcagagtccagggacgccaagatgagcccgaccgcgaccgcctagccgtcagctccaaagaagaagccagggcaccggtggacgtcagggttccgtcgtggtggcctgctagatccagattcaacaagaaaggtttgtgattcgtttggccttaggatgacaaacggtttttatttttctagaatcccactgaaagagagatggagttgaatgagaaatctgaaaagaatacgcaagaggtagatgagaagttccaaaacacaaacttgtatctcaagaacttagagatggagcttcgggagttacaagtgcttcataaggaatcgaatagatctgaaagttttactgtgccaacacatgcacacactggtggtgcctgcatctagcttttcagatcaaagcctgacaggtatcatagggcaaagtgaagaagaaacagaagagttgagcaagatcacactagagaataaggatattcagcttgatatcgatataagagtgtctgatggagccgaccctatggagctgcatgtttatgattttaaaggacctggtgtggccttatcgatgtacaatagcgatgagtttattaggcctttcgctgaatcctccatggatatggctctttcaaaaaagttgtctctttatctcagcaccaagaatacaatcctcaagaagtatgacgacaggtcacaattggaccatggtgctccattttgcttactgtgatatgtgcagcgaagcgatggcgatggtgtttttgatgttcaggacagaatcaatggccgcaccttatgtgattgtgatagcatagttgtttgcgaggtaattacaaagctgcaggctgccgcctggaggcagtgggaggccctgggcgaccgaagggtgcatgatattctagtttcagatcaatgctgagtgcagggagaggcaatgtcttacctcttggatgttcatctctatattagtccatccataggtatgcagctttggaccgtcgatgttaaatcttgtctcaccagcgactacttctgatggtgtggctacctgagcagcttgtaccgattctgccttagcttgccgatcaacgctgtccaccaggacagagctgaaaacttgaaatggcaagaccagaaccctgaagttgaagtgttggcaagaaactcagataggtggatgaacgttgtgagccacctagctaagagcttgaagacgacagatggtaggtgttagaaatggaaggccatgcggctcccatgttatggaaaaaaaacccaatcatgaattttggaaagctcaagaacctttgttgaaggagataaggcggatccgttcaaggtcaacaatcgtgatgagaaattacagaaaagaggaagaatattgtcgatgaaaaaaagtgctcaaagtaggtgatgtaagtaaaggtgacagactctaaattttacactataagatttaaagacccatttatagttatttttaaaca

SEQ ID NO: 2391 - DNA, 2979 bp, Zea Mays
gtcatgctgcagaacatgatggatgggcaccatcagctcgctatgatgcagcagcagcatcagaaccacggccagcagcaggcagccacgagcgagagcgacgcgcgaggcccgcgccacgacgagctgctgatggagagcaagtccggcagcgacaacatggagggaggcgcccggtcaggcggctccggcggtgaggagctgcaggaggaggatctcggcctgcggcagccggcccgcaagaagcgctaccaccgccacacccagcaccagatccaggagctcgaagcgttcttcaaggagtacccgcaccctgacgacaagcagaggaaggagctgagccgggagctgggcctggagcctctccaggtcaagttctggttccagaacaagcgtacccagatgaagacgcagcaggaacggcacgagaacatgcagctgcgggcggagaacgagaagctgcgcgccgagaacgcgcggtacaaggacgcgctcgccaacgcctcgtgcccgagctgcggcggcccggcggccacggccgtcatcggcgagatgtccttcgacgagcaccacctccgcgtcgagaacgcgcgcctccgcgacgaggtcgaccgcatctccaccatcgccgccaagtacgtcggcaagcccgctggcagcctgctgctgctgccccccaacaacctgtcaaacaacgtctccggcccggcgctttcctcccaccaccacctcctgcccggcggaacagacgtgttcggtggcctccaccgtcatgctggcggtgggtttgactttgacaaggggttggttgtcgagctcgccgtcgccgccatggaggagctggtgcggatggctctgctcggcgagccgctctggatccctgcccttgccgtagacggggctaccaccgagactctcaacgaggaagagtacgcccgcgggttcttccccaggggcgttggtcccaagctgccggagctccggtcggaagcgtcgcgggaggccgtcgtggtcatcatgaaccacgtcagcctcatcgagatgctcatggacgtgaaccagtggtcgacgctgttctcaagcatcgtgtcacgggctgccaccctcgaggtgctctccaccggcgtcgccggcaactacaatggcgcgctgcagctgttccagatgccgtcgccgctggtgccgacacgtgagtgccagttcctgcgctactgcaagcagcacacggacggcagctgggcggtggtggacgtgtccgtcgagggccagctgctacgtaccggcagcagacaggggcgcgggcgcggtcgacgccggccctcaggctgcctgatccaggagatgccgaacggctactcgagggtgacgtgggtggagcacgcggaggcggacgacatgatggtgcacgacctgtaccgccccctagtctgctccggcctggcgttcggcgcgcggcggtgggcatcgacgctggagcggcagtgcgagcggctcgccagcgccatggccagcggcgtcgtcgtgccggcggcagcagcagggccagccgcgggcgtggtgacgtcgccggaggggcgccgcagcatgatgcggctggcggagcgcatggtggcgagcttctgcggcggcgtgacggcgtcgacgacgcaccagtggaccacgctgtcgggcagcggcgcggaggacgtgcgcgtgatgacgcgcaagagcgtggacgacccgggccggccgccgggcatcatcctcaacgccgccacctccttctggctccccgtggcccccgcgcgcgtcttcggcttcctccgggacgacgccacccgcagcgagtgggacatgctctccaacggcggcgacgtgcaggagatggcccacattgccaacggccgcgaccacggcaacgctgtctcgctgctccgcgtcgataacgccaactcgaaccagggcaacatgctgatcctgcaggagtgctgcacggacgcgacggggtcgtacgtgatctacgcgccggtggacgtggtggccatgaacgtggtgctcaacggcggggacccggactacgtggcgctgctgccgtcagggttcgccatcctccccgacggcggtggcggtggcggtggcgggtcgctcctcaccgtggcgttccagatcctggtcgactcggtgcccaccgccaagctgtccctgggctccgtcgccaccgtcaacagcctcatcgcctgcaccgtcgagcgcatcaaggctgccgtcgccgccgacaacgccggtgtggcggcggcggcggcggcgacgtcccaccattgacgaccatccccagcgcgcggttagcgccgattacgtccttcttattactcgctaaaccatcttatctatctcgctgtgcgtgcgtgcgttcatgcacgcgtgcaggagactgccgggatctgtggagggacgaagagcagggtcgcgtcaaactcaaaccaaaactgaaactggggaggatttggcaaacgcagggagtcaagaacgcaccgcgtgctctccttgcaagctgttgcacatgccctcgatctgatgagcaacacaacaccttgcaagggggttggttcgggcattgactctcttgctctgtcctcccgtcgtcgacctgccactctctcctcggtccatggccgggctgtagtagaagctcgtccgtcagacagctagctaggagcttagaccatgcatgcatgcatatgtagcttgtaactgggattcttccattgtaacgtgcctgtacctctgcctctgtgcatgcacggagcgaggttgtacgtctatggagattgcagaagtctaaaaccggttaatttgatttttttttccaccgtcggagattcattgcttctgtgttttttttacgttcagcatttttttagtatcattgttgcaatattgaaatgcatgtttatactcgtatttacatatttcaatatttataagatcatttacaccaca

SEQ ID NO: 2392 - DNA, 1768 bp, Zea Mays
acccaaaggctgatgatgctccgactccgagagacgaggcggcagccgggcaaccatcccatcccactcccagcaccaccagagtggtggggccttgtctcttctcctctcccactcttcgacacagccagagccagccacggccaagtcctttctctccccttccctcttctgcctactctccaactccaggcgcgattcgaagcatacaacacctccaccgcttctcaactcccctctgcgccctcgcctcttctcttttgttttacctgctgcggaatgcggtccacgactatggatcttcgagagattacttaaaaaaacacacacacacaaatcttgcagcagcctccacacctgggattctcctccatagcgtgtgccgtcagccgtgtactactggcctccacggctccacccgcctttggttggattcctgttgccgcttcctcctcccgtgatcggccgcattgcgctgagggattctcgttcgctttttcccgacgccgcctgcggcagcggtactatttactgctccgctctttcggcggtttcttcgtctgctgccttcccagtttgctagctcttatccggaatggatgccggagcggggggagctatatgagtgattccttctccttcccgtctcttggattgcctccgttttggttctttggtgggcggccatggcgaacggcggcgagcaatcggcgatcacggcggccgtggagcggggccgcgtgagcggcgtctcccggcggctcgcgggggaggagagctccgacaacgacgacgaggggagccagcgcttctcggacgccgaggatcggtcctggcactctcactcgcgccaaggctccgccttggagttggaggactgtatctccacgtccgcgcccatcagccgcgacgccggcgccgccagtgccggcggcggggacacggccacggccacggccacggccgagcgcgccaggaagtcgggcgtgtcggagtgctcgctggacggcgtcgtcgacctggaggccgggctggctgagatcgtcaaggccagcccggacaaggccgagaggaactgccgcatctgccacctcggcctcgacagcgcctccgccgagtccggcgccggcatcgtgctcggctgctcctgcaaggacgacctctcgcgtgcccacaagcagtgcgccgagacctggttcaagatcagaggcaacaagtttctgtgatgcggagttcatcgagcagtggaatgaatcaagcaacactgcatctgcccaggcaacagccactgagcctcgtagattttggcaagggcaccggttcctcaacttcctcctcgcttgcatgaggaagcatggggaagtttcagaattcaaactggctgagcatgagaaaacaactggagatggacaagagttgctttggtgaaatgaagggtagtgttaattctgcagggaggaaggggaaagctggcaattctgtaaatattggttgagtggtggtgaatgaggagtggaacttattttcgattgcgtcatgcttccatgatttattgatttgtgtaccttctggttaagtagattattagatattcttgtcttctagcttagttggttatattctttgtggtggaatacatctatccaggtcggacattagcttgtttagtttgctgcctaaattttcacgatttggctaacttttttctctctaaggttagttgttcaatttagacgactaaccttagataaagtgtacgcagttagcc

SEQ ID NO: 2393 - DNA, 1641 bp, Zea Mays
cttcagaatcgagtagccatatgtgtacgcagttacatgcttgctaaagtgaagatgccatatactggcccgcctttgtcatagcaactgctgcagcaattgttgcaagtcaagctaccatatctgcaacctactcaatcataaagcaagctcttgcacttggttgcttcccccgcgtgaagatagtccacacctcgaagaaattccttgggcagatttacatgcctgacatcaattggatccttctggttctctgcattgccgtgactgcaggattcaagaaccagagccagataggaaatgcatatggtactgctgtggttatagtgatgctagttaccacattcctgatggtgccaataatgctgctggtatggaagagccactggatcctcgtggtgaccttcatcgtgctgtcgctcatggtggaggttccctacttcgtggcctgcatactgaagatcgaccagggtggctgggtcccactcgtcgtggcgacggccttcttcctcatcatgtacgtgtggcacttctgcacggtgaagcggtacgagttcgagatgcacagcaaggtgtccatggcgtggatcctggggctgggcccgagcctgggcctggtgagggtcccagggatcggcttcgtgtacacggagctggcgagcggcgtgccgcacatcttctcccacttcatcaccaacctccccgcgatccactcggtggtggtgttcgtctgcgtcaagtacctccccgtgtacaccgtgccgacggaggagcggttcctggtgcggaggatcgggcccaggagcttccacatgttccggtgcgtggcgaggtacgggtacaaggacctgcacaagagggacgaggacttcgagaaggtgctgttcgactgcgtcctcttcttcgtccggctggagagcatgatggagggctactccgactcggatgagttcagcgtgccggagcaggcgcccggcatcggccgcgcggcgttcttgagcgtgggcgagcggacctgcgcgactgtgtgctccagcggtgatctgagcttctcgtcacaggactcggtcgtgcccgccgccgcgcagtcgtcccgagcgccgacggggctgcgggtgctgcactactcggcgtcggcgtcggcggcggggcagggcagcagcggcggaacggtgggcgacgagctggagttcctgaaccggtgcaaggacgccggcgtggtgcacatcctcgggaacaccatcgtgcgcgcgcggcgggattcgggcgtcgtgaagaagctcgccgttgactacatgtacgctttcatgaggagggtgtgcagggagaacagcgtcatcttcaacgtgccccatgagagcctgctcaatgtcgggcagatattctacatctgaatatctgtctgatgagagatagatagccttgttcttcgtccttttgtgtcccgggtacggtaggatatgtacactattgtcttgtatcgtacacttgtacagaataaaacagtgagcttttagtggggccgtgggggtgacaaccgacaaggcgagtggcgtgcgacgcccggtgtgtcctctgtaaaaaaacaggataattgtgatttagacccgattagaaactctaaaactaataattagctgc

SEQ ID NO: 2394 - DNA, 4002 bp, Zea Mays
gtcagccgccgtgcacgctcatcatatggcatagccccaagcccccaacggatcgagcgcctccccgagtccccgttcccctgccccagctgaccgccgccgagacgtgccacaccgcctccccctcccgccgccacaaccttcgcctccacgcaattggccgcactcctttccacctcccgctacaggatagcgtgggccggtcggcggcgccgacgggtggagaactggagatccacccgcacgcggactgcttccttcgctagtcgatgggaagtaagcgttgttaggtctcatgatttcttttgggagatccggagctgtggtgcctgtctgactcatcatctctgggacactgccaagtacgattaagagaggctgcgtcgaatccaagacctttggctcagtgggaagacttctcaccactgcatcagtacttggctatttcagagattcagaagaacttttgcaagaagggaggtcttgtactttggaactactcgatagccatatttttagaggttagcaaaaggagatcagaatgactaatgaaactagaaaacatcgttccaagtgggacacaaaagaaggatctgatgtagttgagatcagtgatgatgagtctcctgataagacaggtgttcaccgtaaaggtggcgatttacacacaaaacctgacacatccatgcaccacagaggcgctggacatgagaaggaacatgctgatgggtccaatgaagatatgaaggaaatgcaacataaggcaccctctgaaagatcacaacctcttagaatggttgatgagcgtgataataatgagtggagcaaggcaactggtaaccaaggcacaaacagatatgcagatgacagaagacgtggtgatggatggggtacagctcctagtcgtgattattcttctgctagggcgccttctgatccagatgcatggaggcagcgcagccgaagtccatctccaagaggggtttggaacaaatcacgcaggaacaggagtcgttccagaagcagaagcagaagcagaagcagaaacagaagtaggagcagaagcaggagtatagggcgaggcagaggcaggagcagaagtccatatattgctgaccgtggatctgagtggagggttgagagaggcagaacatctggaggacctgttcggccctgtagggattttgtggctggtaggtgcagaagaggctcaaattgcaggttccttcatgaagatggtgggcacaggccatttgatgatcactatcctgctgacccaagggaaaggtatggttatcagagcaaggagtttatggatacaagaggaccaaatgactatttgcggagtaggcaatctcgagatcgttatgatgataggccttgggagagatctgaacctcgaagggattaccggtatcctgaacaatgctttaattttgccaaagggaaatgcatgagaggtgctagttgcatatttgcgcatagtaattctgcttctcatggtagatggagagatgagactagggaaagtgcccatgatagatttggccctgattcatcctatgggaataggactgagcaccgtagggtaaacaaaaacccttgtaagttttttgctgaaggttgttgtcgccgtggtgaaaattgttcatatctccatgaggaagctccccatagtcagataggagtgagtgcacctgatgaggctttgaattacagtgatgggcatgcagcaagaggaaactattcaaactggggtgaacaaaataatgctgtgcatgcaacctctcagattttatccagggatgacagggaaagtcctatttctcagagtattggcagaaatgattctcgcaatgattatgaaaaccagcattcaaaagatgctggaaagagccagtaccaaattattcatcaggaagattttggttcaccagggcaaaagaaacatgaagatgctatttcacaacagccacagttattgactcctgtccagactactgctcttagcatgcataatgaaaaggtatctgaaatggacagtcagaatgctccttcaagcattggaggtttgagcatgcaatcaggggttcgtagtgctaacattatagcagagcaaagcctgggtcaaatacttcagagacatgatccaattcctcatattcctgggccacaaacgcttccgatcaccacacaaccacagaatgttacgtcttcattcccatcaaatagccacgtgcaacaaaataactttcctatacatcagaacaggcaagagcagtttgtagttccacacgcagctgcaaacatctcaactcccagcatgcagagccagccaattgcttctcacatggggcacatccaacgtggcggctatggtatagagccacaggcattgcccaatatctccacacataacgggcataatttcaatgttgccagtcaagttccaccaaacattccaacagctgtgcatgctgggcagactcaggtgacaattgacatgccaaggttgggtcaagacagtggtcctcaaagcatacacaacatggagatgcagccaatgtctccaaacgtgcaaagccaatccttgcaggggttaccccttgtgccggcttccagctcagctgatatggccggagttcctgttcctcacaacgctgtgaaaagcgaagaagttagccgagttactgcatccctggcacaatactttggaaatactgctttcggcgctggtacggttggattacaaccgtcgcagccgaatatgaatgcaagcctgatggccactccacctgtggtaccaccacctgtccaacccaatccgtggccctgggcgcagcaacagacagggatagtccaacccggtctccctgttccacctcagcagcagcagcagcaacaacaggctccccagaggcagcaacaacaacaggctccccagagcttccagacgctgatcgccgttggtggcagtaatggcaactctatgctcatacctaacgcaggcgcatcggttggtcccgccaccgtggcggcgaaggaaaccgcgcctccagagagcaagaaaggagagaagaaaaatgcagacgcagaaaagaaaaatggcgacgcggagaggagaaatgccgaagcagaggcacaggaagacggcgacaagggtaagaagggcaaggactccaagcagctgaagatgttcaaggttgcgctcgcggacttcgtgaaggaggcgctgaagccgacgtggaaagacgggcagatgagcagggaggtccacaagaccatcgtgaagaaggtcgtggacaaggtgacgagcaccgtggagaacacccctccgaccaaggagaagatcgacgtctacatgacctactccaaggagaaactgaacaagctcgtgcaggcgtatgttggcaagtacgccaaggcgtagtagcgtttggccaagaacacactgacgcccattttgtgccccgaggtcggaaggatggaaagcaccgcgtgcatccgtgctcagaggtttaggatttgtgaaggcgcgcgaggttggggggggggggtgcctgggcttgtctgcagtttcagagagtttagcgtgtggtttgtgggcaaatggcgccgttccaacatctggctgtaacttttgtagaattgttttattctgggatttagaacatggtgtagcggaatcatgcatggcgtggatcattttttatggatagactatataggaggcatgcatggtgtggtgcccatcgacgtgctagtgttatagtattgttgatcggaggaccagaccagtcaaggaacgcacggtgtccctcttgatgagaagtgagttgcttgctcatcgttcctcatgcatggtgtgcagcagcgtgttttatcgtctatctatgagtagtaggtggaaagcatgtggaaccaaaccaagtaagaacttggctttctctgcctgattctgtggttgtgccgacgactagccggccaacacagattggtcga

SEQ ID NO: 2395 - DNA, 4518 bp, Zea Mays
ccacgagaaaccaaaggaaaagaaaagaaactgtctggtgggaactgaaggacggcataatttctttacccaatcgcaatcggcccaccgagcatgagggggggcgacttcctcgaattttccttctcttctctgaccgactgatcttagcgatcttctccctcgaatcttagcgtagcggtagcgccgatcctgttcctgtgccgtgccggcttggattggaaaataggagggagaagatcaacgccgccgcggtgcggcctgtggagtattaaacaaagatgcgcagagcccggctgcgccggcagctagcagccaacgcgaaacttcagcttccgctccgccgtccccctcccggacccaaacaaacaaaccatcgtcacccaatagccaccggccaactgtcaagcactccttcggtgcttccccatctgcgccccccgatccctccggacccgcgagcgaggccgtcgccggcgcgcgcgagatttgagctgaggccatggagtcaccgttccgggccgacgtggtcaaggacaaggcggcgctggtcaccggcgggggatccggcatctgctttgagatcgccgcccagctcgcgcgccacggcgcgcaggtcgccatcatgggccgccgccgggaggtcctcgacaaggccgtcgccgcgctccggtcccagggcctccgggctgttggtttcgatggagatgtccgcaaccaggaggacgcggccagagtgcttgctgcaacagttgcacattttggcaagctcgacattcttgtgaacggtgcagctggcaacttccttgcttccccggaggatttgacgcccaagggattcagaactgttcttgagatcgacactttgggtacatacacaatgtgctatgaagccctcaagtatctgaaaaagggtgggccaggaaaaggcccgtccactggtggactaatcattaacataagtgcaacactgcattacagtgcttcttggtaccaaatccatgtctctgctgctaaggctggggttgatagcatcacaagatcactggctctggagtggggaacagattatgacattagagtcaacgggattgcacctggaccaattcaagacaccccggggctgaggaagcttgcacctgaagaaatgagcaaggggcttcgagaaatgatgccattgttcaaatttggggagaagcgggacatagcaatggctgcgctctaccttgcttctgatgcaggcaaatatgtaaatgggacaacactggtggtcgatggaggtctttggttaagtcaccctcgccatattcccaaggaggaagttagggagctgtcgaaggtggttgagaagaaggtgtgaacacaatggagatggagatcttcaagagaaagaaaacaagacgctgacaggcaagcaaagctgtgcgattctcctcctgtgtctcaactgccgcgtgagaaggagagaatcatttctttgccttataagtcactatgacggtgccgtgaactctttcggaggtatccagtttaagaaaaagctcttgtaccatctcgttctgctggtctttgatcatgactcgtggatgacgatctgaactctgacggtaccagttcacaagtttctttctgaaaaaaaaaattctcccattcgaactgtcttgtaaggctgagcaaaccatagtttctggactaactatgattgttacatgaattttattgccttcatgttagaacttagaatgcagcgtctatgaaacgactggtaatatgtggcctatcccatttcagaaacatttatgtaagttagtatgtgtcactttgaattaggagggtgaaatctgccatgataaccgaaaactgtaacccaagacaagagctttagtttgaagccagcaacaaaatcatagtaggatatgtgagatgtcatgcatttgactatgcctgacatctagctgctagtaggtgtgtagtgtggacccgaagcctgtctacctatggaaactggaaagcattattgggcctacttatcccatgtcttggtcaattcaagacttgccatcttgtagatggagcctagatgcaatgcaaagctcatcaggtcagttaccagtccacagcatggttctttgtgcctctttccagcattgccgttttcagtcatccggttgctggtgccatcttctgatacacacacacacacacacatgctgcgcaacatgacatgcgttgcttgcaagtagttgagccacaagcacatactgttgttggatgtgatagtttgcctgatagagatctgtagcgtacatgctaggccaagagcctgctccgtacgtactaatcgataaatgaacagacagtagaaagttaagtgctataaacttctccatttacttaatttcttaatttgcagtttgatattttccttgtatgtggtatctagtgggacagcaggataggtgatgatgtgaataatgactttctgaaataaaaaataaataaataaactctgagtctgagctgaggaactctgtcgaccatgtataaaggtgagcaaaccccattggcttccctctacctcagaagaagcagatacaggtgataccactcctccatgaaatctctctctctcacacacacacacacacatattctcattctgcaacttagcacaagaacattttgcgcaaatgttgtttgtttgattttatagacctgctcatgctttaatacatctgatcttcataaaagtttgattttttccgaaatacagtataagaactgcacagttctactagcatttgcttctgtatagataactttctgttgtatcctgcatatgtacctatttgtttccatctcttgtgactttattggcttgaagccatttgctatcatctcttggtcatacatataaaatcttttcgtcttctcgtgcttatgaaatattttcatcttctcaaccttttaaattcatttgatcttcatggaacttgaagcctgaagtcatttgcttctacctcctctcacacatatgaaatatttatttgtttcttatcatggttgtgctttggtgtcctgaatcatgactgtcaatgttcgcagcatatgttcttgtaggttgaatagaagagtggaagcaccaagctgtaccaatggggcgtggaaaagtagagctgaagaagattgagaatccaacaaaccgccaagttaccttctccaagaggcggatggggttgttcaagaaggcaaatgagctagccattctttgtgatgcgcaaatcggagtcatcatattctctggcagtggcaggatgtacgagtactccagccctccatggagaatagcaagcgtctttgacaggtacctgaaagcccctagcacccgtttcgaggagatggacatccagcaggagatgactaggatgaaggatgagaggaacagactgaggatgatcatggcgcagtacatggcggaggacctggcatcgttctccgcgcaggatctgagcaaccttgagcagcaaatcgagttctcgctgtacaaagttcgcctcaggaagcaagagctactcgaccagcagctgctcgagatccaccaaagggagatgcatatgccagcagagcagggcggctacctgtgcctcatgaacccggctgcggctattgctagcgggcagcaccagcaggctggcgagatggtgggaattaacccgaggccgttcccgtggtgggacgtgggagccagtggcagtggcagtggcagccagagccagcagcagctgctgcacggccgggacgccgcggagtcgtcgatgacggcgctcgggctgtcgccgcagctgcatgggtacaggctccagccgcggcagcccaacctgcagcaggacgccgacatccatggctggctgtgatttgctttggtcgtgggtgtgcgtcctcaacgagacgagacgacgctgaacgtgcagctcctctgcttgcgacctgttcattctagagtctttgatcatgacctgcccccgtaatgaaaccgccagtagtcgtcaatatctccttctctaacctaagattggacctaagagggacataatgtggtcgcaaatccatataatagagtctatccgtcgcctcagccaacgtgccctgctgaaaataaactttactggagctggcttgttagtgctgggagctgggttgtcatcgcgttgcgcgtcgtttgtgttgaggttgtaaagtagaaactgtgcgagaatgaaatgagaacctctgtttctttattgaataaagcaatgtatttatacaagaggaggagacacaaaaggaggggtcaaaagccacgtccgtacgtgggggatgtgcaggggcacgtccctttggaagacgtcggttgccaccagagagcaactgattatattttataacactcccccttaagcagttgtccattatgtatatcctcccttgaaacctgtaagcaaaaggtggtttgcaataatatactgtgtaatacttcag

SEQ ID NO: 2396 - DNA, 1560 bp, Zea Mays
gtttcgggcctgattttccttaaaacttgatcaattccttttcttcttcttaattgagaggcagagcttctgccaaagttcaaaaaaaaaaattgtcatgtaaagaaaaaaaaagtcaattcagtaattgttaacatctgcttcaagtcctggtgcggtatcggtggtggcaagataagttttacactagagttaccatgcaagcgctccgaactgctccgccagacatgcaactaaaggacaagtttttggtacagaccacaattgttccttatggtacatctgacgaggaactcgttcctgcctttttctccaaagaaactggcagatacattgaggaaagcaaattgagagttgttcttgttagtgcataccaatcccttgaagagcaaccgactaataaaattcatgacactgagccagttgttgaagttcctgtactgaaagaggtgccaaatatagagaacgaagtgccagatgctgcaaaagaagttcctgcccctctggtacaagctccagcgattgtgactggaataccttcacctgtcgaagagactcctggcctgagagaattccgtgtgccgctgaatgaagcaccagctgtattggcagaatctccttccgctcaaaaagacccttctgttattacagttgaacatgcctctactgttataattgaacattcccctgctatttccattgaatcccctcctttgaaacaaagtgtcacagtttttaaggaatctcctccttcgaaacaaagcattgcagctttcaaggaatatcctcctccttcgaaacaaagcattgcagtttttaaggaatctcctccactggaggaaactagtcctaaagaagctgttgtgctaagtgaccgaggactcttcagtgtgcagaaccatcaattatctcatgtaacagaagatgttcagaatctgaaatcaaagctcaacaatctcgaatcaaaattggaagaggctggaaagatgataataaggctaaaagaagagagcagaagtaccacccaggagcgggataagctacagcaagaaatggtattcctaagaaagaagggaaccccaaggagccaagtgggtttccccttgctgtttgttgtctacgtcgcgcttcttggtaccttactcggttacctgctccgtctatgaattcagaactctaagaaaacaaaaaagttcagcagctgggatgcctcatatgcggcaagagaactgaattgaacggcagttgcactctaaaatgttggagaggtgaatttatttgcattattagttcaggacttcgtatggttttttgcacataacagcagtaccaaactaccagcagttgcgtgcatatatagaacagtttttttttttttttggcgttgtatagaatagaaccgacccaaaagatgcctgctgtcttgtagactaattatggggattcttcctatgcctaagctttctcttttcttctgtctcttttacagtttgctggattcgcttgtcctgaatcggtattgaactgtcgtgtgactatttacacctagtttccttccag

SEQ ID NO: 2397 - DNA, 1145 bp, Zea Mays
attatattttaggacggagaaaggttttgtaaattttattccgctagggctttgttcttgtttgccgccgccggcaccaccctcagtccccacatggccgccgcctgccttcgccgcctccaccgcatccctcatcctgtccttaagctcgccgcagccactcactggcccttgccattccccggtgccaagttggctccggtcacacagtcgtgcccatccgccgaccgcgtcgaagtacagctgagcgcccgctgccccggttttgcaagtaatggtaacttcaaacatcgatggcatcacaagctgggttcatcagttggtgctgtactgattggacatgcagccttttttcttggtttgagcaatggctctgcatttgcccaggaagattcagttagcccagctgcagctagtgagcatgctgagggaaatgctcctggtttacaaccgattgaagatggatcagtggtctcaaacgaacacacggtcaaatggagaatttacactgataatgcgcgggagtttttccagaaaagacaattggatgaggctgagaagttattccaggcagccctactagaagctaaggaaggatttggacttagagatccacatgtcgcgtcagcccttaacaatctggcagaattttataggctaaagaaagagcatgtgaaagctgaaccactatatttggaagcaattgagatcctggaggaatcatttggacctgatgatatacgggttggaagaactgtgcatagtcttggaatatgctatcatcttcaactcaagcttgctcaagcccagacatgttatgagcgtgctttgaagatagaaggacgtgttctgggggttggtcacccagagtattcaagtacaatgtacagtctagccaaggtgctcagtctacaaggaaaaagaaaaaatgcagaatgccttattgaagagtctattagaatacttgaggaagctgggcttggcgattcactaacatgtttacgaagaatggtctctctctctagagagttaataaaatcaagacgatttgctgaagctgaaatctggcaaaggaagatattacatgttctggagctttcagagggattggtggcaagaggcgtccgaagcagtgaataatccta

SEQ ID NO: 2398 - DNA, 1346 bp, Zea Mays
catatgaatagaaaagaacccctttgcgcaaggcaaacccccacccagctcacctcggcgatggcatcggcggcggccgtggagtgggaggcggcggcgcggaaggtgctggtggcgcgcaagccctgcttcgggctacctacggcctgcccaacctgcctccccgtgctcctctacctccgcatggcgcaggttcccttcgacatccacgtcgacacctccttccccgatgccgatcacataccatatgttgaatttggggattgcgtggctttcaacaacgagaaaggaggcgtaattgagtatctcaaggatgagaaaattgctgacttgaactcaaatcacccaaatatttcatccaccactgtgctagatacaaaggccatggtttcgtcctggcttgctaatgctttgctgtatgaactctgggtggttagtgctggaagcattgcaaatgatatctacttctctgatctcccttggcccattggaaagatactccattggaataaaactagacatgtgaagcagctacttggtataacaaagctcaatgctgcagaaaaagaagaggagatatacctgaaggcaagtgctgcttatgactcattgtctttcagattaggggatcaagtctttctatttgataataggatacatctgtgctgaggggcacattgcagaagcatgacaacttggttagctttgctgagcatcacaaggtccagttgctggaaacctcatcatcgtcatcgtcagggttaggatcatcacctagcccgtcatcatccacccccaggagaagaccatctgctgaccacagttataagccaaaacccagagccaagaaggaacggacggaggaggaaaagaaattcaggcgaagagcaaagtatttcctggccacacaactcgttgcagttcttgtgttcctttcgctgatgggtggggttgatagttccgagctagacgacgaagatggcttggattatgatgattagatcctccctgtgctgttacacttgattagttccaacgacaaactgcctggttggttcggggtgctgtgagaatttgttccaacattggaaaatgtgttacgcttgattttagctaggaattcactgagttggtcacccatcggcagtttcataagctacttcggctgtaaacatacttgtctccgaagtttttttttttttgggcttcagtgaaccaaacttgtaagcaaattcgaattttggagttttggttttggagacgcgctgcttctgtatgatgagatctgttggccgcaacatatttgggaggaaaaaaaataaggggctaaaatcccctgcttattt

SEQ ID NO: 2399 - DNA, 780 bp, Zea Mays
ttaatatgagcgtgctttggaccaaaaggacctcgctggtgcattatagcaaacactagtatatattgatgtttctgtacctcgccctctctctcctctaccccttttcctctaacctttagctttcctccctccctcctctctttctctcctctaacaagaacttagtcccggcagttcagatcctaagttgctgaccttgctgctgattgttggagatagatttgctgcttctaagttggaaataccatgagtccaccgagtgtgatggggcagtttggggacacgacctacaccaaggtttttgttgggggactcgcgtgggaaacccagaaggagactatgaggaagtatttcgagcagtttggagagatcctggaggctgttgtcatcactgacaagaacactggcagatccaagggctacggatttgttaccttccgggactcggatgcggcaatgagagcttgcgttgatcctgcaccggtgattgatgggaggagggctaactgtaatcttgcttcccttggggttcaaagatctaggcctcctactccccagcatggaggggctaggaactttaaagtgatgaaatctttcagccagcaggcaggaatccaaggtggactgggcgcagcttttccttctcatgccaccttccctcattatgccatcccacaaggcctcccctaccatatctatgggtactctccatataccctagactacggttatccaacaccgcggaaccatctgccctgtttcaaccacggaggtggg

SEQ ID NO: 2400 - DNA, 2189 bp, Zea Mays
ttaatatgagcgtgctttggaccaaaaggacctcgctggtgcattatagcaaacactagtatatattgatgtttctgtacctcgccctctctctcctctaccccttttcctctaacctttagctttcctccctccctcctctctttctctcctctaacaagaacttagtcccggcagttcagatcctaagttgctgaccttgctgctgattgttggagatagatttgctgcttctaagttggaaataccatgagtccaccgagtgtgatggggcagtttggggacacgacctacaccaaggtttttgttgggggactcgcgtgggaaacccagaaggagactatgaggaagtatttcgagcagtttggagagatcctggaggctgttgtcatcactgacaagaacactggcagatccaagggctacggatttgttaccttccgggactcggatgcggcaatgagagcttgcgttgatcctgcaccggtgattgatgggaggagggctaactgtaatcttgcttcccttggggttcaaagatctaggcctcctactccccagcatgaacttttataatatatatggaggacctcagtacacattttatggaggaggagctggcatggtgacaggaacaagtcccttttatccatatttccagtttgggcaatcaggaaacactactaccaactatacaagtggacaaggctacaacttgcaatacccacaaatgttccacttctcaactgtatcatctacagctgcagctgtgaacggctttgctcagcagtatggaggaccattgtcactagcagcaagtcctcaagcccaagcagtgtgtatccccattaaacaggcatgactatggcactcgcagctccaaccatgccaactccaacacaggctgctcatccttaccggttgattccctcagtgtccactgctccagagcaacccttggcctaaccatggtctcccttctcgtcattgctgtactgtctcgtttccaacttgtcgagtccatgcatccatctctaacaccaaaaggcactattgtagatcatgtttatcagccaaagtgctcacatccatatcccacatggtcatgtggtaactggatattagctttagccccaggatgggcacaaagcttcatgccccgaggatggggcgttctaacagacaagtacaaaccctaaccattctaaatatagtccaaggaaggactttatctgggagagttaatttcagctgtagcgagacaaggctgtaactaaaagatactaacagtcaagcatgacccaaggagggttcatgctgatactagtcaaattggactacaatgacagctaaataactgaactagcatgccactcccacatttcatcggtagaatcccaactgtacctagcttaggcctgacatttcttgttgaagcataaaccatttaggcaaacctacccttctatagtcctgctgttacggtgttacctagaccaaatgcatatgatatatgaccagcgactagtgtaaccaactcatcttttctttgcaaaagattagatgcaccaactaacaatttatttgatctttcagttgatagcttgcatctaggtggtcaaggctctaaggagagcctgtgcccctaatcagaaacaggttcagagtagtgccaatgtttgtttttagcacttggcactaccccctgtccctcgaaacacagcattggggactccaaagaaggctttggagtaaccaagcactgctgtgtaactcattaacacaatggacccatagatgaatttttgttgtcttgggtcaccccactcatgtagatgtcattacttctcagtgtcactaccatggttaggtccaggccccccttcactccctccctctctctctgcacagggcagagaccttagcactctttaatctactattaccaggcatggtggttgtaataataaattagcgctatgctacttgtaggacacgaagaactctgttattccacccttcatatgtacttaatatcctgtccatttcagttcagtagttggtacttatttccaaattccaaccattgtagtgcaccatataatgttgtgtaatatatgtccactgtgctgcacatttcttaatcatctgtcgttcagttgcatatattccaggtgaatgtactatta

SEQ ID NO: 2401 - DNA, 965 bp, Zea Mays
ctcggcctttcgggtctttcgctccccggctcttcgtctccctctcttgccgaatccaagccctaaaccatagggcttgcctggtgcccgggtgggctccccatggcggcaatagaggacgaggagatggagaagaaggtgcagcagtacctgcaccgcaaggggttccgcctcaccgagctcgcgctccacgaggagcgcagtcgcctctccacctccgacgtcgcgcttacccggtctgacaataatccagcaagataccatgagggatacagcagattaatagcatgggcgtatagttctcttgatcaatataagtgcactgcttgtagataaattgtacttaatattcagccaaagcatatcacgccttcaaactatttctaactgttaccttcaagtgatgcattttatgaatcctctgtgttctatggcacaaatttacttggcagacctcctctccttttatgaatcccatatctgtcatataagcatgattttgcacttgacaacttatgtaattctagtttttcaaaagggcgtttggttgtggcaggcaaactattttatgttgtgatctgattttttaacttacagtcttacgctccattctgttcttaaacttggcaatataattcatatttcttaattcagatattttttgtagcatgaattacttcgcgtcctttacccagtttttatccattgcttcatggatctagtggcagagggacatatgcacaatgctcggtcatttttccatacatttcgggaagctcataaggtgatgcattcaagggatcttcagaagctggaaggcatcctctctccttcacacttggaggaaacggaactggctcgatcttttaggaaaaaataaatttaaaattaaattatgcgaggaaccctaactctcccgggaccgacacgcttgttgcgccgccaggctgatactgcgccacgcc

SEQ ID NO: 2402 - DNA, 1016 bp, Zea Mays
ggccggggtacagtacaggatgcgggggttgacacgcgctgcgaaacgcgcaggggagatggcgttcaacgccggtggtggcgccgtcaactggttcccgggccacatggccgcggcctcccgcgccatccgcgatcgtctcaagctcgccgacctcgtcatcgaggtccgcgacgcccgcattccattatcctcagcaaatgaagaccttcaaccagtgctctcagcaaagaggcgaattcttgctctaaacaagaaggatctagcaaaccccaacataatgaataggtggctgaatcattttgaatcatgcaagcaggattgtatctcaataaatgcacatagctccagttctgttaaccagcttcttggttttgctgagctgaaactaaaggaagcaatctcaaaggagccaacccttctgattatgcttgttggtgtccctaatgttggcaagtctgcactcataaattctattcatagaattgctacttctcgatttccagcgaaagataaaaataaacgggctacagtggggccactgccaggtgttacacaagatattgcagggtataagattgcaactcagcccagtatttatgtgcttgatacacctggtgttcttgtgccaagcataccagatatggagacagggttaaagcttgctttaacaggatttagtgacggaggtgcagagggcactatgccgtacgttcctgaacttcactggcaacatcgaggaagaaagtgagctggaaaccctcatagacatgcagcttgtggagctccgcaaggtgttcaggataccccataagcctttcgatgaaacgcagggccctacctccaagaagctcctaactctcttcagatcaggaagcttgggccgttcatcctcgacgaccttcctgatggatctgagaaataacctgtttacttgattctttttattttgcactcggcagctgatgttctatgatggaaggcattggtacgagctgatgttcttgcagggagga

SEQ ID NO: 2403 - DNA, 3224 bp, Zea Mays
gtgtagcgccgctcgccttgccggcggagggaagacggaagacgagaggttattatactccgcgccagcgtcgcccgatggcaagcttcttcaacctacggtccggatcattggtgccaccatctcacagttctgttggcgacaggaacaattgcccagttccagggaccctcataaacactaataacatgaggggatttgaaaacctagatagagaacaacttctgaaagcagaagcaaagaaggcagcatccatgtatacatcattgcaaaagtggcgtacttctagtgaaacaacagttattccattctttctggttagtatatcctcagattcctctgcctctataagacaacttaaggaatggaaagcttgccaggggaactatcaaaagctgctatttggattttatgaccatggatgccgctcagattgccctggctgggttcttagaaactatgttgcctttctgagcatccgatggaagattgagaaagcccagattttctgctaccgtgaatataaagggaaccctgatctagaacagtccctcattggtgaagcatcatttccatcaccttatggttgggataaccctgaatttctacctgatgctattggatgggaaggagtaaagccagggaagggaacaaaagaaatgaaaccaaaagaaatagatcttcaatcaatgaatccagcaagtcaggatgaagaaaaacaattgatgcacttaaagcttatggggtggcgccactttcctgtgaatatagacaggttatcacatgttcgagttcttctcttgggtgctggaactcttggatgcgaagttgctcgccttcttatgacctggggtgtacggaaactaacggttgttgatagtggtagtgttgttatgtctgaccttgccaagcaatcactctacatagataaggattgtggagttccaagagtatctgcaatagctccacatctgaaagaaagatgtcctgcagtggaggttgaaagcatccaactggaaataccgatgcctgggcatcctgtttcttccagcaaaatggcaagtgtgcttgatgactgcaagcatctgcaaaccttagtggctgccaatgatgcaatcttcttgttaactgacacatgggagagcaggtggcttccaactcttctctgttcaagtgaaaacaagattgctattagtgcattattaggacatgacagttaccttgtcatgcgacatggtgctggaccaggaacaagtgggggtacagatgaagtgactactcagaaattgtccacagaaaatgctcttggtcatcaaagattgggctgttgtttctgcaatgataccgcttcccttattaatccaatttcttatgaaacactacctggacttacctcagttgcatctggcaaagcagtggagctctttgctaggatgttacatcatcctgacgagatacgggccccaggcgatactgctggtacagaaacagaacatcaacttggtctattgccacatcagctacgaggatcactccccaagtgtgatttatttgtggagctcaacaattcctcagtcaactgtactgcatgttctgttgctgtattgtcggagtatagaagaagaggattggattttgtcatgcaggctatcaactatccagcatatctgaaagattttacaggcatttctgattcgaaaagaccagatacttgtcctaaaataccgcccaacatctctgtaaattcagacaagatttctgatgtccgatgtctactattgggtgctggaactcttggatgtgatgtcgctcgcattcttatggactgtggtgtacggaagataacagtagttgatagtggtcatgtagttgtgtcaaatttagcgagacaatcactctatacttctgatgaccgtggtgctccaaaagcaactgcaatacttaggcatctagtggagagatgtccttcagtggatgcacaaggcattaaaatggaaatacctatgcctgggcatcctgtgtctcctggtgaagcagcgggtgtgctccaagattgcgagcgccttaaggaattggtgttgtcccacgatgctatcttcttgttgaccgacacaagagaaagcaggtggcttccaactctcctatgcactaacgaaaacaagattgctatcactgcagcattagggtatgatagttaccttgtcatgcgacatggggctggccctggcataagctgtgaagcttccagtgtggtcactgccatagacaagatgtccacggaggatgcccttgggcgtcaaaggctggggtgttatttctgcaatgacgtcattgctcctgtcgacgtaatgttccatgcttttggaaattgtacttgtttttgcttttaatatgttaccgactacaatcatggcgttatgtttggtgcagtcagtttccaatcggacactggatcaacaatgtacagtgacacgaccggggttggcctctattgcatcaggacgcgctgcagacctcttcagaagaatgttacaccatcctgatgggatacatgctccaggagagattgctggtacaggcagtggtcatgagcacggccttttacctcaccagatgcgtggatcactatcgcagtacaacatattaaccctgttgggctattcctcgagtaattgcacggcatgctcccatgcggtattgtatcaatatcggaggagagggatggatttcgtgatgcaagtaatcaatgaaccaacctatttggaagacctgaccggcctcacggagttgatgaaatccgcgtcttgctcacaggtcgagtgggtagatgaaattgatgaagacgatttcgtcgaggtctgatatgttacatggttttgacgactggtagatagtatcattctttacaacatggtaaagagatgacgaagcaatcaaagcaaccaccctatatatttgtaactcgctgctagctttttactctgtccgtcttaaaatgtaattcgttttaggctaaacctacattcattaatctgctccgtctcaaaatgtaattcattttaggctaaacctacattcattaatcaggtactcgtgaatgtagcttgaatgtatgtctacatttataatcattcaaataatttgaatgtggacttaaaaaaaagagggatatatattttgatacggggtgattatatatttgtaacgtacaaaaacaagtctag

SEQ ID NO: 2404 - DNA, 2242 bp, Zea Mays
tacaaaggctaagatcttcgcaaatcgaagcgccaagaaaatgggcagtcaggcagtgaaaccgcttcgggtatttcttctgatgatgcgggtttggagacgtcatctaatatgccagagaggacagcaacccttcttgacttgtattcgggctgtgggggcatgtccactggtctttgcttgggtgctgctctttctggcctgaaacttgaaactcgatgggctgttgatcttaacagttttgcgtgccaaagtttaaaatacaatcatccacagactgaggtgcgaaatgagaaagctgatgagtttcttgctctccttaaggaatgggcagtcttatgtgaaaaatatgttcatcaagacgtggattcgaatttagcaggttcagaggatcaagaggatgctgacactcttgacaaggatgaatttgttgtacagaagcttattggaatacgctatgatggcactggaaggaaaaaaggcgtatattttaaggtccaatgggaaggatatggtcctgaagaggatacatgggaacctattgataacctgagtgactgtccgctgaaaattagagaatttgtacaagaagggcgcaaaagaaaaattctcccgcttcctggtgatgttgatgtcatttgtggaggcccaccatgtcaaggtataagtgggtttaatcggttcaggaaccgtgatgagccacttaaagatgagaaaaacaagcaaatggtgactttcatggatattgtggcatacttgaagcccaagtatgttctcatggaaaatgtcgtggacatactgaaatttgctgatggctacctaggaaaatatgctttgagctgcctagttgctatgaagtaccaagcacgccttggaatgatggtggcaggctgctatggtctgccacagttcaggatgcgtgtgttcctctggggtgctctttcttccatggtgctccctaagtatcctctgcctacatatgacgttgtagtacgtggaggagcacctaatgccttttcgcaatgtatggttgcatatgatgagacacaaaggccatccctgaagaaagctttgcttcttggtgatgcattttcagatttaccaaaggtcgaaaaccatcaacctaacgatgtaatggagtatggtggttcccccaagacagagttccagcgctacattcgacttggtcgtaaagacatgttggattggtcgtttggtgaggaggctggtccagatgaaggcaagctcttggatcaccagcccttacggcttaacaatgatgattatgagcgggttaagcaaattcctgtcaagaagggagccaacttccgtgacctaaagggtgtcaaggttggagcaaataatgttgttgagtgggatccagaagtcgaacgtgtgtacctttcgtctgggaaaccactggttcctgactatgcgatgtcattcatcaagggcaaatcactcaagccattcgggcgcctgtggtgggacgagacggttcctacagttgtgaccagagcagagcctcataaccaggttatattgcatccgactcaagcaagagtcttgactatccgggagaacgcaaggttacagggcttccccgattactaccgattgtttggaccgatcaaggagaagtatattcaagtcgggaacgcagtggcagtccctgttgcacgggcactgggctactgtctgggtcaagcctacctgggtgaatctgacgggagtcagcctctgtaccagctgcctgcaagttttacctctgtggggcgaaccgcggttcaggcgaatgccgtttctgttggcactcctgcgggggaggtagtcgagcagtaaaaggatagcggagcaaccctggttggtattttgattcgagcccatccagtagcatgtttaccaataaataatcattggtcgtgctgattcttatggttggagatgaatgtatgtagggtgtactcgagctcgagtgcttgttgtactgtaggttgaggtttctcatccattggcctgcctatttgtggatgacgtttcatttcagattagcaatgtgcttatttaaggtttcgtcatgtacctgtattctacaatccactattgtttccaaagacagcatttgatccttgttcaacgcgagcagattttcgtccaccaaagctgtgtagggatcgaaatgtcaacaatgaattgagtcattcaatcatttgtctaatgttaatgtgtcctttgcatttat

SEQ ID NO: 2405 - DNA, 3254 bp, Zea Mays
gctccgcgccgtaaaaaattggacgttcccgctccctccatctttttggttcgggtttcgttttcccactgccgctcccgcctcctctctgccctgtttccacatttgaccgatcctcttcgattcgatttctacacccccagagcttgccaaacccctcgtctcccaaccctagagagcagcagcagcagcagcagctaccgcatcccttgccatggcgccaagctccccgtcatccgctaggcccacgcgcgcctccggccggaagcgctccgccatggccgaggagatccaccagaaccaggaggaggaggaggaggttgtggctgcgtccaccgccaagcgcagacgcaaggcggcgtcttccgggaagaagcccaagccgacgcccaagcaggccaaaccggccgtggcggggatgaagaagaagggggagaccgagaagacggagcccgttgtggacgacgtgtgcgccgaggagcccgacgaggaggagttggccatgggcgaggaggaggcggaggccgaggagcaggccatgcaggaggtggtggccgcggtcgcggccgggtcgcccggtaagaagagggtggggagaaggagcgccgccgcctcgggcgaccacgtgcccgagttcatcggcagccccgttgctgcggccgaggcgcacagcaactggcccaagcgctacgagcgcagcactgccgcaaataaaccggaggaggacgatgagctcaaggccaggtgccactaccggagcgctaaggtggacaacattgtctactgcctcggggatgacgtttatgtcaaggtcatcaattcgttggtgtcgattaatgttgatggccacaagcatgaccctagacgtgtttttctttccgaggaaaagaatgacaatgtgcttgattgcatcatctccaaggtcaagatagtccatgttgatccaaatatggatccaaaagctaaggcccaactgatagaacattgtgacctatactatgacatgtcttactctgttgcatattctacatttgctaatatctcatcagaaaatgggcagtcaggcagtgaaaccgcttcgggtatttcttctgatgatgcgggtttggagacgtcatctaatatgccagagaggacagcaacccttcttgacttgtattcgggctgtgggggcatgtccactggtctttgcttgggtgctgctctttctggcctgaaacttgaaactcgatgggctgttgatcttaacagttttgcgtgccaaagtttaaaatacaatcatccacagactgaggtgcgaaatgagaaagctgatgagtttcttgctctccttaaggaatgggcagtcttatgtgaaaaatatgttcatcaagacgtggattcgaatttagcaggttcagaggatcaagaggatgctgacactcttgacaaggatgaatttgttgtacagaagcttattggaatacgctatgatggcactggaaggaaaaaaggcgtatattttaaggtccaatgggaaggatatggtcctgaagaggatacatgggaacctattgataacctgagtgactgtccgctgaaaattagagaatttgtacaagaagggcgcaaaagaaaaattctcccgcttcctggtgatgttgatgtcatttgtggaggcccaccatgtcaaggtataagtgggtttaatcggttcaggaaccgtgatgagccacttaaagatgagaaaaacaagcaaatggtgactttcatggatattgtggcatacttgaagcccaagtatgttctcatggaaaatgtcgtggacatactgaaatttgctgatggctacctaggaaaatatgctttgagctgcctagttgctatgaagtaccaagcacgccttggaatgatggtggcaggctgctatggtctgccacagttcaggatgcgtgtgttcctctggggtgctctttcttccatggtgctccctaagtatcctctgcctacatatgacgttgtagtacgtggaggagcacctaatgccttttcgcaatgtatggttgcatatgatgagacacaaaggccatccctgaagaaagctttgcttcttggtgatgcattttcagatttaccaaaggtcgaaaaccatcaacctaacgatgtaatggagtatggtggttcccccaagacagagttccagcgctacattcgacttggtcgtaaagacatgttggattggtcgtttggtgaggaggctggtccagatgaaggcaagctcttggatcaccagcccttacggcttaacaatgatgattatgagcgggttaagcaaattcctgtcaagaagggagccaacttccgtgacctaaagggtgtcaaggttggagcaaataatgttgttgagtgggatccagaagtcgaacgtgtgtacctttcgtctgggaaaccactggttcctgactatgcgatgtcattcatcaagggcaaatcactcaagccattcgggcgcctgtggtgggacgagacggttcctacagttgtgaccagagcagagcctcataaccaggttatattgcatccgactcaagcaagagtcttgactatccgggagaacgcaaggttacagggcttccccgattactaccgattgtttggaccgatcaaggagaagtatattcaagtcgggaacgcagtggcagtccctgttgcacgggcactgggctactgtctgggtcaagcctacctgggtgaatctgacgggagtcagcctctgtaccagctgcctgcaagttttacctctgtggggcgaaccgcggttcaggcgaatgccgtttctgttggcactcctgcgggggaggtagtcgagcagtaaaaggatagcggagcaaccctggttggtattttgattcgagcccatccagtagcatgtttaccaataaataatcattggtcgtgctgattcttatggttggagatgaatgtatgtagggtgtactcgagctcgagtgcttgttgtactgtaggttgaggtttctcatccattggcctgcctatttgtggatgacgtttcatttcagattagcaatgtgcttatttaaggtttcgtcatgtacctgtattctacaatccactattgtttccaaagacagcatttgatccttgttcaacgcgagcagattttcgtccaccaaagctgtgtagggatcgaaatgtcaacaatgaattgagtcattcaatcatttgtctaatgttaatgtgtcctttgcatttat

SEQ ID NO: 2406 - DNA, 3438 bp, Zea Mays
tcccactgccgctcccgcctcctctctgccctgtttccacatttgaccgatcctcttcgattcgatttctacacccccagagcttgccaaacccctcgtctcccaaccctagagagcagcagcagcagcagcagctaccgcatcccttgccatggcgccaagctccccgtcatccgctaggcccacgcgcgcctccggccggaagcgctccgccatggccgaggagatccaccagaaccaggaggaggaggaggaggttgtggctgcgtccaccgccaagcgcagacgcaaggcggcgtcttccgggaagaagcccaagccgacgcccaagcaggccaaaccggccgtggcggggatgaagaagaagggggagaccgagaagacggagcccgttgtggacgacgtgtgcgccgaggagcccgacgaggaggagttggccatgggcgaggaggaggcggaggccgaggagcaggccatgcaggaggtggtggccgcggtcgcggccgggtcgcccggtaagaagagggtggggagaaggagcgccgccgcctcgggcgaccacgtgcccgagttcatcggcagccccgttgctgcggccgaggcgcacagcaactggcccaagcgctacgagcgcagcactgccgcaaataaaccggaggaggacgatgagctcaaggccaggtgccactaccggagcgctaaggtggacaacattgtctactgcctcggggatgacgtttatgtcaaggctggagaaaatgaggctgattacattggtcgcattactgaattttttgagggcactgatcgatgccactattttacttgccgttggtttttccgtgcagaggacacggtcatcaattcgttggtgtcgattaatgttgatggccacaagcatgaccctagacgtgtttttctttccgaggaaaagaatgacaatgtgcttgattgcatcatctccaaggtcaagatagtccatgttgatccaaatatggatccaaaagctaaggcccaactgatagaacattgtgacctatactatgacatgtcttactctgttgcatattctacatttgctaatatctcatcagaaaatgggcagtcaggcagtgaaaccgcttcgggtatttcttctgatgatgcgggtttggagacgtcatctaatatgccagagaggacagcaacccttcttgacttgtattcgggctgtgggggcatgtccactggtctttgcttgggtgctgctctttctggcctgaaacttgaaactcgatgggctgttgatcttaacagttttgcgtgccaaagtttaaaatacaatcatccacagactgaggtgcgaaatgagaaagctgatgagtttcttgctctccttaaggaatgggcagtcttatgtgaaaaatatgttcatcaagacgtggattcgaatttagcaggttcagaggatcaagaggatgctgacactcttgacaaggatgaatttgttgtacagaagcttattggaatacgctatgatggcactggaaggaaaaaaggcgtatattttaaggtccaatgggaaggatatggtcctgaagaggatacatgggaacctattgataacctgagtgactgtccgctgaaaattagagaatttgtacaagaagggcgcaaaagaaaaattctcccgcttcctggtgatgttgatgtcatttgtggaggcccaccatgtcaaggtataagtgggtttaatcggttcaggaaccgtgatgagccacttaaagatgagaaaaacaagcaaatggtgactttcatggatattgtggcatacttgaagcccaagtatgttctcatggaaaatgtcgtggacatactgaaatttgctgatggctacctaggaaaatatgctttgagctgcctagttgctatgaagtaccaagcacgccttggaatgatggtggcaggctgctatggtctgccacagttcaggatgcgtgtgttcctctggggtgctctttcttccatggtgctccctaagtatcctctgcctacatatgacgttgtagtacgtggaggagcacctaatgccttttcgcaatgtatggttgcatatgatgagacacaaaggccatccctgaagaaagctttgcttcttggtgatgcattttcagatttaccaaaggtcgaaaaccatcaacctaacgatgtaatggagtatggtggttcccccaagacagagttccagcgctacattcgacttggtcgtaaagacatgttggattggtcgtttggtgaggaggctggtccagatgaaggcaagctcttggatcaccagcccttacggcttaacaatgatgattatgagcgggttaagcaaattcctgtcaagaagggagccaacttccgtgacctaaagggtgtcaaggttggagcaaataatgttgttgagtgggatccagaagtcgaacgtgtgtacctttcgtctgggaaaccactggttcctgactatgcgatgtcattcatcaagggcaaatcactcaagccattcgggcgcctgtggtgggacgagacggttcctacagttgtgaccagagcagagcctcataaccaggttatattgcatccgactcaagcaagagtcttgactatccgggagaacgcaaggttacagggcttccccgattactaccgattgtttggaccgatcaaggagaagtaagttccatcttttcagtttgcttgtacttgatctattaactcttggcagttgtcagctgttaaggattgatcagtcaattacagctcttgaaatcagaagcagttactgacataaactgcacggcgatgtgttactaacatgtgggcctagggccctaggtgctttagacccatagggatcatgctgcattgcaatccttctgaacaatgtgtgctttctcatggctataggtatattcaagtcgggaacgcagtggcagtccctgttgcacgggcactgggctactgtctgggtcaagcctacctgggtgaatctgacgggagtcagcctctgtaccagctgcctgcaagttttacctctgtggggcgaaccgcggttcaggcgaatgccgtttctgttggcactcctgcgggggaggtagtcgagcagtaaaaggatagcggagcaaccctgggtgtactcgagctcgagtgcttgttgtactgtaggttgaggtttctcatccattggcctgcctatttgtggatgacgtttcatttcagattagcaatgtgcttatttaaggtttcgtcatgtacctgtattctacaatccactattgtttccaaagacagcatttgatccttgttcaacgcgagcagattttcgtccaccaaagctgtgtagggatcgaaatgtcaacaatgaattgagtcattcaatcatttgtctaatgttaatgtgtcctttgcatttat

SEQ ID NO: 2407 - DNA, 3223 bp, Zea Mays
ccgtctgccagcaggggcactcgccaccaggttcgccggattcatcgccccattccgctctgggctaaggttccaccagcacaaccctatggcagaagcagtgctccttgctgtcactaagattggttccgttcttggagatgaacctgccaagaccattataaacaagctgtctgaaaaaattcaagctctgagggaactcccacggaaagtggatcacataaggatgaaactaataataatgagcaaagttatacagcagattggcacagtctaccttacagatgaacttgtgaagagttggattggggaggtccggaaggtggcttaccgtgttgaggatgtagtagacaaatactcataccatcttcttcaactggaggaagaagggtttctgaagaaatttttcgtcaagggtacccattatgccattgttttcagtgaaattgctgatgaggtagctgagatagaagaggagattcagcaagttattcagatgaaggatcagtggttgcagccatcccagcttgtccctcaccctgagcaactcgctgaaatcgaaagacagcgttcccaagacagtttcccagaatttgtcaaagatgaagatctagtaggaattgaagaaaatagaaaattgctgactggatggatttactcagaagagcaggctagcatggtgataacagtttctggtatgggtggactgggaaaatctacactggttacaaacatttatgaacgtgaaaaggtcaacttcccggtacatgcttggattgttgtgtcacaggtctacacagtcgagtctttgttgagaaagctactatggaagattgggcatatgcaaccaccagtgccaagagagattgacaaaatggatgtacatgacttgaaggaggaaataaagagaaagctccagaatagaaaatgcttgattgtgttggatgatgtttgggagcaagaagtatacttcaaaatacatgatgctttccagacactccatggaagccgcatcatcattacaacacgaaaggaccatgttggtgctattgcttcctttgaccaccatcttgagctccaaccgttgtgtgggcctgatgcatttgaacttttctgtagaagggcttttcacaacaagaaggaccacaaatgccccgaggagcttaaggaaattgctggtgaaatagtgaaaaggtgccaaggcctgccactagcaattgttacagtcggcagcttgctgtcatctagaccacaaataaacatttggaatcaaacatacaaccagcttcggagtgagttgtcaaccaatgatcatgtccgagcaatcttaaatctaagctaccatgatctatctggagatctcagaaactgcttcttgtattgcagcttgtttcctgaagactaccccatgtcacgcgaagcccttgtgcggctctgggtcgcagaaggttttgttctgagtaaagaaaagaatacaccagaggaggtggctgagggaaatctcatggaattgatccaccgtaatatgcttgaagttgtagactatgatgagcttggcagggttagcacttgcaagatgcatgatatcatgagggacctggcactttgtgttgccaaagaagagaagtttggttctgcaaacgattatggtgaactgatacaggtggaccagaaggttcgtcgcttgtcgttatgtgggtggaatgttaaggcagcagctaagtttaaatttccatgtctccgtactcttgtggctcagggaataatttcattctctcctgacatggtatcctcaattatgtctcaatcaaattatttgacagttcttgagctgcaagattctgagatcactgaggtgccagcatttataggaaatctctttaacctacggtatattgggttaaggcgcaccaaagtcaagtcactcccagagtctattgagaagctcctcaacctccacactctggatatcaaacaaactcaaatagagaaactaccacgagggattgttaaggtcaagaagctaaggcaccttttagctgacaggtttgctgatgagaagcagacggagttcagatatttcatcggagtggaagcacctaaaggtctgttgaacctggaagaactacagactcttgaaacagtgcaagcgagcaaagacttgcctgaacagctgaagaaactgatgcaactcagaagcttatggatcgacaatgtaagcggtgcagattgtgataaccttttcgcgactctttcaaccatgccacttctttccagcctcctaatctccgcaagagatgtgaatgagacactttgcctccaagcccttgctccggaatttccaaagctccacaggctaattgtaaggggccgctgggctgccgagacactggaatatccaatattttgcaaccatgggaaacatctaaaatatttagcgcttagctggtgtcagcttggtgaagatccattgggggtccttgctccgcacgtgccgaacctcacctatttgagcatgaacagggtcagtagtgcaagcactttggttctttctgcagggtgctttcctcacctgaaaacactcgtcctgaagaaaatgcctaacgtcgagcagctggagattggacatggtgctcttccatgcatccaaggtctgtacatcatgtccctagcgcagctggataaggtccctcaaggcatcgaatcgcttctctccctcaagaagctttggcttctgtacctgcacgcggagtttagaacgcagtggctaacgaacgggatgcaccagaagatgcagcatgttcctgagattcgtgtctaggacacaggaaagccagatggttatttctgcagtactatgctggtatatatggtgtgtctgtgaaaaaactattttttgtaccttttcttcccttaagtcctgagttgttgtatgtggacttcacttgcagacacaaacgctcgctttgggtagctcgttagacccatatatatacgtgttgtgttggttcagttgctttaagttacttgtttgttcgaggcatttgccttctgtattgaacttcatgcaaatgatgttatgatcaaacttgtatgtccatgtattttaaatttttttacatgcctcatagaaagtatggattcccatatcatcatttgtctgatcggctaaaaacaatattgtatatgagaattggagaaaatcatattggtgatacattag

SEQ ID NO: 2408 - DNA, 1514 bp, Zea Mays
aaggaaatctgggcctttaatcgtcgtcacctagctcgcggatggtccgcacgcagtttccaccgtcagtatcgcattggagtgaaacaactcccatcattgccaccgattaggaacttaggaatggactcgccggtgcctgctacgctcgcgcgcgcgccagcgagaccgcaagcgcgggcgggcgaggaggcttgcgcggatactcggcaggatgctccggcggaagcggagccacctccccgtcggccggccgcgttctacagctccgtgttcgcgcagatcgaagagatcgggtggaagcagctggtgagcgccacaggagacggagtgtcctgtctcaccttccgcgtcgtggatgaaccaggacggatgcatttactggagatcacactgcccatgggctatcccgaaagtcctccttcaatctctgcagacgtaccatatctcccgaaaatacattggtcaaaaaactcaagactgaaagatgttatttgccaatttcaagcgcacttgaaaatcttgcaagagttctggaatacgatggacgagattgataaggtcctttggattgttgatccaacaaagccgtcttatgctatgtctcatcgtcgtatagctttaggtgacgattgctacattttgttgcaagttgatgcacgcaagcccaactccttaccagagtgtcgcttcttgggcacagatggcaaacttgatcagctgataataaattggagaaagaaccgtaaaaaatgggatacaaagaaaaaattccatgagaatttggcagccgtcttggactttgcactgccttcacccccttcggtcggtgataaagcgaaagatgacgagcaagctgattgtgggatatgttatgccaagcatctgccagttgatgacgaactcggtgcccacagcgggtgtgcgacggactacatgtgtgagaaccccagctgcagcagagccttccattccgtgtgcctgagagactggttgcgctccatcaccacgactaggcagtcgttcgatgtcctgttcgggaactgcccctactgcagcgatcccgtcgccgtcaagatcaccggccactaacactgtatcttggtcagcgtttacaaagtcagccaggcgattttaggggaaaatgggagatgtgtgaaggaggtgtcgagaagagtgacacagacgctctggaggcctcttttcaagccaaaaaaattgggaggagccgaatttatacattggtgctttggagaaaatggcttgggggccggagcgcatttcttggaggatgaattctgatgaggtagatagtggagataatacaaaagataatggctggagtatgtctaggacctttgagccactttggagatgttttggagaatagcggacgcgcttcgaatacgttactgatgtaataatctcatgctgttacgctttatttcgggaggaatatagtgggggcaaacctttccgtctaaaaaaataacaaatgtcactttattttcctc

SEQ ID NO: 2409 - DNA, 1619 bp, Zea Mays
accgtatggaccgtttggctcgaactgtcttgagcccaaggaaatctgggcctttaatcgtcgtcacctagctcgcggatggtccgcacgcagtttccaccgtcagtatcgcattggagtgaaacaactcccatcattgccaccgattaggaacttaggaatggactcgccggtgcctgctacgctcgcgcgcgcgccagcgagaccgcaagcgcgggcgggcgaggaggcttgcgcggatactcggcaggatgctccggcggaagcggagccacctccccgtcggccggccgcgttctacagctccgtgttcgcgcagatcgaagagatcgggtggaagcagctggtgagcgccacaggagacggagtgtcctgtctcaccttccgcgtcgtggatgaaccaggacggatgcatttactggagatcacactgcccatgggctatcccgaaagtcctccttcaatctctgcagacgtaccatatctcccgaaaatacattggtcaaaaaactcaagactgaaagatgttatttgccaatttcaagcggtaggtgaactgtttatatcgcctaaaacatatggttgtcctattcgtggattgttatgttgtgttgttctatgttattgggttcacacaatcagcacttgaaaatcttgcaagagttctggaatacgatggacgagattgataaggtcctttggattgttgatccaacaaagccgtcttatgctatgtctcatcgtcgtatagctttagttgatgcacgcaagcccaactccttaccagagtgtcgcttcttgggcacagatggcaaacttgatcagctgataataaattggagaaagaaccgtaaaaaatgggatacaaagaaaaaattccatgagaatttggcagccgtcttggactttgcactgccttcacccccttcggtcggtgataaagcgaaagatgacgagcaagctgattgtgggatatgttatgccaagcatctgccagttgatgacgaactcggtgcccacagcgggtgtgcgacggactacatgtgtgagaaccccagctgcagcagagccttccattccgtgtgcctgagagactggttgcgctccatcaccacgactaggcagtcgttcgatgtcctgttcgggaactgcccctactgcagcgatcccgtcgccgtcaagatcaccggccactaacactgtatcttggtcagcgtttacaaagtcagccaggcgattttaggggaaaatgggagatgtgtgaaggaggtgtcgagaagagtgacacagacgctctggaggcctcttttcaagccaaaaaaattgggaggagccgaatttatacattggtgctttggagaaaatggcttgggggccggagcgcatttcttggaggatgaattctgatgaggtagatagtggagataatacaaaagataatggctggagtatgtctaggacctttgagccactttggagatgttttggagaatagcggacgcgcttcgaatacgttactgatgtaataatctcatgctgttacgctttatttcgggaggaatatagtgggggcaaacctttccgtctaaaaaaataacaaatgtcactttattttcctc

SEQ ID NO: 2410 - DNA, 1120 bp, Zea Mays
cttaaatcccctcctcacccctcctgcctcaccagatttgatgcacacggcatgcaaatcctgcaggctgttgcttctcagcagggccaaaagctgtgcctttggcctagcagtagctaccactagtaccaggagatcttcccgtcccaacatcttcgacagaggaatcagctgtgggagctcgtgaggcagagggcgggcagagacaagatggagaaggaacacatcaagatggccatgctgaggcaagagcaaacattcaggcagcaggtacaacttcattcctgctcacacacaggttcagaagcagctgatgacgcagacgcagattacccagcaccaccagcaacggtgtggtagctcaggcaagacggaggaggaggaggacttcaacctggagctgacgctggcaacaggggctggaaggacgcggcaggagaagccatccacttcagactccgaagcgaccatgtcgtcgtcgacatctgcagaatcagagcaagctcagaggttcatgcccagttccaatgtaacaaacctaaggttccagggcgagagcaataggcatgatgatcatcaggtcatgcagtctgcttggcgctatcaatgtttaagtctcaagatggcgtgaagggattaattagacagggttggcatgggagtgccctaaacaaaagcaagtgcattgctgcatgtatgtatgtatattacgatttcattgcaactgtaggaacgagctcaaaaaagaaggaaatgataggcaaactaaaatgaaccagacgagaagaaaaagaatcaaatcgtgtctgttgttgttttgtggcaaagagaacagggccacttacatctagataaccagatacagagagtttagttcaagtaaatgtacttttgagcaacaggatcaaagaccgtacaaagatgtcatcatacaagaccaatggacctagtgtaatttgcccaccccttggatccgcctctggtggacataagtgaatgaacgcattggaagcaattcctctatctaaaatctgtaatcgttggtcgataataaaacgacagataacgtcctagagatccaagagatgtccattaagtctgccttgtacaaagaatcgac

SEQ ID NO: 2411 - DNA, 2377 bp, Zea Mays
aggggaccaggaaagcgctctttgcatctccgccggtccgtccacggtgtgaatcgcgtggtccgccgaacctcagaatagccgctcgaaccgcttcataactcccaccgcaccggtcgccccggcgcgccggcgaggtgacctactgacctcgacgagcgcgcgacgttgaccggggcgtgcatccggccgcatcttgtcctcgttccttacgcagaggagcgccgctccaaaatcgcagaacgccaaggcgggcgtagcgaaggatgtcggaggccgtcgccgcaggcgagtcgcccgtcgagctgctgctccgcgcggcggcgatggtgcccgcagagcgctacgcgctggccgccatcatcgtcgtgtccgtctttctgtaccgcttcctcgagctccatgttatcggcgacatcctccgcggcttccggggcggccgcgtcgagctcaccttccaccccgcctcggagatctaccaccgcgtcgcgtccaagtgccgcttgctccacggcaggtatctggcgacaccatggctggcgagcccgcatttgcagacattgttcctgggcatttacgggacgccgccttcattcacatacaagagacagttgtacactgttcgtgatggtggaaccattgctttggattggctgttcgcatctgatttggaagatggattcatttcgaaagacgcttcaacaccccttgtagttgtggttcctggattaactagcgattctgctgctgcttatgtaaaacacttggtttactccatggcaagcaaaggatggaatgttgttgtaagcaaccacagaggtcttggtggtgtgtccattacttcagattgcttctacaatggtggttggacagaagatgtccgagaggtcattacacacctgcatcacagatatccgaaaaccacactgttttgcattggtacaagcataggtgccaatattgtggtcaagtatcttggagaagaaggcgagaatactcctatagcgggtgcagtatctatttgttctccatgggatctgttgataggtgacagatttatttcccgcaagcttgtacagcgtatttacgacaaagcacttgcaattggtctgaagggctatgcaaaattacatcaacctgtcttggcccgacttgcaaattgggaaggtattaaaaagtcacgatctatccgagagtttgaccaccatgctacttgtgttgtctcaagatatgagacagtggatacttactatcgccggtgcagtagtgctagttacgtcggaaatgtgtcagttcccttgctttgtatcaatgctttggatgatcctctttgcacaagggaggctattccttgggatgaatgcagggccaataagaacattgttttagcaactactccaaatggtggtcatcttgcattctttcaaggactaactgcgcggagactatggtgggttggagctacttctgagttcctttctgctcttcatgacagctcctacatgcataggcagaaggcaaatgatcatgttttgctctcgtctttggaatcctccattgataagagtccgtatgttaatctcatggaagatggaatggtagctgcggtaacaaaagatggccctagcaatgacgggtcacctttgaaccatgcagctgatgaacaattaagtaacgaggcgggcggtggacaacagaatgtggtatctgcattgaaccataatgaaaactccattggagtgggaaacgacagccctgcagagccagtaaaacagcaaggtgatgacatccacagcaataagcttcatgagataattgctcctgtcaagagatctatgagccaactgactcgataccaagggaggtcagtctggttgcttgcctacattgcttttgtaacatcctggccgctgcttggctccctagctttcatcaccttccggaaaaagtccaggaatccgttgcgagctaaatgaatcatacttatattatgttattacaattacatcatgcaacatcctctgagctacgaaggccatttttccccgggtcgtcacagctcctgtgtacagtatcatcaccgatcatcagcaaacattgggggcgcctggataaactgatactttgtaatttgtattgtatttacaacaaaataatacgcaggataagcatctgtgtaattttactcggtaaatctggctggatttgctgtttggcatctgtcgagcttaacattatttttaatccaaaggatgcgaaacgtgtggtgaatgaacggtaaaaactatcagatagttgaggcgggaattttaattttaatttattactacttttttgttggtgggtggaaagagcagtaccttttgatgtggcgacg

SEQ ID NO: 2412 - DNA, 3041 bp, Zea Mays
gttcacttcaatcctccctgaatgggacgtatcacaaatggcagaagcaataatccttgctctgagaaagattggtagcgctttagcagatgaaactgccaagaaaatgctggccaaattgtctgaaaaggttaacaatctgagggatctgaatgacaagatcgagtcaataagaatgcaactgacagccatgaacaatgttatacgtaagattggcacagtatacctcactgatgaagtcgtcaggggatggattggggaagtgcgcaaggtggcctaccatgttgaggatgtaatggacatgtactcctatcacacacttcaaatggaggaagaatggttcctgaagaagtacttcattaaagcgtcacattatgtcttggtttttagtcaaatagcagaagaagttatcaaggttgagaaggagatcaagaaagttgtagaactcaaaaatctgtggttcgagccttcgcaccttgttgctgatcagctaattgagatggaaagacagcgttcgcacgataactacccactactttttaaagatgaagatcttgtggggattgaagataacaggagaaggctcaccgaatggctatattctgatgagcttgacagcacagtgataacagtatcaggcatgggtggacttggaaaaactacccttgtaacaaatgtttacgagcgtgaaaaaaccaatttttctgctacagcatggatggtcgtgtcccagacctacactatagaagctctgcttaggaagttactcatgaaggttggtcgtgaagagcaggtgtcacctaacattgacaaattggatgtccatgatttgaaagaaaacataaagcaaaagctcgataatcgcaaatgtttgattgtattggacgatgtatgggaccaggaagtgtaccttcaaatgtctgatgcattccaaaatcttcaatctagtagcatcatcatcacaacacggaagaatcatgtggctgctcttgctcagccaactcgtcgccttgttgtccatcctctgagaaacactcaggcatttgatctcttctgcagaaggattttttataacaaggaagaccatgcgtgccccagtgaccttgtggaggttgctactaacatagtagacaggtgccagggattgccactagcaattgtatcaatagcttgcttattgtcttcgaggacgcaaacatattacatctggaaacaagtttacaatcagcttcggagtgagctatcaaaaaatgatcatatccgggcagttttgaatctgagctaccatgatctaccaggagacctaagaaattgcttcttgtactgcagcctcttccctgaagattaccctataccacatgagagcctcgtcaggctttgggttgcagaaggctttgcattgagcaaagaaaacaacacagcagaggaggtggctgagggaaacctcatggaacttatccaccgcaatatgcttgtagtagtggaaaatgatgagcaggggagggtgagtacatgtacaatgcatgatgttgtgcgagatcttgcccttgttgttgcaaaagaggagaggtttggcactgcaaacaactatagagcaatgatacaggtggacaaggataaagatgttcgacgcctatcatcttatggatggaaagacagtacatctctagatgttagacttccacgtcttcgaactctagtatcacttggaacaatttcatcctccccaaacatgctattgtcaattttgtctgaatccagctaccttactgttctcgagctacaagattctgaaattaccgaagtgccagggtctatagggaatctgtttaacctgcgttacattggcttgcgccgtacaaaggtcagatcactacctgattctatcgagaagctcctgaacctccagactctggatatcaagcaaacaaaaatagagaaacttccacgaggaatctctaaggttaagaagctacggcaccttctagctgacagatatgctgatgagaagcagtcacagtttcggtacttcgttgggatgcaagcgcctaaagatctgtcgagcttggtagaacttcagactcttgagactgtggaagccagcaaggacttggctgaacagctgaagaaactgatgcagctaaggactctgtggattgacaatattactaatgctgattgtgcaaatatttttgccagcctatcaagtatgccactcctttccaacttgcttctttctgcaaaggatgaaaatgagccacttcgcattgaggctctcaagcctgggtccacaggactccacaggttgattatcagagggcaatgggcgcagcgaacattgcagtgcccaatatttcaaggccatgggagacacctcaagtatttagctctaagctggtgccacctttcagaagatccactggagatgctcgctccacatttgccaaacctcacaaatctgagactcaacaacatgcgtagtgcaagtatattggttcttcctccaggatcatttcacaacctgaagttgcttgtcctgatgcacatgcctaatgtcaagcagctggtgattggagaaggtgcgctccaatgcatcgaaggtctgtacattgtgtcactggtggagctggataaggtccctcaaggcattgaatcgcttcgctccctgaagaagctctctcttgtcaagctgcacagggacttcctgactgagtggaacaacagcggaatgcatcagaagatgcaacatgtccaagagattcgtgtttaacgtggcagatggttccttctgcagtactattcaatttcaaccctccccaataagtactgtcattcacaccgtcgacagctccacatttcaatttcatctatactttttttttctttttttcatctatacttgtggtgactagtgcaatctaatcgtggttgtcttggggtagctggcctcagtttgtgctgccttttcagtttccctctcttcttgattttattgtaagaacaagttccattttaattcaacttctatattttgttaataa

SEQ ID NO: 2413 - DNA, 2467 bp, Zea Mays
gcgcgcgagtgaccagtaatataacacacactaatcaaacaccacatatatcttgcgctctccaaatccctcgccgaaagcccgaaacccttccagtggtcttccgccgccaaccctcgccgctcttccgctgccaaccgttgcgccggcccgactctgtcctgaagccgtggcgtacgggggattcacttccattcgacgccatctggcctcctcttccatctcgcgggcgcttgttcgtgcgcgtggattgttttatcagggtctcgtgcccgtgccctaggtgggcgcgtccgctatgtttcctcccaaagggcccaatcactatggccagcagctgccttacggcgtgcagcagccgtacggccaaatccctagtagcactggatttgcagccccggcagcggcaggtggcactgatggtggtcggtttggtgcgcgtgcaggacaaggggctgctgcgcagtatggagggccttatgcatcagtatatggcacacaacaggttggcggacttggtggcaaaggtccagcttcttcaagtcttcctagtttcccaactcgtccaacttctctccctgagtcgtccaacttctcatctgcacctgtggggtctggcctggcaaggccaaatgatgactatatggctgtgcgtggttatgcacagaagctagaccaatatagcactgattatccactagagagacgtatgtatggtgaacactcagccaatcttggtaggagagatggtctcagtgatttggatagaagatatactgatcagacagctactggtcatcaggttcatgatcatatggagcagagttcatcaatgcgccaccagcagctcctgaaaggtcagctgcagcccggatctgatacaagacaagccgattactttgcaggaagatctgctccagcccatcaagcatcccaggaaattggtgtatatggaagagttgaagctgataatcgcaacatatccattcttgggaatgctccatatggaagacagcaatcagcctcattgttggaaggagctccaaggacaaacatcgacagcctctatggacaaggatcgtcaggcactggttttggtgcaggtcttcctcctggacgtgattatgcctcagtgaaaggcctgccccatccatcttcagaccctgatcaccgagatagcatcttaccccgtgtacatccagccgtctcaatggttgatgatcgtagagttgatcgaattggttatcgtcgtgaactggatctaagagatgaggaacgcagaagggacctaatactggaaagagagaaggaacttgaacgggaacgggaacgagaacgggaacgtgagttacgggactttcgagatcgtgaaagggaaagagaacgtgaaagggaaagggatcatgaaagactactaagagaacgtgaaagagaaagggaacgcgaacgcgaacgtgaaagagagcgcgaaagagaacgccttcgtgagcgccgggagaaggagagagagcgggataggaagcacagaactgatccaaggcgggagcacactccacctagaggccctggtgatcggcggcggtcttcttctgttagatctgagaagcctgtacggcgaatttcccctcgacgtgatgctgtgcataggcatcgttcacctgttaaagaaataaagagagaatatatttgcaaggtttttccatttcgcttcgtggatgatgagagggattatctgtgcttgacaaaacggtatcccagacttgcagttactccagaattttctaagattgtcttgaactgggctaaagaaaacttaaatcttcctctcgatacaccagtgagtttggagcatgatatccatgattcagatgataatgctgatgaaggagcaattatctccactgagaaaacaccaagcttcaatactccagccaccatttggaatgcaaaggtactattgatgagtggcatgagcaaaggtgcctttgctgacataacttcattgagaagtactgaggaacgagttgtgcacttgaacaatatattaaaatttgctttattcaagaaggatcgttctctatttgcaattggaggcccttggaatgcagcaatagatggtggtgacccctcagttgactgttcttgcttgattcaaactgccatcagatgtgttaaagaaatggttcaagttgatctatctagttgcacccactggaaccgttttgtcgaggtacattacaatagaataggcaaagatggactcttcagtcataaagaaattactgttctgtttgtgccaaacttgtctgaatgcttgccttcagtggatatatggaagaataactggattctgtacaaaaaatcaaaggcagaaagggaagaactcactgttaaaaaggaaaagagtcctggtgattcgaaagagcagatgcaaggggagctgaataagggtaaaagtttagatgct

SEQ ID NO: 2414 - DNA, 2073 bp, Zea Mays
cggggcgcgtccatccggtccggacacccgagtacccgacctgcttgctcatcgcgcgcacccgccaaagcaaccaaccgccccatcgtccccgtcctgttccggcaggcagccgctcccgctcccgctcccccaccccactccccctcgcgcggcgcgttctcagatcccccgcccggttggcaccggcaccccggtccgaaatgcgaggagccttgtagcgcctcggagcacggacggaatcgcgccgcatgcatcccaagcccgagggcggcggcgacgacgacggggccgccgcggaggtgggctccccgcggtccggctacttccggcagcggagcatgcacgccgccgccgccgccgcggatccggaggcggcgcgccggccgttccacgtcgagaacccgccttgctccgccggcggggggctgcggcccagcgagtccgtcaccaagctggagtcgctggagcgtgccgcgctggcgcccgccgtggtgctcaggaccgggttctacatcctggtgtggtacgcgttcagcacctgcctcacgctatataacaagacgctgctgggggataagctcggcaagttcccggcgccgctgctgatgaacaccgtgcacttcgcgctgcaggcggggctctccaagctcatcatctggttccagcccaaggggcccgaggccgccgtcgacatggggtggaaggactacttcatgagagtcgtgccaactgctctcgggacggccttggacataaacctgagcaacgcgtctctggtgttcatctcggtgacgtttgctactatggttggagaatcctagcatcaagcttctaggaattatagttgttatttctactggagttctgttgacagtttccaaggagacggagtttgacttctggggcttcatttttgtgacgcttgctgctgttatgtcaggattccggtggtccatgactcagattctgttgcagaaagacaattacggcctgaagaatccgattaccttgatgagccatgttacaccagtgatggccatcgccactatgatactatctctattactggatccttggagtgaatttcaaaagaattcatattttgatagcccttggcatgtcatgcgcagttgcttacttatgcttatcggaggatccttagcttttttcatggtgttaacagagtatatacttatttcagcaacaagtgccataaccgtgacgatagctggggtagtaaaagaagctgtaaccattttggttgcggtattttatttccatgatgaatttacttggttgaaagggtttggtcttttcaccattatggttggtgttagcttgttcaattggtacaagtatgagagattcaaaaggggtcagataaatgaggatgacgtcagctctccatttactggtgacgtcaagtacattattatagacgacttggaatatcagaatgaatttgaggaagatacataattctgtaatacagtgaattctaactgccactggcttgttcatgcctgaacctattgaaatagtagttacttatcgaggttttctccggaaaacatgcacgaagaacacagctaaggctaggtgtgattatactatgcacaccaaaatctgatgtgagctatgtttgtcacgatggatgttcaattctcgtcttggttgaacagccaggctgactacactgtcaagcaaagagctaactccatcggatcagaattcccattttgagaagactagcagtgggttgcatattgatatacatgcttatagcgggaactgctgagaatgctccggcatctgtatatttgttgttctcttcgcgttagtgcgctgggcgcatattcattcttgaacctccacatttttagtgacgaggtgtattcattctctatataggtctgttttgtaaatgtgaccagaggataccatacacgtgctgttttcccttgaaacctagggagcggcatttgattttttctgtagactgtttcggggtaccgaatatgttgtggatatttgattgaagaattaagaacagcagggtagattggctaa

SEQ ID NO: 2415 - DNA, 1828 bp, Zea Mays
ggtcgctatagagcaaggatcactatcaaatcttatagcctgaacgtacctgtagatgttagtgactaaaaattaattaaaacaagtaaacattaatcgctaaattgcatggtgatttatttctttttaatattgcttgtatatttatttcatggtttgtttatgtatggacatgactataatatgcaattgtgttctttgtgcttatatgatattagattcgagttgaaagtcgtttcaaatgtttgttatttatttgcattcgtaataatttattcaaatgtctattatttatttggtaatttttttaatcaatttttgattaatttaaaaatgcatttcgaaataaaaaaagaaaagaaaaccctccctaaccctaaggcccactagggcccatctacctaactctccctcccacgccgtccctatctcctcccgacatcgccgtcgtcgcccattcgcccccgtccctgcagtcgcccgtgctccgcctgctccaccagggcgcctcgccctaggggatggtctccgaccacctcccttcaccgccaccacgtgctcagtgacgcctaggtcatcggcgctgaagtttggaggccctgtacgtgcttcacagagatcgccgaccatgggctacgcagagatcgccatccgcccctctgggagcggcaagaggttcctggagaccatgaaggccatacagggggcactgataatgtcctccagcattcagatcattctaggctacaaccagctatggggtattttctccagaaaatacagaggcagggtggcctatctcgaagattttcaaatgtgtcctattacggtctcacaaccccgccatataaactggatgctctggaaccttatatgagcaagaggacagttgaacttcactggggtaagcaccatcaagattacatggatggcttgaataatcagctggctaccagccctctgtatggatacactctggaggatctgataaaaaaagcttataacaatgacaatccattaccagagtataacaacacagcacaggtaactcgtttatgataccccattcattatattttgcttgcactgaccatcttcttcctgtcatttgttttctttcaaaaagaaaaataatgcaatttgtgctttcgccaatagtaggatggttgggtttggcttgtctgtgagtttctttctattttttctgaagtacaggcaccactgattcaagctactgatttcctgaattgctctttctatagcaagtttataagttcagtttatattccattgaatatttgttgcagtgaagagaaatgagagaaagcttttggttgttcatacacgaaatgctatctccccacttgcttttggtgacattgtatgtttactagactccctttttccttttttgtgttttctaaaatgttttctaaaattttatttcgtgccaaatattgactcttcttttatctccagcacgcttactacttagactacaaggtgtgtgttccagttctcttttttggtccttaacacttaattttgaattttgacaagttagttatagcttagcagaaaacttctatggttctttgtttgtcaacttttcaggatgataagctaacatatgtcacaaacttcatggaccatcttgtctcttggcatactgtcactctacgcatgatgcgtgcagagtcttttgtgaaccttggtgagccaaatatcctagaggcttgagctacagatacaccctagttatcatcatgagctaaggccagggagtcgtgcgtgcccaaggcttaacctgccactgaactgagatgac

SEQ ID NO: 2416 - DNA, 2619 bp, Zea Mays
atcgaataagacaagtaccagtatccttaagaatggtgagaagatttggtcgtgcatcgttcggaagtataatgaactgagagcgtagaagaagcagaatgccgtagagcatatgattctgctgctgaggtttacatgtcatctttcagccacatcaaattagctgaagaagatgctttaagggatgaatatgaagctgctttaaggaaggcacttgatgcatacaatactactgctgttggaactggcacttcacgtgcccattatgagaaagttcttaacaatttctgcagaaaggcgtttcaggattataaaaagaatgctttcttagaggctgacaagcagtgctcaaatgcgaagcacaacatggagaagaagatccgagcggcatgcactgctcctggtgtcaaagtttctgctgtgattcaggtcctggaaactgcacttgctgaatatgaaacatcttgtactggcccagccaaatggagaatgcttgctgcctttttaagacagtgtttggaaggacctatattggacctctgcttgaagttaataaatgaagtggaatcagagaagacttccttcactttaagatgccggtcaaatgaagaccaactagaacttctaaaaaagcaacttgaggccaatgaatcacacaagtctgaatatctaaaacgctacaaagctgctataaatgagaaacagaaagcctctgttgatcttagtagtaatcttgcaaacctgaggaccaagtgtagcacattagaagaacgatgtgtaagcatatctaaagaacttgatcatgtccgacatgaatgcactgattggagggtgaagtatgagcaatctgtttctcagcacaaggctgaacaagatagatttgtcgctcagttggcatctcttgagtctaggcatagctctgcagaaggaaagttgggagcagctcgggaacatgcagcatctgctcaagatgaggctgcagaatggaagaagaaatatgaaatggctgccgtgcaggctaaaactgcattggagagactagcatcagtgcaagaacaaattaacaaaattgcacaagaaagggaaagttctataagggcagaatttgcctcacatttggagggaaaggaagaggaaataaggaaattagttgctaagattagagaagcggagagtgaagaaagtgtattgactgaacgcttgctggttgtggaatcaaaaacacaaggccacaacaaggaaactacaggcttgagggatgaaatcaaagaactaacaagcaagttagagtatctaagagatagagcagtatcatatgaaaagcaagctagaatgctcgagcaagaaaaaaaccatcttcaagagaagttcttatctgaatgtaagaaatatgatgaggcagaacaaagatacaagtctgcagaaagggatgcgaagaaagctgttgagttggctgatgcagctcgaacagaggctattgcataccagaaagagaaggacaaggcacagcagttatctattgaaaaggtagcagttatagagagggttcaaagacaggtagacagactagagcaggaaaaggttaatctattgggcgaagttcagaggatgcataattctgaatctgatgcctggtccaaggttactttgcttgagagtagggttgctgagagggagaaagaaatggatgatttactgagccgtagcaacgaacaaaggtctagcactgttcgtgtccttgagagtctgttggcaacggaacgtgcagctagagctgaagccaataagcgtgcagaggccttatctctacagctacaatctgcccaaggtaaacttgatatactccatcaggagctgacatcgattcgccttgttgagactgcacttgacagcaagctcaggaccactacctatggcaaaaggttgagagataatgaagtacgactgtattctatccaagatatggacattgatcctccagagaggagcagaaaaagaaccaaaagcaacactagccccttgaagcctgtccaaactgaggatggtggttctgttcacatgagagaagacagcgttacagttagcacggatgtaaaagatgacaatccagatggttacaaaaagttcaccatagctaaactgaaagaagagctaactaagcatggatttggcacgcagttgttagagctcaagaatccaaacaagaaagatatactcgcactttataagaagcatgttttgtgcgagtaaataatggccacgtgaagttccagtcttcaacacataatctatccaaactagggaaacaatagagtagtctgtcagtatttttaacaagctgatgcctcattgttctccaggcattcgtttctgctgattggtttgtattttggtgttaacatcgaattagttccggtttgtgtctaggctttgtatttcttagcttgctggttggctgggtgaagttcttaggacttctgagtgctaaatgacctcgaccaacgctagtcgtgggcaagtttgtggtacgtttgtatatggtatattgctgtgtaaagagtgctttatccaattcaaatatgatatactcttcaagtctgcatccagcataccagcaga

SEQ ID NO: 2417 - DNA, 2606 bp, Zea Mays
ggttctcccaaagtctccggccaccgcccattcccgaaattcccaagcacgcatcgagatctcttgaggcccctgctcctcgcctttgacgtgcacaacccccagtctcagatcacaccaccaccatggggagcataccgccgccgcatgctcctgccgccgcctcgccgccgccgcatcctctccggcgctcccgctcgccctcgcgctccgcctcggcctgccaccgccaccgccgtctcacccgctgctccccgccgccccctgccccgccgacgctcgcaggctcctccgatcgctccaccgcctccgccgcctcctcgggctctggcgccgcctcccatccggctccggctacgcttcctcgtccctgtcctccccgtccctcgccgcgttcgagtgggccccgcgcgccactctcgcggcgtcattcctcgccccctccgcgcacggggacgttggcgtctccaagtcccccttcgtgacgctttccatcgaggagtccggcgacacggtggcggtcgttggggaagtgtcggtctgcgtcaattttgtcgggaacaaccacattgtggtggaggcggtggtgggtgaagatgaggagtttgaaatggtgagcggttctccgccggaggagatctacgcgcactttgccaataggaggagccctggggcaggtaggaggaggaggggcaagcaggggaggaaaggaggcgggatggaggcagagcacttcgtgaggattgcggacactgagccgacgaaggcacggccactgcaagggctgtggaaggtgcttcttctgtacacctgttgtatacgatctcctagcactatgctgttttcaattggaaagttctattgtttgcatatttagctgcaacacgctgttgaacgccattgcagcattgctggtttgtgtaattacccataaactagatgcctggcactgcactcattcccatgaagatgcctcattcactcagggaaccttacagccttgggatgggatggaatagaggatcaaaatttaccctgcatcctctaaatgttgaagcggaaagtgccttccgggttgacagcttctcctttttgaagattttggttcacaattgttgtcacacactactagaaccattgttggagattgaactaaaaaccgtactcatctgtttgagttttattcactctctattacagaagaattagatgctcgtagcagatgtccactcaggttgagattttgcacattcagcacatatgcttagtgcttaccacgcatcagggtgacatgcgtaaagttgtgtgcttgctatggtgaactacatctagaatttcagggatcattgttttagttgggctcaattgaataccatttaggagaacatgaagctgcttctttagaattggctagatgctagctttggccttttaatatttatggtgcatttatatactgccttatgggttgtattttctctgacataatttcctgctggtgtttatgtagactttgaacccttaactgttatcagaactacctgtccatgtggcaattgggttaatgaaatgacaagttttctttgtcaagcaaagctgtatggtttggttcctgccattgcatagtcccttgcacagatcgattctcatagtgttatgtcattgttgattaagagccatgaactgaagtgtactacgcctttggccttactgtgagtcttgaccatgaaccggtgtcagcaggaagcatgctagtgctgaattgcattatgtgaatgggttcccaaaacaaccctaagatttgttttaatttcatcggatcttgatacttcagaagcttggaaaaatctcattcaatcatcccaaaacatttctagacacaaaaactactctatgactgggtatatgcgaggataggactttggaattttaccttgtcacctatgatgacattggtggagtaacttgtcgacgatttagggatacacagagccaaaactctggctactctcctgttttttggacaacagatactacatttcttgaaccaccattctctgagcaagagctggttaattatgccagccgcgatcatatccaaggtgttacttccaatcatgcaggcgctgagaacagggttgtctcaaggatattacgcatcaattccagttatgatgtggttgatactcatctctcaactcccttggatgatgggaggagcgtggagggaaggatttggctatatgaggatggaaccttcggttttggatttgttggcagtaattcaattatagatctgaggcatgtctcctcggctggctgtattcttgatacttaacattagatgatctggatcttgctggcacataatttttgccagcgagccccttgtacagtacttggtgtgaggcatgttgcctccgatttgttgtactctcgatgataaggtcactgaatactggtcccttctggcacttagctgttgctagaatgcccttgtaaaccgaaccttggttcctttgggcatgtacttgttgacataataccgatgtatattacagtactatttgttcattgaattccaataaactgcaactgttacttcc

SEQ ID NO: 2418 - DNA, 1326 bp, Zea Mays
ccacaaaccccataaccctagcaccgctgccaccatgtcctcgtctccatcttcagtgaaccgccgtcccccgggcccgctagcgttagggctggagtccttggcgaagaagaagacacataggaagaagctcaccgccaaacctcctccagatccagtcgttgccctccaatggtcggatacagaacgtctcgtctcttcctttgaatccagcagtcggtgctcctcctctggatccggcggtcaactccatcatccgcagcttctatggcacctcccctagtccccctccatcgccgccctcacccaccgcttctatatcgccacctctctcattatagaagaagacactgagaatctgatgtgcatgcttgtccctcttgcactgcttgtctgttacctgcagcaatctttgccaaacggacacagggaacctatgccccacaggactgcaccacacgtgggacaggtaatgcaggtattgcccccgctgtggctggccggtgtgcaattcaccaggctgccaaacgagccctaaaggccccagcatgggcgaccctctccaggccgccgtcgcagccgcccacgcgctctccctgctatggagaaaaccgctcatggaggtaaaccactgtgttgcgcgcacatcaagatgtcaagcagtggcttctgttaaatatcctatttatgatcaaacagtgtaccttaacgattatcataagaagatgttgaaggatcaatatgagggactgaagacaatcgagcagattacaatggactcagcttcggtcgagaccaatatgttcaagctctgcaaggtgatgtctgttcagtttggccaaaaaggcatcccctacctgaacacctacgacggccgcaccatccgctaccccgacccgctcatcaaggctaacgacaccatcaagatcgatctggagaccaacaagatcatggacttcatcaattttgatgtcggcaatgtggtcatggtgactggcgggaggaacaccgggcgtgtaggagccatcaagaacagggagaagcacaagggcagctttgagaccatccacgtgctgcttggagctttttgctatgtctagttttctcctatttgttgtacaggaaaacatagaatggaattcaaatttggtggtcgcaaaagtctgaagactttaattcatataaagttaggcttaacattagtgcaaacagttgtattttagtttagatttagagtacacttatgtatgcgttgtttgacaatgcttatttatgatatattgaatggtacttatttatattatattaattataatgttgttcagt

SEQ ID NO: 2419 - DNA, 1333 bp, Zea Mays
cctacacttccatgttcgacgcgagcggcgaaccgacttccctctcattcgtcttccacaaaccccataaccctagcaccgctgccaccatgtcctcgtctccatcttcagtgaaccgccgtcccccgggcccgctagcgttagggctggagtccttggcgaagaagaagacacataggaagaagctcaccgccaaacctcctccagatccagtcgttgccctccaatggtcggatacagaacgtctcgtctcttcctttgaatccagcagtcggtgctcctcctctggatccggcggtcaactccatcatccgcagcttctatggcacctcccctagtccccctccatcgccgccctcacccaccgcttctatatcgccacctctctcattatagaagaagacactgagaatctgatgtgcatgcttgtccctcttgcactgcttgtctgttacctgcagcaatctttgccaaacggacacagggaacctatgccccacaggactgcaccacacgtgggacaggtaatgcaggtattgcccccgctgtggctggccggtgtgcaattcaccaggctgccaaacgagccctaaaggccccagcatgggcgaccctctccaggccgccgtcgcagccgcccacgcgctctccctgctatggagaaaaccgctcatggaggttaaatatcctatttatgatcaaacagtgtaccttaacgattatcataagaagatgttgaaggatcaatatgagggactgaagacaatcgagcagattacaatggactcagcttcggtcgagaccaatatgttcaagctctgcaaggtgatgtctgttcagtttggccaaaaaggcatcccctacctgaacacctacgacggccgcaccatccgctaccccgacccgctcatcaaggctaacgacaccatcaagatcgatctggagaccaacaagatcatggacttcatcaattttgatgtcggcaatgtggtcatggtgactggcgggaggaacaccgggcgtgtaggagccatcaagaacagggagaagcacaagggcagctttgagaccatccacgtgctgcttggagctttttgctatgtctagttttctcctatttgttgtacaggaaaacatagaatggaattcaaatttggtggtcgcaaaagtctgaagactttaattcatataaagttaggcttaacattagtgcaaacagttgtattttagtttagatttagagtacacttatgtatgcgttgtttgacaatgcttatttatgatatattgaatggtacttatttatattatattaattataatgttgttcagt

SEQ ID NO: 2420 - DNA, 1048 bp, Zea Mays
gaacaacacgcattcctacaatcggacaatcctactccaagcattgagggacacggaggcggcgccgttcggcactgcacgctcacgggctcgcgcattagtggatactctcccccggcgccacgaaatcgtccgctctcaccaccttccatcggtccctcacgatcttgccaagaatccaagatccgcctgcggtagctagcggtcctatcttgatccgatggtgtcaccgactccgggagggaaggatgcaagggagggtggcggcaaggcggagtggatgatctacgccttcgtggcgcgcggcaccgcggtgctggcggagtacacggagttcaccggcaacttccccgccatcgccgcgcaatgcctgcagcggctacccgccgggtcgtcctccgccggcaccggccctgacggccgtggcgatgcgccggcacggttcagctacgcctgtgaccgacacacattcaacttcctcttgtaccgcggctacgacactgggccgtggagagaaattgagtgaactccaagacaagacttctgagctacatattcaggcccagcagttcaagaaacagggagtgaagattcgcaggaagacatggctacagaacatgaaaattaagttggtgattcttggaatccttttgctccttgtaatcatagtatgggtatctatttgtcagggctttgactgcaccaagcatgaaacataatagaaatgggttcttttaaaggcttcctcaacagctccttcaataaatctattaaacgacgggcttctctgctggattctctataaaaataggaagaagtcgtctcgagaaacctagcaaagctgagagcccaaaaaagaaggcttctcttgcgtcattcccttcccctgaaaatagaaagagttatgtttctaaccaaataaagcactctttcggacttcctaaaaataatgagaaagttattttctcatatgagatagagctggagttgtgatgcagagtcctaccaaagaagagggtctaagatcttaggccttgttccaatctcg

SEQ ID NO: 2421 - DNA, 3735 bp, Zea Mays
ctcactcatgcgttcacaatcacacctgctgtttttcttctccagttcacctcgcgcgcgtgacaactagggagcccgccgccgcccaggtcttcgtcgaaccctttgccggcaacgagaacccgccacgccagaaaaagaaaaagaaaaaacaactacagccatatctacacttatcccgctactagtttcagcagctccgtaattgtggcgatggttgctcctacgggatcttgaattcttgacacacacacacaccgatggtaatggtgatggagggaggaaggacggaaggcgacgagctgattgctgattatgtggattgccttatgtctctggacaccaacacccggcctgtccacagcgatggtctcatcctcggtgctccaggcgggggaggagggacggtcgatgccggaactgagccagatgccatgagagatatcccctcatccgaggaccccaatgagcccgtgctcggcatgacgtttgagtccgatgaggccgccaaggcattctacaacgactatgccaggcggcttggcttccccttccgcgtcggcaggtctcggcggtcgaagggcacagaggaggttgtcgtcatgaagaggttcgtttgctccagggaaggggtgtacaagaagaaacagacctcgccggatgaggcggcaaggaagcgtgagaggatgtctatgcgagagggttgcaatgctatgatggaggtggttagggaggcggaccattgggttgtctccaaacttgagaaggctcacaaccatgagctcggcacttgtagcgccaaggttgggtaccttcgtgcgagaagttctcttggtggctctgataaggccacaatggtggggcctgacgagatggcgtttcttaggcagaatgtcctgggggaaggaggagacgcccagggccttcttgattatctcaagaagatgcaagccaatgacccggcgttctgccatgctatacaggttgacaagaatggctgtgtggtgaatgttttctgggctgatgctagggccaaagcagcttatcggcatttcggggatgctataacgttcgacacgacgtacaagaagaacaagcatatgatgccctttgttactttctcgggagtcaaccatcatctgcagactgttatttttggatgtgcattgcttatggaagagactgagttctcgtttatatggctatttgaaacatggttagcggcaatgggaggtaaggcaccatgctcattggtcactgaccaaaacagggccatgaaggctgcaattgggaaggtttttccgaattcctgtcaccgtttctgtaagtggagtattctgagtagaaccaagcaaaagctgacccatacatactcagagcatccaaccctaagagatgagcttgagagctgtgtgcttgagactgaaaccatctcgacattcgaaaccacttggatgtcaatcattgatagatatgacttgagaaagaattcatggcttcaagcaatatacaatatccgccaaaaatgggttcctttgtacctgatggatacattctttgcagaaacgttccccacatggaaattggaaaccatgaatgatttctataagaaatatttcaatacaaaaacaacgcttgaagtttttcttaatcagttcgatttgagcttggcaggccgatatgaggatgaggcaaaagcagatatggatgcctacttaaataaggcaactacaaaaactgcatcgctaatagaaaaacaggcagcagggacctataccaaagcagtcttcagtaggtttcaggaggaatttacagagtctctagggtttatcattcagaaaaccgaagacggctgcataagtaaatacagcatcacaaaatatgaagatccatcagacacattctgcgtgacttataatgcttccaataagatggcaaactgtagttgcaagtactttgaattctccggtattctgtgccgccatattcttggagtatacataatagttgatccacgaacacttccaactgaatattttatgaaacgttggacaaggaaggcaagagatgatgatgctttgttagaagataataacaacaatactcatgatgaggatgcttctcagtccaccacaagccgctacaataccctatgtgctgatgccatcagatgtgctgagaaaggagctggatcggaggcagtatataaggcagcaaaagatatcttacagaaggcatatgaagagattattgcttatgaaagaaatactggccagggatctcaaagggatgttataaacatcaacgaggatgtcacgattgatgatgcaatgaatgataaatctatgccagattctggacgaaaggtgactaatctactaggccaatttgttaattccacttggtctccggtctaatccacgtttttgtcatctctttggagatgaaaatgtgatttagcagcattagcagctgtcatgatcgtcatgcaatatctattttggattgggtagcagcgaacaactcaacaacacttggacatttcaacatgaaatgatctccatgagaagaatgtccgcctgacttcagtagaccaggacaatttagtttgaagatgctggatcatttctgtgatgattaagtctttgtcacttcaataagcgtcctgtatggtgttgcctgtagccctgtatggccgaagctactaaaggataaattctgacacgacaacaatgtggcgttggaacatagcaggtcatcaacaaagacaagtcttctgttcactaaaaatacgagaagtgagacgaagatggcggtcatgcaagctctaaatttaacacaagggactttcaacgacagatatctgggcttaccagttcgctttgggcagtccaggacaaaaacttcttagtacttaaatgataatgtgacaacgtattcaaggttggaaagaaaagctgctgtcaaaagccagtaaataagtgctgataaaggccgtagcacaaggaattccaacatatgctatgggatgctttgacttaaggaagacttgtctgctcaaatcagcaatgccatattcagatattggtggagtcaacaggacatgggaaacaaagtgcattgggtgaattgggctaaaatgaaaacgctaagggcttgttcgtttcacggttagtccatgtggattggttagtccatgtggattgggtggtattgagtcggtttaaatccataacaaatcaaaatccattccaatacacttcagtccacatgaaactggaataatcgaacaaggtctaaagagttgtgatggaatggagtttagagatatcgtagtatgttcttttataaacttagtcaaaactaaacaagttcaacttcaacttataatgaaattaaatagacgaataagtacattgctaatgctggtcttcagagagtgcgatggtttgtttcatatgattcactatgatgcttgtatcatatataattaattcatgttccgcattcagtgacagattattgggatgatgccacaaactcctaatttctgttacaccggatacttctgttcccatttgtttgctgaaagacagcttgccccggttgcaattaagttcattgctttaaatctgcagaactgagggtactgtacaaaacgaggacgatgtagctgcccagttcttcgaggacgctgatttcttgtttaacgccgatgcctccattaatccgcat

SEQ ID NO: 2422 - DNA, 1931 bp, Zea Mays
gtgacgtcacctcttctaaggcccctgtggtgccaattcagatgggctccaggatgaggccaggcccatgggggcacgattcggccttttcttgtcttgctcgtcaaaagaataaaatcccaacccataggaaagcgtagcatagcaggggaggccgggaggggagaaaggcgaactcgaattgggggaagagagcgagagacgaatcgcatcgagccggagaggaagtcagagacagggaggagggcggcggaatcggcgccggcgggaggcaggcatggaggacctgagcgtggaggagctcgcctccaacctctccacctacaaagagcagctacgcgaggtcaagaagcttatcaaggagaagaaggatgatgctggaatttctgaatatattgatatggagaaggagcttcaagaggtcagttcatttcttattttatcctgtaatgtgatccctcatgctcgtgtagctacacgtcagatacatcggattaatgattttcacaaatggatgcttgatttctcctctgatttttggggcatgttgctatcgattcctctcttctttgttacaaggagccatgcccagcaaggtagcatgaaaaggccgcttgcaacagaagatttgttttggggaatttagatttttgtaaccttgaaaggtgagaaggttaattatggcaatggtttgtactactacaaatttcggtgttgctgctgctgttctaagttggatcttgaaatatgggcacatgtttaatactactgggaggttgcttgtgtttatgatgcttaatatcattttttgtgtttgctgcaggtcataacgttaaccgaagagattttggcaactgcaaagcaaactgagagtgcccagaatgttgcaggtctatcaccgccaagctattcagctggagtgcagtctgagggactggatgacctttcacattcccataagtttgccgttggtactagagttcaagctgtgtggagtgaagatggagaatggtataatgcaaccgttgaagctttgacaccaaatggatactatgtagcctacgatggctggggaaacagtgaagaggtggacccagataatgtgaggctgcttgaggaagaagcagctgatgccttgggacaagctgaaaaggaagctgaagctacaaaaatggcaataaagaggaaaattgaacaagcagcaacatctgattttcaggcgcgtagcttgccggccaaacttcgtatcgaaccaagtgaccctgaggatgttaaagctgcaaagcgtaagaaaatacatgctttcaaatcaaaatcccgctttgagcagcttgaatttgcccaaaacaaaaggcagaatgcatggcagcagtttcaaaccaaggggaaagccaaaaaggtggggttcttctccggtcgcaagaaggagagcatcttcaagtcaccggacgaccacagaggtaaggtgggtgtcactgggagtggcaagggcctgaccgacttccagaggagggagaagcatctgcaccttaaaggtgggtccggggatgcagcggatgatgacgaggagtaaactgaagaaccgagcctctgtttgtatcccgccgaacagacatttccatacctgttctttagcgccgacatggcctcgaggggactcttgacttaaaccagaaaatttcaatgtttgtcccattctcattgttgaatgtcgctgccgttttggagctgcattctggtggcgaggtcacgctgctagaggagggcgtcctgagcgtacagatcgacttgtcttgctagtctgtagtgaagtattaatccttaaacgtttactaaaattgtcaccggcctaagtacagatcctttgccccaaccaagtccattgaagaagatcaataaactcgctactgctgagtgtactctacaaaccg

SEQ ID NO: 2423 - DNA, 1980 bp, Zea Mays
gcgcgttcaaaatgcttcaccggaggtgtcttcaagggaccacatacaaaaaaaaacttcaaacggtcctgtttttttttcccaaaaacttttacaatttccgttccataatggccttggtcgtatgcagctgtttatataaaatgcctaaaccccgtacccctagtccccgaccacctcaccgcatcgccaccggcccaccgcgcagccagatggcctcttcctcctcgtgcccgctcgcccccgggacaagcggatgcaagcccaggacgacgcggaccagcggcgtcgggttcggagtcgaagcaatggcgcggagcgtggcggcagtgaagctggagccgaagccggagccgtgggcggcggaagcagaggaggggtcgtcagttgtgccgcggtcgatggaggggccaccgtttccggcgccgttcgtggcgaagacgtacgagatggtgtcggacgcggccacggacgccgtagtgtcgtgggcgccctgcggcgcggggaacactttcgtggtgtgggacccgcaggcgctcgccaccggcatcctcccgcgcttcttcaagcacgccaacttcgcgtccttcgtcaggcagctcaacgtctacgtgtggctgctggagactctgctcaattggtgatattttcttttggagcatgactgggcatgagtgggcacgacattgtggcgacatcagaagaacatatgctgctagtcctgatgtagataactgactgcgcagggccagatggattcaggaaggtgaatccagatcgttgggagtttgcaaacgaatcattcttagcaggccagaagcatctgctgaaaagcatcaggaggaggcgcgcgtccaagcctcaggtagaagcatcgccaagaaacagcgcaagtgcttgttccggacagcccaacaaggatcccggggtggtcgagagtttgaaacgggaccgcgcagcgctcagggctgaagtcatcacgctaaggcagcagtacagcatttgcaaatcccaactcgtcgccctggaggagaggatcctgaacaacgagagggaccagcagaaggccatcgccttcttcgcaaaggtgctcagcaacccagctttcgtgcagcaggtcctgcgcaactacgccagggagagagagctacacggcgcttccaaaagacagcggctgatggaaaacgaaggacatcggcagggcgatttgccactgaggggtagcaccgaagccgcgtttgcgaccggtgcggctggcgtctctgtggggactgggagcacaaatgttggcacagccgcgagacaggaggagtctggttctgagttgaatgatcaggaggtgaacagtatttggtctgacgtgtgggacgagctggacctggacctggacgcggtaccaggcgctgaaatggaccggcgagaagcggacaagggcgtcgctggcttccacgacgtcgaggacttgagtggccggccttgcggttggggtgatgagttctcgtatctcgcggagccgatgcagttcgtggagcactatgactagtggtgcaagaatagcttgatctggagctggaggggatgatcagtggcttgttcatagcttcaccatactaggattctgccagctgagattcgtatatactggttgagttgacatgctggctgtggtgtggtgtatagcgtcagctcggacttctcagaacgtactgcaaaccaggatgtgataatttgtccttttcttttctaacttttgctggataaagtacagggtgcagcgaatgataccatcgtggagcatttagctttcggacattggtaccgccaacgatggcatatttcgcgatgttagaacttaacatgttgtgtcaagagtttgctcgacttgacctactatgttggtatcacttaggtctttgagcttgatattatgtattatttggatctccaaactttgattaatgtactccaatgtggcacggc

SEQ ID NO: 2424 - DNA, 1830 bp, Zea Mays
ctgtctaacaattgggatggtttgtcaacacgacccaacccaacccaacccaaccaaaagcttgaccgctgggcactgcttgctcctacggcaactacaatgcctctgctctggaccatcatccgttgaaagcaaggcaggcgtcacacatgtccaacctcgccatcaccgatgcgtgtctcgtgacagaatcagagcaagcatcatgcagcagcagcagccaggagcagagggcgccgtcatgaagccatcagagcctgctgaggatgagcagcatcagcagaagccaggactagagggcgccgtcatgaagccatcaaagcctgctgaggatgagcagcatcagcagaagccaggactagagggcgccgtcatgaagccatcagagcctgctgaggatgagcagcagcaggaggaggctgagcgcagaaggctctaccaggcttggaagggaaacaacatattcctgtgcggcgggcggctcatgttcgggcccgacgccgcgtccctcctgctcacgacattcctcatcgtcgccccgaccatcgtcttctgctaccagataaaatccacgttctacggctctggtgggcggcagcagcagcagatgcaccaggcagcagcgctcgtagtcaccgtcacaacgatcatggaccttgtcttcctatccatgacatccaccagagacccaggaatcgtgccaaggaactcgagggcgccccctgaagccgacgagttcctcggctgcaacacgccgtctatggactggagcggcgggagaaccccgcggatgaggctccgccggaccaaggacgtcatcatcaacggcttcacggtgaaggtgaagttctgcgagacctgcctgaggtaccgtccgccacgatcctcgcactgctccatctgcaacaactgcgtccacaagtttgaccaccactgcccatgggtcggccagtgcattggacttccaaatggaagaaaatggaggctctatctggaaggccttgcgcaaggaagcgtgctcgtttgcgctaatcatatatacttccattgttgtttggtttgtcggaggcctcacagtgtttcatctctatctaatcggtactaatcagacaacatatgaaaactttagataccattatgacaagaaggacaatccctaccgcaagagcattgcagcaaactttgcggaagtgttctttaccaagataccacctccgatgaatgattttcgttcatgggtaggtgagggcgcacttgaagctggattctacactccatacattgggctggatgtgacaaacccaagggaaaagattgacctagacatggaaagcaaagaagtacttgttgggggtatccagattccaacggcacttcagaacatagactatggttccttcgaagagagttcaggtgacaagaacagaaatgctggccaaaaatcagcgcatttccctatagcttgggcacaaggaaatgaagctgctggaacatctgcaggagctaccgtgacattcaataacaaaacaagcgatgatggtgttaatgaattcgacagtccgaatacaactaccacccaagcatctacaaaagctaacacagaaccaccaggtagggttgataaaatggaagggacaatggataggtacgaccggagatgtaatacaatttagattttgtgcagactatagcacactggcaattgatttttgtagaaggaattcatacatcgatgaatgacatcattaataaacaaatgtcatctctcgttattgagagttgagagaacagtagcattggaaacaaggtaaatggtgaagttgcatagct

SEQ ID NO: 2425 - DNA, 1086 bp, Zea Mays
ctccattgtcgttatggagcattggccgatattttcctgagaagcacggagctaatgaaggatgctcgagggattgcatcactgagtggtatcgttcctcctctggttccattcgctcagacgttcgcggcagtcatcactgcagccctcacaggaaccctctactacgtcgccacaactccgaaaggctccagctaggtagtgttaatcttgaaatctattaaaaccctatatatgtgaggtgacaatgcgctgttcactcaaaattttcagaccctacgtatgtggtgacaccagcgatgcgttcgcgcacagggcgtgagaacctcaagaaactatttgcagcttggtacgagaggaggcaaatgaggaagatatactcgccgcttctggaaggaatcttggctttctaccttggcttcgaatggatccagaccgacaatatcctggcacctatgatcacccacggcatatactccaccgttgttcttggccatgggctctggaagatccacgaccaccggagaaggctacggcagcggattcagaaggtcaggagtgaagggagtagctctgcagacgacacattgtaactgcagcatatgtagatcggcgtggtctactgctggatagctagctgctgattgcacgcacgtactgggtgatcgatcgatctaccgatcagtcagaagaccagaggcgtacgtctcacaagttttgatctacttaattaatatcaacaaggtaggtataagattgggcaaaaatatatatataatgcatgtagtcatgtaatgtagatacaatgtgtacatatatggataaatatatgcaggctgtaatcaatataggaagtatatagtgtacgattgcgacatccaagtatgttataatcctagtatcacgtatgcatgcaaggaatataccagccacatcctttctttctcgtccctctcccacacttgcaatgttacatctattcggaacatccatgcacgagaaggctcgatctatggtctaatagttcgatttagtttgtgagtcttagaaagaacatatatgttcaccctatttaagctcttgctg

SEQ ID NO: 2426 - DNA, 1643 bp, Zea Mays
catacgccatccagattcaacgaacgccgtcggcctccgctccgtgccacgtcccgtgcaccagccatccccgtgaggccctcacctgcagtgacacggtccaccttggaccaggcgccccgagctgttcctctgcgacagcaaccttgcgtgcataaagccagccaccagccaggcagctccaactccgacgagaaccgccactcctcgaaatctcgaaggattttctgcggcgaaccccttcgtgacgtgacccaatgggagaggcctcgccgtcgatcgccaaggacgtcaccgaggtgaccgatgggtgcgtcggccgcgtcgccgccaagctcgagtccatggagccctgctccagcgtcaaggataggattggctacagcatgatcacggacgcagaggagaaagggctgattactccaggcgtgagtgttctgattgaaccaactagcggcaacacaggcattggactggcctttatggctgctgccaagggctacaaacttacactcacaatgcctgcctccatgagcatggagaggaggatcatattgaaggcttttggtgctgaacttgtccttactgacccactcttgggaatgaaaggagctgtcaagaaagcggaagagatacaagcaaagacacccaactcgtacattcttcaacaatttgaaaatccagctaacccaaagattcactatgagactactgggcctgaaatctggaaagctacagcaggaaaaattgatggccttgtatctggtatcgggacaggaggtaccatcaccggtactgggcgatacctcagagagcaaaatcctaatgtcaagctctatggtgtggagccagtggagagtgctgttttgaatggtggaaaacctggaccacacaagattcaaggaattggagctggttttatccctggagtcttggatgttgatctccttgatgaaactctacaggtttcaagtgatgaagctatcgagactgccaaggctcttgctctgaaagaagggttgttggttggaatctcttctggtgcagctgcagctgcggcagttaggcttgctaagaggccagaaaacgccggaaagctatttgttgtcgtgttcccgagcttcggcgagcgctacctctcatcggtgctgttccagtccatcaagaaggaagcggagagcatggtggtcgagccctagagcacaaaattctgggcttctggcaaactatttcctgagacgttcaccatttccatcacagaaaaataaagctcgggtgccttctgttgatttcgacgtacatttccctgccgatggtgtccagcccactgttgtcgctggagaacacgtcgtttttagacttgtgatattttactactgttttgacactcgttgtatttctgtatatcgcgtcagactgtgaaataaaagcagtacagtgtgtttcttgcatggatggtttgctgtgggggttatatatatatatatatatatatatatatatatatatatatatatatatatatatatgtatgtatatgccgtcagagaattgcattgaagaatggccagtgacgctcacgcggagctgaactgagcagcactgatgtgcttggtcattgacttgctgcagcaaaaaaaaaa

SEQ ID NO: 2427 - DNA, 1594 bp, Zea Mays
cttgtcttctccagtctgatcactcccaaccaatttgttttgtgctggcaaagggaaccttcggggtaattacggtccaaatggcagcgcccagtgcatttggatttttggtagcaaaacaaagtctccaattaaacaaaatcgtcggtttcggatgtgaaagacccggggggggggggggggggggcaacggtacgacagttctgccaccctgcactcgcgtccgaaggaaaaacagggcaaggagctactttgagcccgagactgaactgaagaagatgatgatggccgaggtggccaaccacagcaagaggaaccacacggacagctacttcagtggcaaggccgtcgccgtccccgccgccgcggccaccagctcggaggagttcggcagcatgtcgtcgaagaagccgaggaatgccagccccagactcgcgcccgtatcaccaaaggagaagaaggacaagatcggcgagagggtcgcagcgctccagcagctcgtgtcaccgttcggaaagaccgacacggcttctgtcctgcaggaggcgtcggggtacatcaagttcctgcaccagcagctggaggtcctgagctccccttacatgcgcgctcctccggccgctggcgctgcgcctgaggtgagcttccgccgtccctcgtcttcgtctccactgatgagttcttgacgcaagcctgacccccagcgctacagcctccggagccgcgggctgtgcctggtgccggtggacctgacgctgcagctgacccagagcaacggggccgacctgtgggcgccggcgcacacggccaggcgaaggtgaggactgaggaggagccggtctgtctgtccggagggaaccgcgcaagtgctgccgcgtctgcgtgcgcgccgtggagttgagtttccaggcgcctgactgacccgattcgacctcctagcaagaaactaaagcaagcgtgcgtgtccgtatcagccgccttgtattatactcctagtagtactctcgtgacctgcctggtcaggtctctctctcctagcttgttgtccgccgtttatgtgttgagcggcatgtggattagaagcctgtgtggctggctgtcagcaagcagagcggcagtttgatgcctgttccttgagatggatagtgttatcgagttcagaagaataccatgcgcgtgtgcctgatgtatgctctctctctctcgctcactgtctctctcagctgtgatggaactgaaaccgcacgttcaggcaaggcaaaacctaagtgttacaggctcgttcgccctcacatccgcaggacgaagcaacgcaggcccacactttttgaccggcagcggcaggcccctcgggccaacagagactgttccggggtccaaagaatctaactcatcatgattcatgaaccaaaatgaacaggtacaccggacgaaccttgcggatggaaaaaaacaactcccacgcgtctctctctctctctagtacagtagtaccttcttctcttctgtttcttcgatgaacttcgcacgttctcgaatgaataatagaggagcagggtgaagcaaaacccaaatcctcattcaactaggtctg

SEQ ID NO: 2428 - DNA, 2020 bp, Zea Mays
gggaaccccatcggtctgctttgcgtcgtttaagcgcatatagagatagagtgcagatagtttacttgcctttgaaaaactcgagtaaatctatccatccatccatctatctatctatctgcgggttgcagcacacacacacccagacccaggttgggaacgcagactcgcaatagctagcaactattctcctcttcttctgtatataaacggcgagcgagggccctccgtcttccctgatcccaaatgtgcccggcccggtccctctccactgcactgcgctgcgcccatccatccttaaaccctcctgcgcgcgtaggcctcgtcttgtccttccccagcacaacctctcctcctccttcgccaggtgcctcttcgttctcctctccgggctatcaggacgaaataactggccgcgctgcacgccggccgcctcgagaagaagcgctcgccccgcgcgcgcggctccgggctaccaggacgaaataactggccgcgctgcacgccggccgccgcgagaagaagcgctcgccccgcgcgctctgccgctggttcggccgtgccatcccgacgaggttcccccagctgtgcccgctcgatctccttccgcgcgcacgcgcacgcagtggtccgtcgccgctgattgatcctgcaggaaaaacagggcaaggagctactttgagcccgagactgaactgaagaagatgatgatggccgaggtggccaaccacagcaagaggaaccacacggacagctacttcagtggcaaggccgtcgccgtccccgccgccgcggccaccagctcggaggagttcggcagcatgtcgtcgaagaagccgaggaatgccagccccagactcgcgcccgtatcaccaaaggagaagaaggacaagatcggcgagagggtcgcagcgctccagcagctcgtgtcaccgttcggaaagaccgacacggcttctgtcctgcaggaggcgtcggggtacatcaagttcctgcaccagcagctggaggtcctgagctccccttacatgcgcgctcctccggccgctggcgctgcgcctgaggtgagcttccgccgtccctcgtcttcgtctccactgatgagttcttgacgcaagcctgacccccagcgctacagcctccggagccgcgggctgtgcctggtgccggtggacctgacgctgcagctgacccagagcaacggggccgacctgtgggcgccggcgcacacggccaggcgaaggtgaggactgaggaggagccggtctgtctgtccggagggaaccgcgcaagtgctgccgcgtctgcgtgcgcgccgtggagttgagtttccaggcgcctgactgacccgattcgacctcctagcaagaaactaaagcaagcgtgcgtgtccgtatcagccgccttgtattatactcctagtagtactctcgtgacctgcctggtcaggtctctctctcctagcttgttgtccgccgtttatgtgttgagcggcatgtggattagaagcctgtgtggctggctgtcagcaagcagagcggcagtttgatgcctgttccttgagatggatagtgttatcgagttcagaagaataccatgcgcgtgtgcctgatgtatgctctctctctctcgctcactgtctctctcagctgtgatggaactgaaaccgcacgttcaggcaaggcaaaacctaagtgttacaggctcgttcgccctcacatccgcaggacgaagcaacgcaggcccacactttttgaccggcagcggcaggcccctcgggccaacagagactgttccggggtccaaagaatctaactcatcatgattcatgaaccaaaatgaacaggtacaccggacgaaccttgcggatggaaaaaaacaactcccacgcgtctctctctctctctagtacagtagtaccttcttctcttctgtttcttcgatgaacttcgcacgttctcgaatgaataatagaggagcagggtgaagcaaaacccaaatcctcattcaactaggtctg

SEQ ID NO: 2429 - DNA, 1908 bp, Zea Mays
agtggttgttttgcaagtgaatgttagcgttaacaaattggaagatcctgtgcttgaagtccttcagtttgagaaaagtatatcaaacaattgtatgcctgggaatcttgtggatggacaatgtgacagtaacgatgatccatgtcaggagctgcttagttggttgctccctttagatcgcacattaccacctcgttctttggcaccccctactctcaatccaagtgtatcacacaagcaatcttattctgcttctggttctcaaatattcaacttcagaagttactccatgccttcagcctcttctgttcagacaccaaataatataagaccaccaccaatatctgaaagtcaagaatttatgcctgaaaaacctgcaaaaaccccagatattataaatgatgggcaactttcgtttagaggagttcctttagaacctgaacggtattctgtacgttgtggtttagaaggcgtgtatctaccagggaaaagatggcggagaaaagttgaaatcattcaaccaattgaggttcaatcttttgctgcaaaatgtactgtggaaaatcttctctgtgtcacagtaaagaatattgctcctactcatgcaaaagatatagtcgtattcatcgatgcaattactattgtatttgaggaggcatccaaaggaggtgctcctttgtctttaccaattgctagtattgaggttgggcatggtcacagcttgccaaacctagcactcaggaggggcgaggaacactcttttattctcaaaccagcaactatgtcctcaagggaacggaagactaacagtcatgcacctctggccttatcactcccaacgatgaccggtgctactttaaatactcatacaccaaaggctggtgagccgtatgctgatctaagtgaccaatatgctgtactggtatcttatcgctgtaattacacagaatcgaaactttttttcaagcaagcaacaagctggcgaccctctgcagccagcgatcttatgatctcagtatcatccgaactgtctttacggaatcctagtcttggtgctcgtgttcctcaactccccgtgcagatactaacactcgaagctactaatatgacatccgaaaaccttacattaactgtccttgctcctgaagcatctggttcttcttcagttgtatccttgaactcatctccaaccaccccaaatggttcttttgatggtgttaatgagtcagcaaaaagatctggggtgggaaaagatgggattggctttcgaagattgaattctgtcctagctactccaaaagaaggtgataatggaggaaacagaatgagtaatgcttcaggctgtactcatctgtggttgcaaagtgcagtgcccctagggtgtgttcctgcccgctcaagcaccactgtcaaacttgagctgctaccattatcagatggaattatcacacttgatactctgcaaataaccgcaagggagaaaggccttgcttacataccggagcactccttggagatacatgccacctctggtatgtcatcaggaaggtcataggataggagagcatcaagagattttaccgaaggatggttgctgccaacatggggaaactaccccagatgaatcattatgtatcacaattgtgttacaaatccattcatttcatactgaggtcgccgagacactggtgttcgtcttcacaaaggcttatgaaattcgtaatgtgttgcttagttttgatgccgttattgttgttggtggtgttcatttaatcccactcatgttgctgagttgtaccatatgcgggctctgatcataaatatactggagaaataggaacatgtgtgtccattggccattgctcatcttcatgatgatatatcagttgctcatgaatcattatgatc

SEQ ID NO: 2430 - DNA, 2533 bp, Zea Mays
gaaggcacacagccgccgctgtttcttcatcttactcgtgctcggcacgcaggcgacggcgacggcggcggcgttcaggctcgggctctcagcgacggtatcagtggtctcccgcctctcgccagtcgcgtcgcgccctcgcctccgatcctctgcacaccgtccggtgaccttgtgttgtaagtttttccagcactgcttgctcacccatttctcaattagaaaacctcaaattctgtccctgagcaccaaatcaagaccataccaatttagtgagtccggacagatggcaatggccgcagttctggccaatggtgattcacagggtcgtcctcagaggaactatcaagttgttgttgctggcactcgtgacatgggcattgggaaggatggggtcttgccatggaagcttcctggtgatcttaaattctttaaagagcttacactaattacatctgatcctgtcaaaaagaatgcagttataatgggaaggaaaacatgggagagcattccagttaagtcaaggccattgcctggtcgtttgaatgtcatacttactcgatctggtagttttgattttgcaacagtagagaatgttgttatctgtggaagtatggagtctgccttagaactgctagcatcaactccatattgcttatcaattgagaaagtgtttgttataggaggcgggcagagaatatcttaaaggacctgcatgtgaggctatccatctaactgacattcagtcgagcattgagtgtgacactttcatccctccggttgacttctcagtgttccagccatggtattcatctttcccggtgatagagagcaacattaggcattcgtttgtgtcttttgttcgtgttagaaagtcagtggcagaaactcatgagtcaaatggcaaggaatcaaccgaggttgataccaagaatgacaaatttgaaacagagaatttctcttttctccccaagatggtatatgaccgccatgaggagtaccaatatctcaatcttgttgaagatattataaggtctggtgctcagaaaaacgacaggacaggaactggaacattgtcaaaatttgggtgtcagatgcggttcaacttaaggaaaaattttcctctgctgacaacaaagagggtattttggcgtggtgttgtcgaagaactcctttggttcatcagtggctcaacaaatgcaaaggttttgcaagagaagggtattcatatctgggatggcaatgcttcaagagagtatctcaacagtgttggcttggcacacagggaggaaggtgatttaggtccaatttatggatttcagtggcgtcactttggtgctgaatacactgacatgcatgctgactatacgggaaaaggttttgatcagctaatggatgtgattgacaagatcaagaatgatcctgacgaccgtcgaataattttgtcggcgtggaatccttcagatctcaagaagatggctcttcctccttgccacatgtttgcacaattctatgtggaaaatggggagctatcttgccagatgtatcaacgctctgcagacatggggcttggtgttccattcaacatcgcatcatattctctcctgacatacatgattgctcaagtttgtggggatgcccatgtctatagaaaccatgttcgagcactggaggagcaaattcagaagatgcctaaaccatttccaattttgaagataaatccttcaaaaaaggatatagattcttttatggcatcagacttcaagctggttggctatgatccccaccagaagatagagatgaaaatggcagtgtaatggtggcttggctggagcccccatcctatggactcggtggatgtaatcagtaggactggtactacataaaaattaaccggacaccgcactagcttgtttttggtgatggtgctgaatgttcagtgggagacgttttctctgatttatcagttgcgatttgcgtactatggtcgcttaagtcaactctacaaaatcggctcccttttatctggagccagttgattactcgattgcgagtgtgagggatgatctaggcataccctgttgcaagggcctactgggtgtgtgccggcccccatgaggctgtgacgattgcgccagtccagtacctcgtgagaattatgtaaccgaagttgccgtgtacctgggagaactcccgtactgtttggtgtctgattgcctatttcactttgcagtttggtcacaagataacgacttgctggtagggttttgagaacacattctgttgcgtttttcttgtgctttctggggggaagaaagcctagcgccgtgcttgacgaagtcgtgctagcgcttgcacttgcagcggcggtgtacgatttggttggagccggagcgtgaagtctcaagtgatcctgcaactgtcctgtcagttaaactcaaagatgttggaaattgtagtacgatgcggcccctgcgagttttgtagagttgaccctctttcattgtttttttttaaattcaaatcaagtttc

SEQ ID NO: 2431 - DNA, 2003 bp, Zea Mays
gccagttcccactatccggtcgacatttgagtatttgacgcgttttgtttgctgtttagaatttgacaaaatccatccactcttgcctctgtcttctcaacgtaaagacaggcagggcgggcacgaagcgaagggaccagccagcgagcggctcgccggcgacgaccctctccccgccccaccccgcccacggaagcacggagaagatgtccgccgcataccctcgtctcctcctctgtctcctgaccctagccctggctctcgcaggggtcgccgcgggcaagatctcggccccccgcaccccgatctcgcgcgacatctaccactccagtgactctcttctgcgtgaaatcaaggctttggttgctcggcattccagcaaattgagtatggacactatcaaaacaagcaacaaaggctattctgcagagctgtttgtagttacatttaatcatgtgaaggagcgcatggataatggctcaaaagttcatatccttctggttcattgtcttccagagctttgggcagcatggcagagaacttatcacctccgaagttgcattacgtcttctctatgttttaacggagaagcccaagatcgctggtgtggatatttcatcctttgagaaactgctggagaaccttgtgatcaaagttgtgccgatggaaaatatgaatggtcgcaaacgtgtcgaagaaggggagctttgtgataggagaaatggaagaggagttgatctcaacagaaattggagtgttgactggggaaagaaagaaaaagactacgacccatacgaggagaatcctggtattgctccttttagcgaacctgaggcccagatcatgagggaattatcaaggtcgtttaaacctcatatttgggtgaacgtgcattctggaatggaggccttatttatgccatatgatcacaagaataccacaccaaatggagcatctgcacattcgatgcggtcagtcttagagaatttgaaccgtcgccatttccaagatagctgcctagttgggtcaggtggtggatctgttggatatcttgcacatggtacaacaactgattacatgtatgacattgcaaaggtgccaatgccgttcacctttgagatatatggagatgagaaagcatcttccgatgactgcttcaaaatgttcaatcctgttgacaagaaaacattcgacagagttgttaacaagtggtgcatggcatttctcattctcttcgaggaaggcctgcgaaacctgcgagacgcgcagatagtgtcgcaaggcacgctggaaaactgggtcccaattggaggagacatcgtcgagataaatgtggagcggaagagcagcatccgtgagaggaggaagctggaaggcctcgaccttggaatgcaggagctaaggacatatttccggctattcttgctgtcaacattcctgttgatgttcatgttctgcgcgcggatatcaaagaacagaaaccgagactcaggtaacttgtttgacccttgaatgaagtaccaaagagagcatcggtgggggggggcctcctccgagctgaacttcgggtgcaaagagcgatcccctcagatcagacgaacaaagcgatctgaaacattcagagctggaatacagctctgccttcgcaccctggtattcggagctggacgtcccgtatactttggacacgaaggatggtggcaggcagtgtctgtttaggttacagcagagacgccagacgatgtggctaactgtttaacaaaattgtagctgtaaaaatcgcccatgtcagtttttttttggtgatgcataggttttactactacattttgatggaaggttgttagtgcacccaacacttggtacggtgccatcagttgatgtaacatctcactgatcgagcggtttatgtggaattgtgttggctcgaatttcttctgggttctcaaattcatttcgtaactttcaaagtttaaatatttatatgtatacatatatttaag

SEQ ID NO: 2432 - DNA, 2780 bp, Zea Mays
gatctagctggctcttgtgcaattggtatgccacagctgctcttctcaccgtgtgaggacgagcacagtaaaagctaagcatttcttgattcatcctcccagcttcgttaattactatcaatgatgttgctgcatatttctttggcatcttctttgggaaaacaccgctgatcaagctctctccaaagaaaacgtgggaaggctttataggtgcatcaatgacaacattgctttctgcatttgtgctactcctgctgaaaatgtactaaccacaccttccatggtggagtgcagggcctccctgttggggcacgagatcgcccacccgtcgtctacaccagattatttctatcataccatcagatagtggatggacaaccaagcgtgcaccgtttcatcatttctgattctttcttagatgactaagataagtgtgaggtctgtactcatattctttccttttcttttcaatgcaggtatgatcttatacgagtggagattggcaacaaagatataaagcttgaatacttagtggaggcatttacaacttcaaatgacgtagcctcctcgacaccttctgcttctgctaactccggtgcaaggtacgccgctgccatcccaatccctacccccaggcaagctttgttgattgctttctggttgttgatttctgagctagctatttagaagtcaaaaattgggtgaaatctgattaaccaaactacctggttagaaatcaaattggatgaaatctaattaattttgatatgtgtctcctgagttcaaggatgtcttctacaataattcagccaagaacaagaagcgctaattggaatccaaattgtttgatgtggtgatatgatctggaacttggaccatctttatgctttatggggctaagaagcataagacctgtccgaggcaattgtatctcaacataatcagtttgatgggctccaggagttatatcatcagaaatgtttttttagtatttctatgtaccagcaaaatattgactgaatatttctaaccaggtagatccttgctatacttgacaaactaaaggaggaaagggagcaacaagaaggaaaatatggggaggaagatgtggatggttcatgtatatcagaagaagaagatggtgactgggatgtagatgagccagatgaggaggacatcatttacgtaaaatagcccattgtcttctaggaacttggtcatcattcatccagaacacagcaggtgtgcttctactgatcgaaaatacatcttccaaataactatgaggacttaaccaagcaccattcaatcttcatttgcttctatagtttgggttgcgttctgcatacataatattgcctatcaagcctgttctagggagaaagattaactggatgaagacagggatcgttgagagtgatctggttctaacagttagtccacattatgttaaggaactcacttatggcccagataaaggtgttgagttggatggtgtccttcgcacaaagcctcttgaaattggaattgtaaatggcatggatgtttatgaatgggatccttcaacagataagtacaccagcgtgaaatatgatgcaacaacggtaactgaagcaaaggctctcaataaagagaggttgcaagctgaagttggattgcctgtggactcgagcatccctgttatagtttttgtcgggcgtcttgaagaacagaaagggtctgacatactcattgcagccattccagagttcgtgggcgagaatgttcagataatcgttcttgtatgtttcaatttagaagtgatttctattctttcgcatgacacagttcacaatctgatagttgctgagagaaaaaaaattgttcttcagggcacgggaaagaagaaaatggaggaggaattaatgcagctggaagtgaaatatccaaacattgctagaggcatagcgaaattcaatgttccattggcacatatgatgtttgctgggtctgacttcattattgtcccaaattcccatctgttcatcacctggaggacttgttgacacggttgaggaggggtgtcaccggattccacatgggttctttcaatgtcgagtgtgaaactgtagacctagctgacgtgacggcagtagcgtcaaccatcacacgggcctagaacagtacggcaccccggcgttccaagaaatggttcagaactgcatggcgcaaaacctatcctggaaggggcctgcgaagaagtgggaggaggtgcttctgggccttggagtcgaggggagtcaagctggcatcgacgacgcagaggagatcgctccacttgccaaggaaaacgtagctactccatgacgcttggtgcctcggaaacacgcgttggtgataggaagcatcttctaggatcctcctggccttgtggctggagtgagttgttcagtcagacacagtttcgcctctacaacatcttcctcctcctggtggtggtccgaactccgaagcaaattccagtgataaaggatgaactaagaggtccatgtttctattgctagaccttttgcctcctaaatagacgatgtactgcgcttgtaacaagaacctcactttcgtgtcaagtaatatcaacaggtttcataatggtagtgaactgcactggaaaaacctgtaaacaatgcaaacaggattcaaaactaaaacaaatctgctattaaaagctgttattcaaaattgaaaaaaacaaaacctgttaattcagtattataactcagcaaacataaataaaaaaaaca

SEQ ID NO: 2433 - DNA, 3630 bp, Zea Mays
ccgaaacccgccgtccgcgcgatgcgctcgcacgtgccaccgccccccggcccgcgataccgtgcctccgctcgacgcctgcccccgatccctgcgattccagcgccgtcgccgcgcgcgatgcccgtgcacgcacccccaccccaatccccgcctcagcgccgctcccccgcccccacccccgtcctcgccgccccgctccacgctcgcgtggcgtcgtcatcgctgcgctctgcgcccgctccgcccccacccccacacgcgcacacacacctcaccccgcgtcgtcatccacagcccctgcatcgccaccatggactcggggttgaactggtagcccgagggcgcgggaggtgccgccggcggcggaggatgaggcaggcagggcgagggcggcgacgccggaagctcctggaaatggctgcgcgcgcggtggtggtgagaccgctggtccgtgccgggaagcgagaggctgagcaaggtgagcgggtcctcctcctgcggacggctcatggcagtctgccggctcgaacccgccggagcgcgccacggggcggtaaatctggccggacccggagccggcgccgtggctgctgaggtcgctacggtgtatggttggaccccgaccacgaccccgataggctgtcgggcgagaggctcatcatcagcttgcccgggcgcgcctcggtctcggtggcgtcagtgggaaccggcgaaccggacacgacggcccaccgcctccctctgcttcctcccgtcgaagccctccacctctgacacggcgaccgaccactcctccgactccgactttgccaccacgaacagcaacgaggacactgccatcctcggcatgacgggcgacggggcattcgcaatctccttcgccgatcgcttcaccgccagcgccagcgcagcattgttcgtagagaagaggatggttcatggtagcaaaagtatggcggtaccagaacaagggattccccctaatgttgttgaggatggggaacccttcaggcacaccagtgtgggcacttacagaggagcagatgttctttagaggcatgttgtgttgtactcttccacccactctctgccagtctctacacaggttgtggtggaaaacactcgtgtgggatctagctggctcttgtgcaattggtatgccacagctgctcttctcaccgtgtgaggacgagcacagtaaaagctaagcatttcttgattcatcctcccagcttcgttaattactatcaatgatgttgctgcatatttctttggcatcttctttgggaaaacaccgctgatcaagctctctccaaagaaaacgtgggaaggctttataggtgcatcaatgacaacattgctttctgcatttgtgctactcctgctgaaaatgtactaaccacaccttccatggtggagtgcagggcctccctgttggggcacgagatcgcccacccgtcgtctacaccagattatttctatcataccatcagatagtggatggacaaccaagcgtgcaccgtttcatcatttctgattctttcttagatgactaagataagtgtgaggtctgtactcatattctttccttttcttttcaatgcaggtatgatcttatacgagtggagattggcaacaaagatataaagcttgaatacttagtggaggcatttacaacttcaaatgacgtagcctcctcgacaccttctgcttctgctaactccggtgcaagccaagaacaagaagcgctaattggaatccaaattgtttgatgtggtgatatgatctggaacttggaccatctttatgctttatggggctaagaagcataagacctgtccgaggcaattgtatctcaacataatcagtttgatgggctccaggagtagatccttgctatacttgacaaactaaaggaggaaagggagcaacaagaaggaaaatatggggaggaagatgtggatggttcatgtatatcagaagaagaagatggtgactgggatgtagatgagccagatgaggaggacatcatttacgtaaaatagcccattgtcttctaggaacttggtcatcattcatccagaacacagcaggtgtgcttctactgatcgaaaatacatcttccaaataactatgaggacttaaccaagcaccattcaatcttcatttgcttctatagtttgggttgcgttctgcatacataatattgcctatcaaggtagatttgccagagcagacttcgatcttcttaatctacctgacagtttcttaccatcatttgattttattgatggacatgttaagcctgttctagggagaaagattaactggatgaagacagggatcgttgagagtgatctggttctaacagttagtccacattatgttaaggaactcacttatggcccagataaaggtgttgagttggatggtgtccttcgcacaaagcctcttgaaattggaattgtaaatggcatggatgtttatgaatgggatccttcaacagataagtacaccagcgtgaaatatgatgcaacaacggtaactgaagcaaaggctctcaataaagagaggttgcaagctgaagttggattgcctgtggactcgagcatccctgttatagtttttgtcgggcgtcttgaagaacagaaagggtctgacatactcattgcagccattccagagttcgtgggcgagaatgttcagataatcgttcttggcacgggaaagaagaaaatggaggaggaattaatgcagctggaagtgaaatatccaaacattgctagaggcatagcgaaattcaatgttccattggcacatatgatgtttgctgggtctgacttcattattgtcccaaattcccatctgttcatcacctggaggacttgttgacacggttgaggaggggtgtcaccggattccacatgggttctttcaatgtcgagtgtgaaactgtagacctagctgacgtgacggcagtagcgtcaaccatcacacgggcctagaacagtacggcaccccggcgttccaagaaatggttcagaactgcatggcgcaaaacctatcctggaaggggcctgcgaagaagtgggaggaggtgcttctgggccttggagtcgaggggagtcaagctggcatcgacgacgcagaggagatcgctccacttgccaaggaaaacgtagctactccatgacgcttggtgcctcggaaacacgcgttggtgataggaagcatcttctaggatcctcctggccttgtggctggagtgagttgttcagtcagacacagtttcgcctctacaacatcttcctcctcctggtggtggtccgaactccgaagcaaattccagtgataaaggatgaactaagaggtccatgtttctattgctagaccttttgcctcctaaatagacgatgtactgcgcttgtaacaagaacctcactttcgtgtcaagtaatatcaacaggtttcataatggtagtgaactgcactggaaaaacctgtaaacaatgcaaacaggattcaaaactaaaacaaatctgctattaaaagctgttattcaaaattgaaaaaaacaaaacctgttaattcagtattataactcagcaaacataaataaaaaaaaca

SEQ ID NO: 2434 - DNA, 1552 bp, Zea Mays
gtggcttcggttcggacatttgcttgcaaaattgaagcgcctttgacgtgcagaagtagcgaaagtgctttgttaacaccagagattaaaagatagcgccgtagcgcaatgaaggcaccatcgctactggttcggtgtttccctggcttgcttcccagcaaggacactagttgtgtgccaattgtgtccgagaaggatctgcagctaccatcactagccgttgaaataattccctcaaagagtgctcacccgtacaaatatgctggagagaaggttgatgtgcaaggttttgatattttcaagggtaaagttagtgtagcagatatgatatccttctcaccttctgaagtagcatcatcaaaatatgatggagctctgaaaagctgggagaattctattactcttgtcaacattattcgaaatgagatccgtgatggccagttgagcttcaggggcaagcgggttctagagcttggatgtggatctggcgtctccgggattttttcatgcttgaagggtgcatccaccgttcactttcaggacatgaacgcagaaaccatacggtgcagaacaatacccaatgttcttgcaaacctcgagcaggctcgggacaggcagaacagaccatcagaagagagccccgtgacgccatcccggcagctcttggatccaaacgtgcatttctatgccggagagtgggatgaactcccgacagttctctcggctgtgccgccacccgcggcgccagcagacctcagcttctccgaagacgatttcatggatggcggcagcagtagtcatgatggaagcagtgtagtcgtcggccaggactactgccccagaagatctaggaagctctccggtagccgccgcgcgtgggagagggctaataacgagaccgaccaggcagatggcggctacgatgtgattttggtctccgatgtcccctacgcagctaactctctgaagaagctccatgcgcttatttcaaagtgcctacgccctccgtacggagtcatgtactacgtggcatcgaagaagagctcggttgggtccaacggtggcgccaggcagctccgagctctgatggaagagggaggcgtccttggcggccacttgttgaccgaggtgtgtgacagggagatatggaagttcttcttcaagtgagcagatccagggactgggagtgggaacggcaggggaaatggatccttcctgacgttgaaatgaaacccagttttttttttggtttctatctgcagcgatgtacatacataccgcgaggcgtatagtacgtagttccattaattctttggcagcagcagcagcaacgttgaagcttcaagaatcaaatacctgtagctgagcttgcacgaatccttcgccgcctttgtagagatctgtctgctatgtgctgtgctagtgtcgttctgttaaagtacagagagcaaattgtagtgacctttttgtgtatatcgaatacacggtgatggcaattcggccggtgcatggtatgtgtgagaaactcgcgcacaatttctacatgcatctt

SEQ ID NO: 2435 - DNA, 2119 bp, Zea Mays
ccgcttcacgtcaaacgggtgaagagagttgctggagtaaaatcggcgcccatgccagcagaagcggcgaaacttccacccccaccttcccctcctgctgcgtgtgtatacatatttactcgccccggctggctcccaccacctcactccattcctgacggcggtttgaccttctgaccggagggagagagagagagagagagagaggagaatcatagctgctgcgttcgatttgcggagggctggaggggacgcgagacgggacaggacggatcttcgacggagcgttgcccgattcgtcgcagttcccggacaagggaggaaaggcgtgggaagagggaggacgcgcgttggtctccgatccaagagctttgttaacaccagagattaaaagatagcgccgtagcgcaatgaaggcaccatcgctactggttcggtgtttccctggcttgcttcccagcaaggacactagttgtgtgccaattgtgtccgagaaggatctgcagctaccatcactagccgttgaaataattccctcaaagagtgctcacccgtacaaatatgctggagagaaggttgatgtgcaaggttttgatattttcaagggtaaagttagtgtagcagatatgatatccttctcaccttctgaagtagcatcatcaaaatatgatggagctctgaaaagctgggagaattctattactcttgtcaacattattcgaaatgagatccgtgatggccagttgagcttcaggggcaagcgggttctagagcttggatgtggatctggcgtctccgggattttttcatgcttgaagggtgcatccaccgttcactttcaggacatgaacgcagaaaccatacggtgcagaacaatacccaatgttcttgcaaacctcgagcaggctcgggacaggcagaacagaccatcagaagagagccccgtgacgccatcccggcagctcttggatccaaacgtgcatttctatgccggagagtgggatgaactcccgacagttctctcggctgtgccgccacccgcggcgccagcagacctcagcttctccgaagacgatttcatggatggcggcagcagtagtcatgatggaagcagtgtagtcgtcggccaggactactgccccagaagatctaggaagctctccggtagccgccgcgcgtgggagagggctaataacgagaccgaccaggcagatggcggctacgatgtgattttggtctccgatgtcccctacgcagctaactctctgaagaagctccatgcgcttatttcaaaggtcagctccaagatccctcttttttcttttctttttttgccgcatcttctttttttttacacgtttctctacgcgtggtgtactaagctgaaatagcagtggaggcagcacgcacgacacttaaaaaaagtcgattaggttaggttcttccattgatcagaaccgggcatagctaagagtgcgtgcttcctcgtcctttcgaccggcgacgcgctgatacgaagcagcgttgttttaacggcaacagcgtctctcctgcctgcagtgcctacgccctccgtacggagtcatgtactacgtggcatcgaagaagagctcggttgggtccaacggtggcgccaggcagctccgagctctgatggaagagggaggcgtccttggcggccacttgttgaccgaggtgtgtgacagggagatatggaagttcttcttcaagtgagcagatccagggactgggagtgggaacggcaggggaaatggatccttcctgacgttgaaatgaaacccagttttttttttggtttctatctgcagcgatgtacatacataccgcgaggcgtatagtacgtagttccattaattctttggcagcagcagcagcaacgttgaagcttcaagaatcaaatacctgtagctgagcttgcacgaatccttcgccgcctttgtagagatctgtctgctatgtgctgtgctagtgtcgttctgttaaagtacagagagcaaattgtagtgacctttttgtgtatatcgaatacacggtgatggcaattcggccggtgcatggtatgtgtgagaaactcgcgcacaatttctacatgcatctt

SEQ ID NO: 2436 - DNA, 1227 bp, Zea Mays
caagtgaagtcctacgtgatgcggacgctgcaaccaaccggctccctgcgtcctgctctgcagctgctgaccccttctcccgcctccgaaggaaaacgggcgggcaaccttctcgtcccttccaaaatcccgagtttccccccgatttcgaccctccgttttccccccgcttccttctctgctccaccgcctcaggaatatagatagtcggagaaaaaaaaaactgagagagaaagagagaggaggaggaggcaggggagtggaggggaggggaagcatcgcaattccgaacccccacctcgccgctcccaccaccgcggccgggttgcgtccgtttcgattgcccaggatgagcaccgagtccggggagctgctcgggatcgaccccgtcgagctccggttcccattcgaattaaataagcagatctcctgcacgctgcagctgacgaacaagacagacaagcaggtcgcgttcaaggtgaagacgacaagcccgaaaaagtactgcgttcgcccaaacaacggcatggtggcgccccggtccaaggctgacgttgttgttacgatgcaagcgcagcgggacgtgccaccggacatgcaatgcaaggacaagttccttgtgcagagcgccactgtcgccaaggaggtcgtgccaaaggaggtcactggagacatgtttaccaaagattcaggcaatgtagtggaagaagtgaagttgaaggtagtttatgtagcaccatcgtcctctcaaagcgaaagatttgaggatggtaatctcggcagtttgagttatcaagaggaaacaaaggaacctaaagaatcagaaaaaataatcactgagccatttgctttgatttcgaaactgatggaggagaagaattctgctattgaactgaacaacaaggattttctaaggcgagacatcagcaggcggcatggtggtttctcattagttttagtactggtggttgctattctgggaatactgctagggttcctcatgaagagatgagtgtatgtaatgatttatcttgtttggccttttctgaactaaacaaaattgtatgtgctctgtgtgcttgctgttgtacaactcagtgatctgttaatcatagtatctgaggcctattgtaattttctgattcatattataaactttagtcaatctgtcatagttactaacaccagctgttatcagcttgcaagcgacttgaggtctggaggtgt

SEQ ID NO: 2437 - DNA, 867 bp, Zea Mays
ggcagcaagagataaggactgcagatgagctggttcaaatgattgcccatttctactacaatgcaaagaggccatcttgcgttaatcctgaggccgttgcttctttctagttcttgtatagaattgttgacatagtgttttcatcctcaaccggtgtgttggtgctagtttttgactggaagaagaagctcccttattcaatcattttccaggacatggtgctcggatagtttggaattgatatgactaaacgaaaaccaagaaaaacatctcaatgctggttgggaaagtgtgaactaaatcatgtatcattctgattagtagtgtagtgtaacaaaatacaactttcaggggagagtgcttagatcatttttatcggttagctatattagatgatttcaaagttgactgcaaactttgtcatggagcaaaacttaggtgctgtttggttcacgaaatataacgtaaagggtaatggtaatggtttacacttgattacgggcggtaacaagtttgaatagtccggtatcaaattttagtacggtatctgattacggttggactaaaacaaacatgatttaacgtaatcatttacccattacgttacaaatatttgaaccaaacggtaccttatttcggttccctcttatagtgagaggaaaatatattttggtgtaggttgaacgcgtactcttgtggtgttttaactcttttcccgtgctagaaactgggactacattcggatgaagaactggttaattcgtgtcggtctgttttctgttttttttttgctattttagggtgtttatttggtttgctgttccaagttacgtcaaatgctaattttgtttattttctaagctgaat

SEQ ID NO: 2438 - DNA, 2247 bp, Zea Mays
ccaaagtttatgtactcgctctggcagatacggcgtttagacgacccagttccggccgccgcggtgctccgagcctccgacggccgctgtggccctgtggcgggcggaagcaccctcgggcactagccttctgtttctcctcttcgcggctgacctgcaaagaatccccgaaaaagagttgaggagagtgtacgagttgggtaaagcagaggaagagatggtctgggtgttggaccccgtcgacacagtgcgcgggattcagaagcgttacatcttcgctgccgggacgtacaaggtcggccgcaaagattgtgatgtcattgttcaaactgacacatctatatcccgagtccatgcggagattgcaattgaaaagatggttgcctgggatccacattctggtgcacctgccagtccatcatttgttcgtgtaatcgaccgatcaaagtatggcacatttgtcaacaaagtacatggaacccagggcagccgtctgcataaagatgaagatatgatgcttactgatggggatgctgtgacgtttggaactggtaatgcgacctttaggtgcatatgctactcgtaagtggagcaatgaatgtacacatgttcttgttgacggatcatgttcgttgacacctgagctcctcgatgcagttatggcaaagaagcagatcatgttgggagactggtttgaggcaatggctgaaaagaacatacacacagagatcccttcttgtacacaatacattccaaacttgactctagatgggatggtgatcaaaatggtggatatcaacctcattcagaatttcctagaaggctatacttttatcctggggtcatcagataaatatcaatttggtgagaagctccatggattactggaatcaactggagcaaaatacgtgcacattgacgacttttgtgcaaacagccaggactcagcagctggagacactgatcatcaaattcttgtagttcctgcacgatatccattggaattcagcaagatacgtgtgctgtttactttgtcaaagatcagtgatattaagctatttgcagctatattgtctggccgcctggaagcaacttctattgaaccacctgctttcatcgttacatcctcgaattccacggatgccactattgtggcggattcggatgttgaaatggagacagcaacttctaatcctactggtgctgccaacaagtctcaacatcacaccgagaatatctctgacgatgaaaaacaaaccacaaatataaccaacgaagttgcaaggaagggtaacgttattcacccaaaacacccagagagcgttgaagatttgaaaccgatggaggaggatgtgaaggtcatagagaaaacagcaacgtacaggtccacgggtagagacgaggatgctcgcattctaagcaaggcgccaaaggatgaaaaattagacaccagcagggatggggcttctgatgtcatatttagtcagaatctggtcgtcagaagaagcctcccccagtcagctcctgccgcaccagcagaaatcggaggcgttaacttcaagcgcttcaggaagagggaaatggtgtctggaaacagcttcaaggacctcattccgtttgcgcgggaaccatacagagagtcggaccacgaacgtggcagcacgatgaccgatttcatgcgggaggagaagcggcagaaacaaatggaggccattgcggaggatctcttcaacaacgcaaagtccaagaaaagagcagccgctggaagttcgattcacaccctactcaccggccacagatgatgagagccaggcaggcagcaggagatcacctctatatgcgatctgcatgctcatctgttagccacggcgttagaagccgaattagtgtaggacggctgtcggatatggattgtacctgaggtcatgttagatatgaatggttctgagggaaatattagctgtgattttggcattacgcgtcgggcaagtttagcgttagtctagaatttgaccaaacaagaggattttctccggttggatgttgcgagcacgagggttttcttgggttgaatgttgcatggttagttcaccaagggctagtttgacaaccccattttacaacggaacgctacacctacgagattatgatgtttgatgtgttcagcagcctatcactatcagtgaccctcaatcctgttgttaccttgatgccaaacgatacgttcaaccgacgagacaatgtgcg

SEQ ID NO: 2439 - DNA, 1677 bp, Zea Mays
gtcatgtggagccgacagatgatggcctcggcaccggcggcgccggcgacatcgaccgatctcctcgtcgtcggccagtaacacgcattctctctccctgcccagctactgatttcccaaaaggcccaagcttcgttcttatcccctcagtcagctggacagctgtgtgcatggcaggctgtagtagtgtccaagcaaaacaggcacaggttcaggttctgcaaatttggatggagggaagggagggtattgcagttggccgcgaatccggccacggcagcatgttcagagcagcagacatcgccatggcggaggcgcaagaagcagcagcgaaaggctaccagtcctctccatcctcgccgtcgacgtcccccacgccgtcgccgccagcggctgcggctggccacgccggggacgccgccgcgactccgcttgcctggagcttgggcggcgagacgccgagtggggccgtggtggtggacaacggcacgcaaacggccgggcagagcgagcacgccagcctgagctccgggcgccgccggggccggccgcgcggttccgggaggcgccagatcctagccactctaggggaatggtacgcgctgtcagccggcgggagcttcacgcctcatgtcatcatcgtgggtactggggaggatgtggcggcgcgcatcatgtcgttttctcagaagggtccacgctcggtctgcatcctctctgccaacgggtcaatctctaatgtaacactgaggcagccggatgcatctgggagcaccttcacctacgagggccgtttcgagatcctgcagctgatgggctccttcacaatggccgaggaaggccggaggagaaccggcgggctgagcgtctctcttgctggccctgacggccgcgtagtcggcggcgtagtggctgggatgctgcgtgctgcaagtcctatacaggtgatcgtcggaagcttcctgcccaacagcctgaagcagcaccagaggaggaggatgagcatgcagcagccttcccccgttccggcgttaccagcacccgtggcacccccgccgccggtgcttaccgcggccaccccgatctcgcaggcaggtcccgggaacgggttccacgcaccgccgccgccgcactccgcagcacctccccagccccacgccaacgccatgaacctgaacgcgacgacgacgggcttcaccatggtcggctggcctgcaagctcgccgcagcccatggcgtacagggcttcacctgacatcaacgtcagcttgactccccaggagtaggatcgctgggctcgtcttcttcctttttctttcttttttttttctttccctgggctgacacgttttgggtgggagagaggaaacagagcgtggctgatgctctgaatgagattatggactaatctggtgttaattttagggtagggcgtgccaacttgtttgggttgctgctttcggccgtcatggctgtggatgttgatttagttctagttctagtcagtcagtcctattcagtttctgtctttctgcgctgcagctatttagcatgtcctgttattggtgaatcttttctgatgatagagggaggaatcatcttctgatgacagaggaatcagttctgttatttgtgaaaccgaagaagacgtgcgtcgtgaaaatgttgatttctgct

SEQ ID NO: 2440 - DNA, 2045 bp, Zea Mays
ctcagttataagacttcttgttggatatgctattaggatagttaaattgtaaaatttgtagatatgtcaaaataaaaaaaaagggttagagacaatgtccaaataaactcggtaataaagagcaggcactctccccacctcacctcagtcaccactactttcccgctctatccgtatataacacccaccaccaccgccactctccttcctcctctgcatgtctcaacaacccgtctccaagaaaccaccttcccccctcgctccaatcccaatccttctccgcggaccaatagaacccaatccgatcactccccacgcagtttccccatatcgaaagatccgatcggagtccggcagctaattcaccggggaaagatgaaggtcgacagggagatggagattctgctgaacgagatccccctcctccaccacgtcggcctcctcggcggcagcgaggccggcgcggacgacgacgccgacctctccttcctcatccacgagctcgccgcgatgggcctcgtcgacggcgacgacgagctgccggcgccgggcgctgccaccggctacggcttccccacgaaaggcgagaaccttgtcgccatgcactcgttctccatggccagccactacgcgcacatgcgctctctgtttgttcccgtcaccttatgtgcctctgccttctcccgccacgccgagggcccggtgcaagagcgtgaggaggaagaacggctcggtgatgacgacgagccccaagaagtgcggagccgccgcggcggccaagtggcacggcgagagcctggccggcctgcgcggggtcatgtaccacatggcgcgcgaccagcacgggtgccgcctgctgcagcagaggctcgacgacggcaagcgcgaggtcgactatatcttcgccggcgtctcgcgccacgccgcgcagctgatggtggacccgttcgggaactacctcatgcagaagctgctcgccgtctgcgacgacgggcagaggatgacgcttgtgctcaccctcaccgccgaccccttcgcgctcgtcaggatatccctcaacgtccatggaacacgggcggtgcagaagctgatcgagagactcagtgcaagggaagagattggtcttgtcatggatgctctgcgccctggcttcttggagctcatcaaggataccaatggcaaccatgtcgtgcaaaagtgtttgcattcgtttgcttcaaacgataataaggcgatctttgctgctgctgcactccactgcgtcgatatcgggatgcaaatccacggttgctgtgtcctacagcggtgcattgcgcggtcgcgtggtgagcacagggacaagctggttgccgccattgctcacaatgggtttaagcttgccgaagatgcatatgggaactacgttgtccaggttgtactggacttgaagataccaactgcgaattcaagccttgcgcaacagtttggaggcaagtatatccacctgtccatgcagaagttcagcagcaatgttgtggagaaatgcctgaaagtgttcaaggaggttgacaaggccaagatcatactggaactccttgccacgccacacctggagcaactgcttccgcactgctatgcaaactatgtcgtctactctgctctcaagaattcaaagggctcacttcattccgcactgataaatgcaatcctaccacatgaggaactacttaggaccagtccgtactgcaagaggatatactcgaaattttttctgaagaattgatggcaggtttgcagcttgtaacaagaactgctgcgctcttgtgctattttttttcagtttcaaaaggcataaagatgatcatgaaatagatctgtataaattagtattctttggtcatgtactcctagctgtacctgtaattgatgcacggcttgtgcctggtgctgcataatcatctgggacggaataagttcaattgaaagtatcatacaaattatttgtatgttacgttgttgtcttgttgatgcatgcaaggatattgttgttgttaccaactgatgca

SEQ ID NO: 2441 - DNA, 2153 bp, Zea Mays
ccacgagccaagcaactgtttcggtcattgacaccagcgacctcgccgcagggcccacactacatgaccgacagctcgcgggttgtattcccggccgccagcgtagcagaagcgaggtttcctccaatcgatctgtacgccctccccaccggccggtcgcgcacctccaccaacctgctcgctccgtccgtcgccgtcgccgacccgccaccatctccgccctccaaaaccctactacccctgtagcctgcagccccgtgcccgccatggctaccaacggcagctccgtgagggttcgggacacggagagcagcctggagaaggtgaagcggcagctgtcgtcggggtccgggaggtacctgctgcaagggcccctgctcaagcgatctgagacgagggatgccaaaatacgatggctgctgcttctacattgggactcctcaaaagaaggaatactttctttgcgctgaaactcctggtgctgcaaaagcttgggtatctacattacagtaagctttctgacccctgaccagttagtacattccacagttttgcttgtttcgcacttctgtctcttgtatattgataggcagagtacctagcaaacctttatctcagtgcaagaatgcagactccaatacgagagtggagtgttatccatttgagctactcaatgttgagttatatccctgttgctgcatcctgactatagttttgtgtgctttgctgctatgcgcaactcagttagtcttacgagctcataaagaggcagtaaattctttggctgggaatggctctccagctacattaggcacagttgctactgcagttgctaatgctaatgcaacagccatggaggctaccaaggagatagaagctgcactaaaggtttcaatgagggcagcccttgggttgggtacaaataactccaacgatggccaacttgatgacctaacaatcatgaaggagactctacgagtgaaagatgaggaattgcaacatttggccaaggatatacgttctcgagatgctacaataaatgaaatagcagacaaactaacagaaaccgcagaggctgcagaagctgctgcttcggcagctctcacaatggatgaacagaggcgacttttgtgtttggagattgagcgactaaaacaagccttggaaagacaagtagaacaatcaatgctgaagcttagacagtccgaagagaaggtcatcagcctgagcaaagagaaggagcagttgatgaaggaaagagacgctgcgtttcaagaggctcatatgtggcgcgtcgaactaggaaaagccagggagcaagcagtgatacaggaagcaactattgcccggaccgaggagaaggcaagagtctccgaagcagatgctgcagctcggattaaggaagctgctgaaaaactgcgtactgttgagaaagaaaaggaggagcttctagccctggttggtgttctccagtcacaagtccagagagagcagagcagcacaaagcaagtgtgtggggagaggtctgagtcgtgttcaggcgccgacagcccccctcccctgacaaagcatgttgatgcatcggacgatgacgtggacaaagcctgcgtgagtgactctagatcagtgctggtgtcgagcgacagcactgaggtccagctggctgtggacggggtggacatccgtcctgtcggcgacgcagagtggggtggcttccagcagtcagatgcgctgatcgctgatgtccgtgaggtctccccagaggcagatggaggcagcttggacattcctgtggtcaaccctccaccgatcagtgatcatgttcagggaggcgcaactcatccctgaaggcctgaggttgctggcttgctgctgccttccgagattggtgtggttgctgggaaaccgatagggatgtctaaatctggagagtcgccgttgagggtgcatattgcatcgatgcgattgtatgtccattgaggtatacgattgaataaaaaggtagtaactgtgtctggctgtgggattgtaaatattcgcctcattcccttttgctacggctattcacgtgtgatattttagctcaggtggatggattgtgtgatatcctggtcaagatttaataaaattaatagagtatttatactaataag

SEQ ID NO: 2442 - DNA, 2164 bp, Zea Mays
ctcgcgggttgtattcccggccgccagcgtagcagaagcgaggtttcctccaatcgatctgtacgccctccccaccggccggtcgcgcacctccaccaacctgctcgctccgtccgtcgccgtcgccgacccgccaccatctccgccctccaaaaccctactacccctgtagcctgcagccccgtgcccgccatggctaccaacggcagctccgtgagggttcgggacacggagagcagcctggagaaggtgaagcggcagctgtcgtcggggtccgggaggtacctgctgcaagggcccctgctcaagcgatctgagacgttacggaaatggaatgaacgatgggtcatattggatccgacatctgggaagatggaatacaaactccggagaaatgaaactgtcattaagggcagtgttcttaaggcgtcgcctaggcgccgtaagaacactgattaaggggaccattctgtttgatgcctcaagcaccattactttatctcctgtgaactttcaagggatgccaaaatacgatggctgctgcttctgtatcctgttttcctatattttggtcaaagagattattgtttcagaaagagtttcttaaatagttatagaggaatcacatggtttaaggttttactgttcctttactgtatttagacattgggactcctcaaaagaaggaatactttctttgcgctgaaactcctggtgctgcaaaagcttgggtatctacattacacgcaactcagttagtcttacgagctcataaagaggcagtaaattctttggctgggaatggctctccagctacattaggcacagttgctactgcagttgctaatgctaatgcaacagccatggaggctaccaaggagatagaagctgcactaaaggtttcaatgagggcagcccttgggttgggtacaaataactccaacgatggccaacttgatgacctaacaatcatgaaggagactctacgagtgaaagatgaggaattgcaacatttggccaaggatatacgttctcgagatgctacaataaatgaaatagcagacaaactaacagaaaccgcagaggctgcagaagctgctgcttcggcagctctcacaatggatgaacagaggcgacttttgtgtttggagattgagcgactaaaacaagccttggaaagacaagtagaacaatcaatgctgaagcttagacagtccgaagagaaggtcatcagcctgagcaaagagaaggagcagttgatgaaggaaagagacgctgcgtttcaagaggctcatatgtggcgcgtcgaactaggaaaagccagggagcaagcagtgatacaggaagcaactattgcccggaccgaggagaaggcaagagtctccgaagcagatgctgcagctcggattaaggaagctgctgaaaaactgcgtactgttgagaaagaaaaggaggagcttctagccctggttggtgttctccagtcacaagtccagagagagcagagcagcacaaagcaagtgtgtggggagaggtctgagtcgtgttcaggcgccgacagcccccctcccctgacaaagcatgttgatgcatcggacgatgacgtggacaaagcctgcgtgagtgactctagatcagtgctggtgtcgagcgacagcactgaggtccagctggctgtggacggggtggacatccgtcctgtcggcgacgcagagtggggtggcttccagcagtcagatgcgctgatcgctgatgtccgtgaggtctccccagaggcagatggaggcagcttggacattcctgtggtcaaccctccaccgatcagtgatcatgttcagggaggcgcaactcatccctgaaggcctgaggttgctggcttgctgctgccttccgagattggtgtggttgctgggaaaccgatagggatgtctaaatctggagagtcgccgttgagggtgcatattgcatcgatgcgattgtatgtccattgaggtatacgattgaataaaaaggtagtaactgtgtctggctgtgggattgtaaatattcgcctcattcccttttgctacggctattcacgtgtgatattttagctcaggtggatggattgtgtgatatcctggtcaagatttaataaaattaatagagtatttatactaataag

SEQ ID NO: 2443 - DNA, 2569 bp, Zea Mays
gtcattgacaccagcgacctcgccgcagggcccacactacatgaccgacagctcgcgggttgtattcccggccgccagcgtagcagaagcgaggtttcctccaatcgatctgtacgccctccccaccggccggtcgcgcacctccaccaacctgctcgctccgtccgtcgccgtcgccgacccgccaccatctccgccctccaaaaccctactacccctgtagcctgcagccccgtgcccgccatggctaccaacggcagctccgtgagggttcgggacacggagagcagcctggagaaggtgaagcggcagctgtcgtcggggtccgggaggtacctgctgcaagggcccctgctcaagcgatctgagacggtatgacaattcctggcccaagtcaagtcgttcattgggtgatggattgcatttgtttgattaagcgtgtgaagatttgaacttggtgctagattttgttaaccgtagggctgaggtgttgaagggttcagctttgtcactgaattttggtgttagtataggttgattatgtagtagtaactgatatggttagttgtgggggctgtatcattagattgcgtgggtggaaatgtgaatggtggggatgactacacattgcataggaactctgttagaaagtactattgggtgattcacctggaccaactgttttcgtatgcacaactgtatgatactagtgaacatagtttttgtcttttcctgatgaggctgtccttgtgagttttatctaataatatcatcctccaaacccttatggcctttcaagcagttacggaaatggaatgaacgatgggtcatattggatccgacatctgggaagatggaatacaagtatggaaccttgcctgtttaataaccgggaatgccaagtaaaattacaactaatacctgatcagaagccactgatgtattggtgcagactccggagaaatgaaactgtcattaaggggaccattctgtttgatgcctcaagcaccattactttatctcctgtgaactttcaagggatgccaaaatacgatggctgctgcttctacattgggactcctcaaaagaaggaatactttctttgcgctgaaactcctggtgctgcaaaagcttgggtatctacattacacgcaactcagttagtcttacgagctcataaagaggcagtaaattctttggctgggaatggctctccagctacattaggcacagttgctactgcagttgctaatgctaatgcaacagccatggaggctaccaaggagatagaagctgcactaaaggtttcaatgagggcagcccttgggttgggtacaaataactccaacgatggccaacttgatgacctaacaatcatgaaggagactctacgagtgaaagatgaggaattgcaacatttggccaaggatatacgttctcgagatgctacaataaatgaaatagcagacaaactaacagaaaccgcagaggctgcagaagctgctgcttcggcagctctcacaatggatgaacagaggcgacttttgtgtttggagattgagcgactaaaacaagccttggaaagacaagtagaacaatcaatgctgaagcttagacagtccgaagagaaggtcatcagcctgagcaaagagaaggagcagttgatgaaggaaagagacgctgcgtttcaagaggctcatatgtggcgcgtcgaactaggaaaagccagggagcaagcagtgatacaggaagcaactattgcccggaccgaggagaaggcaagagtctccgaagcagatgctgcagctcggattaaggaagctgctgaaaaactgcgtactgttgagaaagaaaaggaggagcttctagccctggttggtgttctccagtcacaagtccagagagagcagagcagcacaaagcaagtgtgtggggagaggtctgagtcgtgttcaggcgccgacagcccccctcccctgacaaagcatgttgatgcatcggacgatgacgtggacaaagcctgcgtgagtgactctagatcagtgctggtgtcgagcgacagcactgaggtccagctggctgtggacggggtggacatccgtcctgtcggcgacgcagagtggggtggcttccagcagtcagatgcgctgatcgctgatgtccgtgaggtctccccagaggcagatggaggcagcttggacattcctgtggtcaaccctccaccgatcagtgatcatgttcagggaggcgcaactcatccctgaaggcctgaggttgctggcttgctgctgccttccgagattggtgtggttgctgggaaaccgatagggatgtctaaatctggagagtcgccgttgagggtgcatattgcatcgatgcgattgtatgtccattgaggtatacgattgaataaaaaggtagtaactgtgtctggctgtgggattgtaaatattcgcctcattcccttttgctacggctattcacgtgtgatattttagctcaggtggatggattgtgtgatatcctggtcaagatttaataaaattaatagagtatttatactaataag

SEQ ID NO: 2444 - DNA, 650 bp, Zea Mays
attcggacctcgttccgcctctgcggctctgcccctctctctcacctccccgcgggcggccgcccccaccgcagcccgaaccgcatctcccccaccactggcatccccctaccgcttacaaatacgcgacacatcccacctcgacggtctctttctcgcatcgctgcgccgctccatccgctcggctcccacccgtccgtcgtcgcctcgccgtcgagccaccgccctccttgtcaacctctgttgctgctcgggccgggcgggaggagaaaagatgggggtgtacctcagcacgcccaagacggacaagctctcagctgatggagagaacagccgcgtccggttcggcctctcctccatgcaggggtggcggaccaccatggaggacgcggtgagttgcttccgcctccctcgtggcttccgattgggtgggaatgggattgctcccgactgttccgttccatgctcgcatgactggtttggggtgatttagggtgagatgtgcctgtgcctgttggagtttgcggctgtgcagtgtccaaggcgcgatcctgttattatgtgtagttttgcacgatgagaaccaagttacctgttgttgtttcccatggtcaacctataataaactatgtcgtgatttaatcgaccaa

SEQ ID NO: 2445 - DNA, 4427 bp, Zea Mays
ctaggctccggtcagagggacacgagaatagctcgtcaattcgtcatcgctcgatgctcgatgcctcgatctcggccactcggctgctctccacacacggccgggtgacaagtgacgctcccctccatcgcttccacttcgaaacatttcgaattcctcaacccccgaaagggcgaaaaccccaacgcctccaaaagtttcccgcccgagcccctcgaaccctagtaccatcaccgactggcgacgcctcgccggcggccggcgagatgcacatcaaggaggtaactctcgaggggttcaagtcgtacgcgggacggactgtggtgccggggttcgacccgctgttcaacgccatcaccgggctcaacggttccggcaagtccaacatcctcgactccatctgcttcgtgctcggcatcacagatctccgtcaggtacgcgctgcctcgctccaggagctcgtctacaagcaaggccaggccggggtcaccaaggctaccgtgtccatcgtcttcgacaattccgaccgctcccgctccccgctcggctacgaggactccccggagatcactgtcacgcgccagattgttgttggtggaaggaacaaataccttatcaatggccatcttgcacaaccttcccgggtgcagacccttttccactcagtgcagcttaatgtaaacaatcctcattttctaattatgcaagggcgcataacaaaagtgctgaacatgaagcctccagaaattttgtcaatgttagaagaggcagcaggtacaagaatgtacgaaatgaagaaagaatctgctcttaagacacttgaaaagaagcagaataaagttgatgagattaataaactccttgatgttgaaatcctccctgcactagagaaacttagaaaagagcggtgtcaatacatgaaatgggccaatggcaatgctgaactggataggctcaaaagattttgtattgcctatgactttgttcaggctgagagagtgcgagatggcgcactgaatgatgtcaaacaaattaaaacaaagattgttgagctggatgaaactacagaaaacataaaagcagctatacaagaaatggacaataacatttctaccttggctgctgaaaaagaagctaaagtaggtggtgaaatgaaggttctgtcagacaaagtggataaactatcacatgtacttatcaaggaaacttctgtgatgaataatcaagaggaaaccctgaagtctgaggaaaagggtgctgagaagattctcacaaacattgaggacataaaaaggtctatactcgagagagatgctgctgtaaaaaatgtagagaatgaggcttctgacatgaaaagaagagcagaggatctcacaaaggagttggacgagaaggagaaagaataccagggtgtgctagcaggaaaaagcagtgcaaatgagaagaaatgccttgaagatcaactgagagatgcaaaagctgcagttggagatgcagaatctggactaaagcagctagctacaaaaataaagcattctgaaaaggagttgaaggagaagaaaactctattagtatccaagcgtgatgaggctattgctgctgagaatgagctgaaaacaaggacaaaagacttagaaggtatcaaggcatccatgggatctattaattatgacgagggtcagatggaagctttgcaaaaggaccgttctgcagagttagaaattattcaaaaattaaaggatcgtgttcgtaacctttctggtgagcttgctaatgttcacttcagttatcgagaccctgaaagaaattttgacagatcaaaagtcaaaggggttgttgcacgtcttattaggattaaggacagctcaacagcaacagcactggaggttgctgcaggtgggaggttattcaatgtggttgttgacactgaagaaactggaaagcaacttttaaaaaatggggatctacgaagtagagtaaccatcatacctttgaacaaaatccaaacttacatgatacctgacagagttcagcagacagctcgtagactggttggtcctgacaatgtaacattagctctagaattggttggatatggtgaggaagtaaagaatgccgtggcttttgtctttggctcaacatttgtgtgtcgtaatatggatgcggcaaaagaggttgcgtttaataggcaaattagcagtactagtgtgactcttgagggtgacacttatcagccaagtggtcttttgactggaggtagtaaagggggtagagggaacttgctaaggaaactcgacgaactagctaaagctgaggctgatctatctgatcatgagaaaaagctctttgtcattgaacagcagattggagcccttttaccattgcagaaaaggcacactgagttgaaatctcagtttgaactgaagtcatatgatctctcgctgtttcagaacagagttgagcaaaatgaacatcacaagttaggtgagctcgtaaagaaaattgaacaagagcttcaagaatctaaacaagagttgacagaaaagcaagtgcagcatgaaaaatgtgtgtccacagtttctgagttagagaaaactatcaaaacttatggcacggaacgagagggcaaactcaaagcgctggaaaaaagaatcaaatcaattaaatcagagatgcagtcgatgtcgaagcaactaaaggcttatgaaagtgacagggagaggctgatcatggagaaagatgcggttgttggtgagcttgctacactggaagagcagctaacgacttcaaaagctcagattacttctctgtctgaaaccttggaaaaacagaaggacaaggttacatccataaagcaagattatgatcaagctgaaagtgagctcaacgttgggcgttctaaactgaaggaatgtgactcacagataaaccgtatggccaaggaacagcagaaacttcaacagaagttaagtgattcaaatgttgagaggaagaaaatggaaaatgaggttaagaggatggagatagagcagaaggattgctcttcaatagttgataagctagtcgagaaatataattggattgcaactgagaaacaattgtttgggaaaagtggtacagattatgattttgaatcttgtgaaccacataaagcccgagaggaacttgaaaatcttcaagctcaacaatccagtcttgagaagagggtcaataagaaagtaatggcaatgtttgagaaggcggaggatgagtacaatgatttgatgtcaaagaaaaacatcatcgagaatgacaaggcaaaaatcaagaaagtgatagaggagttggatgagaagaagaaggaaacattgaaggtcacttggctcaaagtaaacaaggatttcgggtctatattcagtactcttttacctggtacaatggcaaaacttgatcctccagaaggtggtacttttttggatggtcttgaagttcgtgtggcatttgggacagtttggaagcagtctctgtctgaacttagtggaggacaacgatcccttcttgctcttagtcttatcctggctctgcttctttttaaacctgcaccactttacatattggacgaggttgatgctgctcttgatctgagccacactcaaaacattggtagaatgatcaaggctcattttccgcactctcagttcatagttgtctctttaaaagagggtatgttcaacaacgccaatgtgatatttcgaacaaaatttgttgatggtgtgtccaccgtgacacgaacagtgccttcgaaacagagatgaccagtttacacatcatgcatcttctgaaccaaaactaggcatacaattccaaaactgtcattttaaggagctgctataatcaaacattttcgctgtttattcagccatgtttattcagccaggaaaattattccatgaaagctgaaccccacaattacttgacgctgatgcctcaagcccctcgcttgtcaggcaatgacatcaaaataggtgctgtaactgtaatctcatggcgtgacgttcatgatgacctcgactggcttctacattatgcgctttcttctgacctgatgtgtaattagcggttgaactattttgtgttgaaggtcgaccgtgtagcatgtatgtaacagccatttataaccaaggtcatgtataattctgacttgcaaatttaccctatgttgatttaccttttattacttagaacaaaaatctcatcatagttttagaaagtcaatgctctaaacacttcataatattattgactatcgtgtgcattgccgagaatgatttggtcattgttagtttctacgtcactgctcatggattttgtggcgttttttttttctgaaagcattgaagataagtttaagggtggatttgttctacatatctatcgattgaagtaaa

SEQ ID NO: 2446 - DNA, 1958 bp, Zea Mays
aggggaaaccgctgtagacagtcccgggcaactggtgggtgtcgtcctcctctttgcgcagcagagtaatggattaatgcattaagcaaggtaatgaaatgtaccaaaagtgacttatggaaaagaaacagagcttgttcactgctctgaatgaggaactttaatctgatgcagtctcaaaagagcagagttttgggagcaatgtcatcctctttgcctattctgccaaatcctttgaaagggagcttctcaaggcctcataacccccagcatattcctatgttgaggcagctgcctgatgactctatgcccttgtgtattgacacacatcagtctgctagtttgcacccaagagctggtgttatcggggtaccatattcaggctacactgctagtccacttgattctgtgtctaaccttgatagccagacaatggctgcaccctttatttctcagtcatccaattttgaagctctccagtctctatctaataataccccagaaacacacactaaggcagcctggttcacatcttctatggatgtttcaccactcaacacagataatattgctgcttctgatgttaatcaaatccagagtatacgtcctgctatgacatctgatgagagtgctacacaaaacgattggtgggcagatataatgaatgatgattggaaagatattcttgacgcaacagctactgattcccactcaaaagccatgattcaaatttccaactcagctacatcactacctgcagtaaatcagtcagcttcatctcatagtagggagatttgtcctgttgctagtcctcccaatagcagcaatgcttcagttgccaaacaacggatgagatggaccccagaactccatgaatgttttgtagatgctgtaaatcagcttggcggtagcgaaaaagctactcctaagggtgtgctaaagcttatgaaagttgatggtttgactatatatcatgtcaaaagccacctgcagaagtaccgcacagcccgctataaaccagacctgtcagaaggtacatcggaaaaaaggacagccactgaagagctggtcctggacctgaaaacgagcatggatcttactgaagcactgcgccttcagatggaagtccagaaacggcttcatgaacagcttgagattcagcgaaaattgcagttgcggattgaagagcaaggaaagtatctgcagatgatgtttgaaaagcagagtcaatcgagcacggagaaagtccaggatccatcctcaagggatacaacagctaaaccgtcatctaatcagagccagtctacaaacaaggattgtggtgcaaccatggacccaaatggaacaggaggcatcgtacggactgcagaactgggagaacgttcgtctgaattaggtgtaaaacagaaactcgtagagatcgaagaatctggtaccgaagtagccacaggcgacagatctaagatctcccaagagaagcggcgcaaactgcaagatagttaacatatcggttgcactattcagacatagctgttcaaaccgtttgcttggtgaaaaattggtaatctgtgtgtcgaattcgactattgatccgtgagtccattggtgagttgtaccgctcttcagttagccatatatatttataaaggatccaaaggaggaccaaaggagaacttcctggcagccgtctttataacattagcaataagagctatccccgaagttatggggtaaaataaggtcttgaaatttagctttgtttctgaattcctccttttcttttgtttgggttgaagtggtcaccgagtcgatgtagatgaccacatgaatgaatttatcggaagcaagctagtgctgttccctattggcatagaaaccaaatattgaaacacgaacactgtttgatggtgcaaacttttagaatgtaattctgcatcgatttgtttggtggtgttggg

SEQ ID NO: 2447 - DNA, 2021 bp, Zea Mays
aggggaaaccgctgtagacagtcccgggcaactggtgggtgtcgtcctcctctttgcgcagcaggcttgcaccggggaacctggcctgcctcattgtggagactccacagttcacatgacagttgagagtaatggattaatgcattaagcaaggtaatgaaatgtaccaaaagtgacttatggaaaagaaacagagcttgttcactgctctgaatgaggaactttaatctgatgcagtctcaaaagagcagagttttgggagcaatgtcatcctctttgcctattctgccaaatcctttgaaagggagcttctcaaggcctcataacccccagcatattcctatgttgaggcagctgcctgatgactctatgcccttgtgtattgacacacatcagtctgctagtttgcacccaagagctggtgttatcggggtaccatattcaggctacactgctagtccacttgattctgtgtctaaccttgatagccagacaatggctgcaccctttatttctcagtcatccaattttgaagctctccagtctctatctaataataccccagaaacacacactaaggcagcctggttcacatcttctatggatgtttcaccactcaacacagataatattgctgcttctgatgttaatcaaatccagagtatacgtcctgctatgacatctgatgagagtgctacacaaaacgattggtgggcagatataatgaatgatgattggaaagatattcttgacgcaacagctactgattcccactcaaaagccatgattcaaatttccaactcagctacatcactacctgcagtaaatcagtcagcttcatctcatagtagggagatttgtcctgttgctagtcctcccaatagcagcaatgcttcagttgccaaacaacggatgagatggaccccagaactccatgaatgttttgtagatgctgtaaatcagcttggcggtagcgaaaaagctactcctaagggtgtgctaaagcttatgaaagttgatggtttgactatatatcatgtcaaaagccacctgcagaagtaccgcacagcccgctataaaccagacctgtcagaaggtacatcggaaaaaaggacagccactgaagagctggtcctggacctgaaaacgagcatggatcttactgaagcactgcgccttcagatggaagtccagaaacggcttcatgaacagcttgagattcagcgaaaattgcagttgcggattgaagagcaaggaaagtatctgcagatgatgtttgaaaagcagagtcaatcgagcacggagaaagtccaggatccatcctcaagggatacaacagctaaaccgtcatctaatcagagccagtctacaaacaaggattgtggtgcaaccatggacccaaatggaacaggaggcatcgtacggactgcagaactgggagaacgttcgtctgaattaggtgtaaaacagaaactcgtagagatcgaagaatctggtaccgaagtagccacaggcgacagatctaagatctcccaagagaagcggcgcaaactgcaagatagttaacatatcggttgcactattcagacatagctgttcaaaccgtttgcttggtgaaaaattggtaatctgtgtgtcgaattcgactattgatccgtgagtccattggtgagttgtaccgctcttcagttagccatatatatttataaaggatccaaaggaggaccaaaggagaacttcctggcagccgtctttataacattagcaataagagctatccccgaagttatggggtaaaataaggtcttgaaatttagctttgtttctgaattcctccttttcttttgtttgggttgaagtggtcaccgagtcgatgtagatgaccacatgaatgaatttatcggaagcaagctagtgctgttccctattggcatagaaaccaaatattgaaacacgaacactgtttgatggtgcaaacttttagaatgtaattctgcatcgatttgtttggtggtgttggg

SEQ ID NO: 2448 - DNA, 2228 bp, Zea Mays
aggggaaaccgctgtagacagtcccgggcaactggtgggtgtcgtcctcctctttgcgcagcaggttctcgcctccccctccccgcagcttctctctctctctcccccccccccccccccccccccccccccccctccccgccccatcgtcggctaaaggcgatcgtcccacccagaatttcccccctcccccgcaccccccgcaaacatcctagcagccctatcatcgcgccggtcccggcggcctgccggcctcctcgcaccctcccaggcttgcaccggggaacctggcctgcctcattgtggagactccacagttcacatgacagttgagagtaatggattaatgcattaagcaaggtaatgaaatgtaccaaaagtgacttatggaaaagaaacagagcttgttcactgctctgaatgaggaactttaatctgatgcagtctcaaaagagcagagttttgggagcaatgtcatcctctttgcctattctgccaaatcctttgaaagggagcttctcaaggcctcataacccccagcatattcctatgttgaggcagctgcctgatgactctatgcccttgtgtattgacacacatcagtctgctagtttgcacccaagagctggtgttatcggggtaccatattcaggctacactgctagtccacttgattctgtgtctaaccttgatagccagacaatggctgcaccctttatttctcagtcatccaattttgaagctctccagtctctatctaataataccccagaaacacacactaaggcagcctggttcacatcttctatggatgtttcaccactcaacacagataatattgctgcttctgatgttaatcaaatccagagtatacgtcctgctatgacatctgatgagagtgctacacaaaacgattggtgggcagatataatgaatgatgattggaaagatattcttgacgcaacagctactgattcccactcaaaagccatgattcaaatttccaactcagctacatcactacctgcagtaaatcagtcagcttcatctcatagtagggagatttgtcctgttgctagtcctcccaatagcagcaatgcttcagttgccaaacaacggatgagatggaccccagaactccatgaatgttttgtagatgctgtaaatcagcttggcggtagcgaaaaagctactcctaagggtgtgctaaagcttatgaaagttgatggtttgactatatatcatgtcaaaagccacctgcagaagtaccgcacagcccgctataaaccagacctgtcagaaggtacatcggaaaaaaggacagccactgaagagctggtcctggacctgaaaacgagcatggatcttactgaagcactgcgccttcagatggaagtccagaaacggcttcatgaacagcttgagattcagcgaaaattgcagttgcggattgaagagcaaggaaagtatctgcagatgatgtttgaaaagcagagtcaatcgagcacggagaaagtccaggatccatcctcaagggatacaacagctaaaccgtcatctaatcagagccagtctacaaacaaggattgtggtgcaaccatggacccaaatggaacaggaggcatcgtacggactgcagaactgggagaacgttcgtctgaattaggtgtaaaacagaaactcgtagagatcgaagaatctggtaccgaagtagccacaggcgacagatctaagatctcccaagagaagcggcgcaaactgcaagatagttaacatatcggttgcactattcagacatagctgttcaaaccgtttgcttggtgaaaaattggtaatctgtgtgtcgaattcgactattgatccgtgagtccattggtgagttgtaccgctcttcagttagccatatatatttataaaggatccaaaggaggaccaaaggagaacttcctggcagccgtctttataacattagcaataagagctatccccgaagttatggggtaaaataaggtcttgaaatttagctttgtttctgaattcctccttttcttttgtttgggttgaagtggtcaccgagtcgatgtagatgaccacatgaatgaatttatcggaagcaagctagtgctgttccctattggcatagaaaccaaatattgaaacacgaacactgtttgatggtgcaaacttttagaatgtaattctgcatcgatttgtttggtggtgttggg

SEQ ID NO: 2449 - DNA, 2490 bp, Zea Mays
ctctcatcccatggcctggcgccctggccgcacgtcctgacgatcgacgctagcgaacaagcggacgagtttcccgggtcacgcatgtctcgtcgtctcgttggaccacaaccgtcgccgggcaagcagtacaagtacgccccacatgcttctctctcggagttggggacaggacagcctaccgaaatctctctgctcggtcttccttcactctctctcatagtctcatgcatgcatggctcccactgcccatcatcaggcagcgcgggacgatgagctggagaagagccgccgcaagcccggcggcggcggcaaggcggcggcggtccggtgccacccggtcctggcggaggagcgcaaggcgtccatcaggggcgtggtgggcgacctgctggccatggcgggcggcggccggaggagcctcatctcgctcggcgtcggcgacgcgtcctcccacgcatgcttccgccgcggcggggagttcgccgccgaggccgtcgcccacgccgccttgtccggcgccttcgactgctatgcgccgtccttcggcttccccgacgcccgccgctgctgcgccgtctgccgtgccgaaccaaccgaccaaacaaacagcgcggtcgccgcccacctgtcgaccggcgcggtgcaccgcacgcacgaggccgacgtgttcatgacggcgggcggcacgggcgcgatcaccgccatcgccacggtgctcggcggcgcgccgggggccaacgtcctgctgccgcgcccgggcttcgcgccgtacgaggccgcctgcgaggtggccggcgccgagccccggttctacgacctgctgccgcggcgcggctgggaggccgacctcgccggcgtgcgcgcgctggccgacgccgccacggccgccctcgtcgtcatcaaccccaacaacccgtgcggcgccgtctactccgctcaccacctccgccagcttgctgaaaccgcaagagagttggggattcccatcgtagcagacgaggtgtacgcacacatggtcttcggcggcagcaggttcgtgcccatggcctccttggcgcacatcgcgccggtcgtcagcatcggagctctgtccaagaggttcatgctgccaggatggcgtctcggttggctggccttctgtgatcccaacggcgcgctcaagcatggctgcgaccgagatgctgctcaacgtgacttctggccctgcctccatagtccaggcggcggttcccaagatcctttcagctgaacaccatgagttccataggaatgttgttcacctgctcgagtctgcagctgatgctctgtacagaagagtgaaccaaatcgaagccctgcggtgctactccaagcctgaaggctcaatgtttatgatggttgagatcaacacttcaattctacatggcgtcgccaacgacatggactttgctcgtgagttgatcaaagaagaatgtgtcctggttctacctggttctgtcattgggttgaagaactgggttaggatatttttcggagcacctgttagtttaatactagaagcttgcgacaggattgagatgttctgccgaaggaggacgctcaagcaaaacaactgaagagctgaaaatgttttgaaaccaggaagtagggtttttgttagcccagtaacatatatatacagcttcgatttattttccaatgcacattctgaggtttgcatatagaaaactgagaacagatgcttgtctatagttaaaatatatgttatacataattccaggaaatggtgtaaacatttatcatttctttacttgtgccttctacttcacagatgcattaaggttattgtctttttattgaacagacagcaagcaaaagaagcaagctaacgctaaattcatatactgacagttttttatctgttcaatgcccctcaacttcaaacttcagaatagcacaagctccaaatgacatttgttgaaaactacagggaggtgaaaagatatactgctagttctgacattacagcgaagggtaatccaatcatttgtgacctaacattaccagtcaatgtactacagcagtctgacaaggccaaaaaaacacagaatctatgaaaaaaaaaagagttttttgaattgtgctaaaactgacaaatacaaattgccaactactctaaactctatgcaaatgaagtgagaatagaaatggttatacttcaaggaactacaaaacttccgattagtagcaatgatatactgtcagtttatactattactgtgtttttattcatgtagctcttgttggtttttaccgtagactctacaccctgctttgttgatgttggatggtttgacaaggttctgaaggttgtacctgtcttgaaaaacaaaagcctctattctcaacgatgaaaaatgttttgtccgtttaatgtgcaatggaatggcaaccactttaaccagaccaacaggggcctgtggagcagccaacagacataactctaag

SEQ ID NO: 2450 - DNA, 1343 bp, Zea Mays
cagcaatttcttggctttgtacaggccagtgtgacacaggggttctaaagataaaagaaaggaaacctttgcagaaggcaacactcaggaggaatgcaagtattattcaacacctggaggatgcaaattcggtaaaacttgcaaatacctccaccgtgagggaaatggagggaaaacagaggttgaaaaagctgagctaaactttctaggtcttccactgcgaccaggtgaaaaggagtgcccatactatatgcgcactgggagctgcaaatttgcgactaactgcaagtttcaccacccagatcctactaatgcatcttcaaaagaaccagggttggaacatgagaatggcgatgtaccactgcaaaatgtccaaggatcctctcagcctagccttcagatgtggcctgaccagagagcattgaatgaacagcatgttccttttcttgctccagcaccgtcatacagtggagggatggttccacctcaaggaatgtatccatcttctgattggagtgggtatcatcaggtacctttgaatccatattaccctcccggtgttcctttcccgcattttccagctgcccatatgaatcacccgatgtacaaggctgcagatataccaggacatcaaccaccaccatctgatgagtatcccgagagacctggccaacctgaatgccagcatttcgttaagagcggtttctgtaaatacaggatgaaatgcagatatcaccatccaaggtcgcgccagtctgcaccaccaccagcaggtcttagccccatcggcttgcctatcaaacctgatcaacctgtgtgcacttactatggacgctatggcttctgcaagtatgggccagcctgcatgttcaaccaccccttcaacttcgggcctcccgtgccggcagcaggaccacccctccctgggcagtaccctacgcatggaaacttcgcctagcaggcacgtgacgagcgattttctgagtcgccacgattgcttgtaataacctcctccacctgtaaagtagcgtagacaaaagctgtacgtggttggcagtagacatccagcatgtaggcgcaacgaagttgcatggagatgggtacgttacagttggtattgcaaactttacgctgtacaagttacagtccatacataagctgccatcgcatttaaaatcctggttgctgagtactccctcggtctgtctacatgatttagtcgttttagatttatcaactttgacagattatattgtatgtgttttatagtattttacaacataaacataaagacttgacttagggcaaacctagaacgaattaaatcatgtggatggagggag

SEQ ID NO: 2451 - DNA, 2002 bp, Zea Mays
ctctttctgtaggttttctccccacttcgctttgcttccccacctgctctctctcactcgtccccatcaccgtcgccatcactacccctctcctctctctcatcggctccaatggcggacgccgacgccaagtcccagccgcccgacgccgcggcatccccggatgcctcgatctcctccccctcctccctaggcggcggcggcggcgacgcggccgacgcggacgcgatcgagaagcagctcgccggcctgggcatcgccgtcgccggtgggttccccgagccatcgggatgggacgatggccccgtaccagtccccatcccggccgatgtccttgtcggcggtgatgagggtgccggcgagaagccgcgggcgccggcgccggcgccgactggggcggtggatgtgaaggtgcggttcccgcgccggcccggggagccggactgcagctactacctcaagttcggcacctgccgcttcgggatgaagtgcaagttcaaccaccctgcgaggaagaagaagactagtagggtgagaggcgtcgggagcaacggcagcgggagcaacagcagcagcaataaagcatcttctcctgatgatgatcaggctcctaaagaagaatacgaaggtcttgttccggacatttcggattccatggttattgatatgaaaagggggaaactagagccaaaggaaaagggttctaaagataaaagaaaggaaacctttgcagaaggcaacactcaggaggaatgcaagtattattcaacacctggaggatgcaaattcggtaaaacttgcaaatacctccaccgtgagggaaatggagggaaaacagaggttgaaaaagctgagctaaactttctaggtcttccactgcgaccaggtgaaaaggagtgcccatactatatgcgcactgggagctgcaaatttgcgactaactgcaagtttcaccacccagatcctactaatgcatcttcaaaagaaccagggttggaacatgagaatggcgatgtaccactgcaaaatgtccaaggatcctctcagcctagccttcagatgtggcctgaccagagagcattgaatgaacagcatgttccttttcttgctccagcaccgtcatacagtggagggatggttccacctcaaggaatgtatccatcttctgattggagtgggtatcatcaggtacctttgaatccatattaccctcccggtgttcctttcccgcattttccagctgcccatatgaatcacccgatgtacaaggctgcagatataccaggacatcaaccaccaccatctgatgagtatcccgagagacctggccaacctgaatgccagcatttcgttaagagcggtttctgtaaatacaggatgaaatgcagatatcaccatccaaggtcgcgccagtctgcaccaccaccagcaggtcttagccccatcggcttgcctatcaaacctgatcaacctgtgtgcacttactatggacgctatggcttctgcaagtatgggccagcctgcatgttcaaccaccccttcaacttcgggcctcccgtgccggcagcaggaccacccctccctgggcagtaccctacgcatggaaacttcgcctagcaggcacgtgacgagcgattttctgagtcgccacgattgcttgtaataacctcctccacctgtaaagtagcgtagacaaaagctgtacgtggttggcagtagacatccagcatgtaggcgcaacgaagttgcatggagatgggtacgttacagttggtattgcaaactttacgctgtacaagttacagtccatacataagctgccatcgcatttaaaatcctggttgctgagtactccctcggtctgtctacatgatttagtcgttttagatttatcaactttgacagattatattgtatgtgttttatagtattttacaacataaacataaagacttgacttagggcaaacctagaacgaattaaatcatgtggatggagggag

SEQ ID NO: 2452 - DNA, 1918 bp, Zea Mays
ccgtcgcttgcatctccccgccgccgccacgcgcccacgcttccttccgaacaaagctgtcgtgctgcctttcttgccgtccaactcaggcagccgtcctagtcctcgttggtcctcatctgctgcccttctacggtggaggagagaagaggagaggagcggagcggagatccagccgctttccggctgctttcttcttctaattgcggagcaagttccgtcaatactgcttgtggtgttgcgccaatttaagttcctgctgtccgcaaaaggagagcttccgcagctcctatggcaaagcctcccaatagcattggccgtagcagcatgccaagatcgaatgagggtttgaggctcatattttcggcagttataggtatcatgctgggttacctgtttgggatctccttccctacagtcaacataaccaagcttcacttcccttcgagtatcatatcctatattgaagacaggaactctggcatcacaacccagacattgttgaaccatgcttgggcatctgcaaacaatcgtaaaaagaatagctctgaatctaacactgatgaaattcccaagatttatgttcctacaaacccaaaaggtgctgagagacttccaccaggcattgtagtgtctgaaacagatctttatccccgaagactatggggtgatcctagtgaggaccttactagcgagccgaggtatcttgttacatttactgttggtattgggcaaaaggcaaatattgatgcagcagtcaaaaagacaaattcactattatgctgttccattatgatggtcggactactgagtgggatgaatttgagtggtctaaaagagcaatccatgtgagtgtcaggaagcaaacaaaatggtggtacgcaaaacgatttttgcatcccgacgttgttgccagatatgattacattttcatctgggatgaggatctaggtgtagaacatttcaatgcagagaagtacattgagcttgttcgaaagcatgggttggaaatctctcagcctggtttacaacctgataaaggactaacatggcaaatgactaaacggcgtggtgaccaagaagttcacaaagtaactgaggagagaccaggctggtgcactgatccacatctaccaccatgtgcagcatttgttgaaattatggcaacggtgttctctagaaatgcatggcgctgtgtatggcatatgattcagaatgacttggtccatggatggggtcttgactttgctcttaggaaatgtgtggagccggctcatgagaagattggagttgttgatgctcaatggattgttcatcaagcagttccttcacttgggaaccagggcaagtcagataatggaagagcaccatgggaaggggtaagagcacgctgcagaaaagaatgggggatatttcagacaaggctggctgatgcagagaaggcttattacttggagagaggcatcacgcccccgaattcaacagtagtttagatgaatacatgctcctcacatgccacggcaaggtttctgttgcgggaatctgctgcaaactggcatgttcatcgaagctgctgcaacccagggctacattaggggtcccacgaatcgccatgattgatcttagtgtcattcactttgttttaatgtcatttttttggttagtgagactagatgggatgtaagtaggagatataacagggactgtgatgacacccatttgtgtattgatgacctgatgcaatatggatgctgatagtccgtttctcagtaatcagtatgtaaattgtttgctgtataccagctgtgtgcaactgggtcaaatgatgtgttgtgctagtccatatgaagaaatatcaaggctagtttgggagcaaggaaactgaggggactaaaattttcttcctattcaaaattgg

SEQ ID NO: 2453 - DNA, 1157 bp, Zea Mays
tgaacctttagaacgcaggtgaactgaagaagagaaccatagatatggggatattgtgcattggtgtgctaaaacgttctaggcagcagaaagcaatatcacgggagcaagcagccaaagatctgcaagagttggagaaacggagagaagaacttgaggcattgttacttgctgaacggtcggagttggtctgaaggctgaccaccgtgatctaacaatttctcttctgttgtagataaatgctttctttcttctttttctaatgatagcatactgcttggtcatggccctgagtcattcatccagaagtcacttgattgaagtgtatcttctttagtttctagattgcagcttccctcttggtttcagctgaactgtgggcttcttggtttcagagcattgtattgattcatcgtctagggctgtaagattgcagcatgagtttgatgtagcaccctgacctgtgtcgtctaatcctgtcgtgtatgcataaatgcattgctgaataactcacctaatttttgcacttaatgtctcttctgatgtggtaactcagtccttgagccataattatgattatgttttcctgtatactccctctgtccaaaattaaaattcattttagttaattactaggttcatacaatacttaaagtatgtgttttatatatatttatttaggttcatcttcattcatttgaatatggacataaaaaacaagagctaaaatgactactattttgagacagaggaagtatgttttacccaatgattactgggtgctacaattgttcccattttcttttaagaggaacattgctgaaatgaataacatgtcaaaattctttattttcttatagaaggttcttctattggaccatttccaatgctgatgattacatgggttatattgttgtgcatattagtgtggaacaaataaataatccttggattaacattcaattagctagcttccttctggatgccaaaatggcgaaaagctattattagagatttcacacctttagtaaattataaaattgtctatatgtttatccatttttattagctttctcgaagttcatgttattggttacatgttattggttactgtatgtagagaggggaagagctgcttgcgtactggtggagagagg

SEQ ID NO: 2454 - DNA, 2188 bp, Zea Mays
accacacacacacagacacaccaccacacgccggtgagccggtctctctcgcccccgtgcccgtgcgcgccacctagccgttcgttcgcatccatccgtccatccgtcacacgcacaccaccaccaacccgcgcggccgtgtctatctgggtctgggatcgagtagcaagcaatggcgctggaggccgtggtgttctcccagccccaggcgggccacttcggctgcggccgcggggactcgccgtacgcggtgccgtggagcgacctgctgcagggaggaggaggaggagggtttggcgatgtctgcgccgcgggggagtgggtcgaccagcacgacctcgacacctgctgggccgcgcccaccgtgggggacgactgggactggggggaggcgctctcgcgggaccactcctcctcggacgccgcctccacggaccacggcagcaggaaggcggcgcccgagccggcggcggggaggaggaagcggaggcgcaccagggtcgtcaagaacaaggaggagatcgagagccagcggatcacccacattgccgtcgagcgcaaccgccggcgccagatgaacgagtacctcgccgtgctccgctccctcatgccgccgtcccacgcgcacaggggtgaccaagcatcgatcgtgggtggcgcgatcaactacgtgagggagctggagcagctgctccagtcgctggaggtccaaaagagcctgaagcagagccgggggcggcggccagcaggcggcggcgccagctgctcccccccgttcgccggcttcttcagcttcccgcagtactccaccgccccaagcaccacgagcagcagcggcggagagaaatgctgcggccacgacgccgcggccgcggacatcgaggtgacgatggtggaaggccacgccagcctcaaggtgctggcgcgccgccggcccaagcagctcctgaagctcgtcgccgggctgcaccagctgcgcgtcccgccgctccacctcaacgtcaccgccgccgtcgacgccatggtcctctacaccttcagcctcaagcgaagccggtggagggcgattataatggtggcttggctttcccgtttggacggcaggtggaggatgactccaagatgggctctgtcgaggacattgccaccgccgtgcacgagattctcggcagcatacagcggcagcagcaggaggaggaggaggaggagaccgccgccatgtgaaactctgcaccacctgcatgtccggcaggcacactgccatcctgccaatggaatccattgcctgtgcatgtgatgactgtgattgcgcccccttgctaggcacagacacctgagcctgccatgatgcagcaatactgtcccagtccggccgtggtcgcaaagaatatgctatgagaaatcttaggctagctgtaatctaagcaccacctcccttctggagtgagagcacttgtgtagattattgacagatacagctgatctgccctctcgagctacataccactgcgcgcttacatacgccgtcgttggcgttaacaggtctcgactctcgagcctgcctgccagacagaatgatggctcggcccgtgatctatatatgatgtgcttactgtgtatcagtagctgctagcccgctaccatatactactatatacacaccactacttcatccggacatgcgtgcgttaactacaccgcggcagtcgtctccttgttctgtctctcaccatgcaggatcaggaagaacgaatgtttcagtagcctgtagcacacacgtacgtcagtgaaaaatgcgtcggcgtacacggcggacagcatgaggtgagcctgtgctaggggcgaggccactggaggagattccattgacgaccatgaaacagcatgaccgaaggacccaaggacgacggcagtagtctcgtgtcgtcctcctcctcctcctcctcctcctcctactacagcctacacaggtggtgggatttcagaaacgtatgtgttcattttcacgcgcacggcctctcgggccatgcaagcaaaaaaaaatgtactgccactcggaaaaattgctgaaccgtacacgttttgcctgactgacacttggatggtcggagcaacagggtcagagaatgcactcgattgtattgtatgttgcccttttcaggcccaatacaacggagatttccctttt

SEQ ID NO: 2455 - DNA, 1104 bp, Zea Mays
ccggaaacgggagtctggagcatttccgagttgtctccaccgcgcaagcgacgagaaggcggcgcgccaccaccgctgctggcctgccgccacgactcgccggcagactaggctcctatggcgcgccgccgcgtgctgctcttcctcaagcccttcgacgtataccctccccgcccgtacgtcggagctgcggcctcttctcccacctctgcgccctcgtcactgccgcaaccgcgcgccgccaaccccaaggttgaggagctatctgatgaatttgatgcaaggaggagcacagggtatctttgtgcagctactgcaggaaactttgagcagatacttgatgtgacgcttgatggcagtaggcgccctttggagctgtcaaggatatcggtgaaactaaatggaattcagctgccgacttatgctctgaatgatatattggtgtcacacccttgtccagcaagtgtgtcgcgcttctcatttaggaaaaggaacaatacaggagagaactcgcgtttaattaattgtagatcaagcggtctgagggtctcaacagctgctggatcaactgctgccatgctatcagctggaggatttacgatgccattatcaagccgtgagcttcagtatatgataagggagcccatttctccaatggatgccgacaaagcaatgctccatgatgttcttaagcaagaacaacacatgcatgtcgtgtggtacaatcaagagggtgctgtttatgttgatggttcacacgtagtgcattcaattcagcatggggactcacttgagatatcctcaggtgctccgaccttaaaagttgttttgccagaacatttgctaaagatgggacctgaatggtgaaataacaatatttttgtgatgttccttatctatttaatatgatataggagttgagcagtgagctgagttattgggtgcttaagcggtatcaatccatgttcatgtagtgactgacagttaaacgctatcagatgaagcattagtgacaaatttgcgaggttttgtttgtagataaaagcaaaagaagggtcagagttcagagacaatagggagcttcccagtgctgtaccacactga

SEQ ID NO: 2456 - DNA, 3967 bp, Zea Mays
cccgcgcgtcacgttcgcatcgcttctggttcgggtctcacctctcgcgatcaaagcagtagcgggttcagtggcttggcgaaggaaaaaaaaggaggaaaaaaaaatagcaaggctgtgcagcgaggagacgactcgactccaactgggaggcgaaaaataaaaaagaggataaggcgaggcccgaccgggcggccaccgcgctcccagatccgctccgctgccgtggagatccagctcccttgcgcgcctgagcgtggacgccggcgtctcgctcccggatcccgaccttggggttgcagctgcttcagatccagcgttaccaggttccgagctcgcatcctcttctttcgaatttggactacctttggatttcgggggtttcttcgattgacgcggtgaggtgtctgattcgggcgcgaattggaggatttgagggctgcgctgttggattcgtgcgcggttggtggttcgtattggtgttaagattcccgtttaggattagggttttggagaggatattgttatttttttgccttttgtgctttatttctgttgcttctgtagcttgaatttggtgtgtgccactgaaaatggttgtaaatgctgaacagatctgtgacccgctggcgcctgggcacatgacaccgacggttttaatggagtttgggcagcagaggccaatgaaacggggatacgaggaaatggtcttcagggcagcctcttcccgtggttatgcagagactgttggcgagtcgggagttgcagctggtagtcctcttcgtgttgattctgaggactcatctgtgccaaagcgcaagtgcatcagcctgaacagcgttggctttgatgtgaagcgggagatcttggtgccctctaagatgtcgtcatctgaacggcggtaccttcgaaagagattccgggcagagcttgattcggtgcgggatctcctcaagaagccagagtttgcagcccctgttcctctcaatcgggcacctgctttgtcatcctcagctgcacctcgagctaagaagccacagaagtctcagcgtggtgggaccaatgttatacgtggtgcaaagggacgattcttgcctacaaaaccgcggccggagacttccactgtgttatctgaagctgcagcgtttaagcagtgtgaagctattttgaagaagcttatgactcaaaagtatagtcatatattcaatgttccagttgatattgtgaagctgcaaattcctgattattttgacattgtgaagaccccaatggatcttggtactgtcaagaaaaagcttgaatctggttcatacacaagtccatcagattttgctgctgatgtccggctgacctttaacaacgctatggcttataatccgcgggggcatgctgtgcacgacatggccatccagctgaacaagatgtttgagagtcgatggaggccaattgagaagaaattggcttctgctgccactgagaaacatgttgaggttgacagggctgactcgaagaggaggaagacacctcctgtggaccgcagtgatgtgtcaatggagtgtgcacgacagacagagccagaaacaccgaagatgacagctgaagagagggaagcctttgggaactgcttggcatccatatctgatgagttacctcctcacatatttgaactgctacaacaatgcatcgacagcaatgcagatttgtctggggatggagagatagagattgacatccatgctgtcagtgatgacttgttatttgagctgaagaaacatgttgacaagtatttgcaagagaaagagcagagccagcaggtgaaatctgagccctccgagaatgaagctgtgaatgtatctggccttagccactcttctacaaatccttgcaaaggcggcgaacctatcgaagaggatgtggacatctgtggcaatgcctcacctatcatgctagacaaagatgcacaaatcaggaatagcaagtgtggtagtccaagtagttccagcagcgactctgaatcatcttctagcggtctgtgtctcatggtgtttatctgcatctctttatatcattatagacaattcttgtgtaaagaaagtgatgcttttcttcccagttttgtattgtaaattctttgagaacatggatattatctcttcatgtgttttttgggggttcttggtatcatattcctgtattagttggactctgggcagtgacatacaaatttggcaaggaactaaaagtagagcaatggtactctataaatgccatgaataccatgttttcccttttagcaattgtttagcaggatcttgaagttttttgaattgggctgttaaatttcaatgaagttgatgcaggacatcatgctgcataacccccatggccccatcctactataatttctatcagactaaaccctttagtaatagtataagctcctgcaaactaatacagaaccttaatagcatatataattctcctgaaacttttcctgttttgagatgttgaaacttgaaagtccaagatatttacaatgttgtcggtaatgcagattctgattcaggcagtgactctgaaagcgaatcagaaaaagttggcagccctggaaagcttgcgaaggggactaagaaacctgatcagctggtggagcaagaaaagagtgatgttattagtccagctgatgccaaccgtcctgctgctattgtggggcttcatggggaggacagtgagtcaaagcctgcaccagggggggaaaactcagaacccgatacacaagtctcaccagacaggctattgcgagcagcccttttgaggagccgttatgctgatgtgattgtcaaagctcgtggcattcttagtcagggtggagacaaacaggaggagctggaaaagctacagaaggaagagaaagagcgcttgttggctgaaggtactgcagccatggaggcttgtagagccgaagctgaagctgaaaagaagcgtaaacggaattttgagagggagaaggctcgtcaggccctacaggagatggagagaactgtagaaattaatgataacctccatctcaaggatttggaattgcttggaacagccacaacagaacatattgtaagctctgttgatgagactagtccagaacgctctcatgatggcatggccggctatcatccaggagctgtcaatcctttggagcaacttggactgttcataaaggtagacgatgaggaagacgacgagcagtgttccctgcattaaagaaagaagagaaaggagaaatcagctgatggtgctgtgtttttccatgccctgtcacgggctaggggctggtgccaacctattgatccaaagtgatcacctgttgcgggccatcatgtgtggcaatggttctaaactggggtggtgagagccgtccattttgttaaaaatatgcatgggaaggatgaagatcatcttgcatagtcatttgcttccaggaggcgcacaggaggtggagtaaaaacgaacgtatttatggtgcctagaggacggttttttcagccactgccaaaacggcttgaatgacgccaccgaagtagtggagttcaaatggctcattgtttgccgcaacctcaatttcaagcgggtttgttcagcggcttatagcttcttctctccttttgttgtctcatctgttttagattgtagaatttgggctagttgcttcctgctgtaaatccgaattttgatgtagtgacggaagtgctacctttttgttgagcatgatcgaaaagtttacaagaaaaatcgtttttttgtagatgaacgtccagtcttgtctgtagctacaatttcttgcgcaatcagtgtaacatccgttgtgtttatattctgctcgacaacgagtacggatttaagcacgtgatatcagtgaataagacagacattagggtctaatcgtttttatctatcgtggttttaatatcgc

SEQ ID NO: 2457 - DNA, 2172 bp, Zea Mays
cggtgcaagccgtcgtttcaggtgaattcgagtgagccaagtggtctcgactctcgactctctcgagtgagtgagtgatcgccgcctcggcttgcacgtggccactctcaatggacctgaagaggacgcttgacgtggaggaggaggtggtggacggcgacgaggacgagctcgcctgctgtcccgacgccaagcgccgccggacgttcgtcgatagctcgatgcaggaggccattggcgcgcagtacatgcagaggcatctgcccaagctggagccatttctgcgcagagtcgtgcaggaggaggtgcacaatgttcttatccgacacatcgattccgcacacaggctcccgctccagctaaagacaagcagcaagcggtacaagctgcagttccagggaaacctgccgcagacgcttttcacgggcaacagggtggaggcggagagcaagcagccgctccggctagtcctgaccgacgctaccaccggccagacggtcgcctccgggcccatgtcctcgatgaaggtcgagctcctcgtcctcgacggcgacttcaacgccgacgagcggctggtggagcacagcgagaaggagttcagcgagagcgtcgtgttcgagagggaaggcaagaggccgctcttgtccggcgaggtggtggtcgtgctcgagaagggcgctgcctccatccgcgacatctccttcacggataactccagctggatacggagccgcaagttcaggctcggcgccaggatgtccagggctagctccatcgaagagcgggtgctggaagccgtgagcaacccgttcctagtgaaggatcaccgtggagaagtgtacaagaagcaccatccacctgcattagccgacgacgtgtggcgtctggagaagatcgggaaagacggcgtgttccacaagaagctggcggacttcggaatccacactgttcaagacttcctcaggaacctggtgatggatcagtacggactgcgcagccggcatgtcgaacaagatgtgggagtccacggtggagcacgcccgggagtgcgtgctggacgacaggctctactcctactgcagcgggcacgggaccgtcctcctgttcaactgcgtctacgaagtcgtcggcgtgctcgtcgggggccactgcttcaccttgagcgctctcaccccgacacagaaggcgctggttgggcagctgcagcaggacgcgtacaagttcccggaccgcatagccgagttcaaggtgcagtcgcagagcgccggcgtggagcagccacccgccgcggtcgagtccccgccgtccgtgcccggggcgcaggtgctcggcctcccgcacggtgtcgtccaggtccagccctcagcaggcgcgccgagtgcccatgacctgctgctgagcccgcggctcctccagcaccagcagcagccgctcagcgaggcggccctggaggacgtgctgcagtcggccagcgccgcgcaccagctcgacgccgccgagccttggttcccttcgtttggggcgggcgggttcgatgcgcgggacccgttcgacgtgcagttcggcggcgggtcgcagccgtgcgggctgctgctctccagcaccggcgccaggttgtgacttgcgagggacgtacgtacgcctctcgccgggcacgctgtcttttccatgtggtccgtggcgtcgtcgcgcggaacgagagaggacccggccgggcaaccggcgccggcgttttcggttggatatatgacgaaatctgcaggccgcagcggagcatgcatgggtcgggtcggtgcactgactgattttctgtctgtccgctaacagtcacaggtcggtgctgtttgtctgaggatgcctgtgttgcccagaggaaaggcaaagctggtgcagagagaagatacagtacagtggtgactggtagtgcagctggtggtaggatcagatgtcatcttttgtcattttggcatgtaacgtgagtgatgagtaatgagaagagcacagttctggccgttcaccagagactcccttcccatgtctgtaaaagcatagaagcgtgccttttgttttctcccttttcttttgcttgttcatcgtaaagatattgtacgtagtgcttggtattacacacttctcttcggtttgtacaagctcgtttgcatcaaccacggt

SEQ ID NO: 2458 - DNA, 2183 bp, Zea Mays
cagcatcgtatgctaaagaaggtgaattcgagtgagccaagtggtctcgactctcgactctctcgagtgagtgagtgatcgccgcctcggcttgcacgtggccactctcaatggacctgaagaggacgcttgacgtggaggaggaggtggtggacggcgacgaggacgagctcgcctgctgtcccgacgccaagcgccgccggacgttcgtcgatagctcgatgcaggaggccattggcgcgcagtacatgcagaggcatctgcccaagctggagccatttctgcgcagagtcgtgcaggaggaggtgcacaatgttcttatccgacacatcgattccgcacacaggctcccgctccagctaaagacaagcagcaagcggtacaagctgcagttccagggaaacctgccgcagacgcttttcacgggcaacagggtggaggcggagagcaagcagccgctccggctagtcctgaccgacgctaccaccggccagacggtcgcctccgggcccatgtcctcgatgaaggtcgagctcctcgtcctcgacggcgacttcaacgccgacgagcggctggtggagcacagcgagaaggagttcagcgagagcgtcgtgttcgagagggaaggcaagaggccgctcttgtccggcgaggtggtggtcgtgctcgagaagggcgctgcctccatccgcgacatctccttcacggataactccagctggatacggagccgcaagttcaggctcggcgccaggatgtccagggctagctccatcgaagagcgggtgctggaagccgtgagcaacccgttcctagtgaaggatcaccgtggagaagtgtacaagaagcaccatccacctgcattagccgacgacgtgtggcgtctggagaagatcgggaaagacggcgtgttccacaagaagctggcggacttcggaatccacactgttcaagacttcctcaggaacctggtgatggatcagtacggactgcgcagcttgcttggcagcggcatgtcgaacaagatgtgggagtccacggtggagcacgcccgggagtgcgtgctggacgacaggctctactcctactgcagcgggcacgggaccgtcctcctgttcaactgcgtctacgaagtcgtcggcgtgctcgtcgggggccactgcttcaccttgagcgctctcaccccgacacagaaggcgctggttgggcagctgcagcaggacgcgtacaagttcccggaccgcatagccgagttcaaggtgcagtcgcagagcgccggcgtggagcagccacccgccgcggtcgagtccccgccgtccgtgcccggggcgcaggtgctcggcctcccgcacggtgtcgtccaggtccagccctcagcaggcgcgccgagtgcccatgacctgctgctgagcccgcggctcctccagcaccagcagcagccgctcagcgaggcggccctggaggacgtgctgcagtcggccagcgccgcgcaccagctcgacgccgccgagccttggttcccttcgtttggggcgggcgggttcgatgcgcgggacccgttcgacgtgcagttcggcggcgggtcgcagccgtgcgggctgctgctctccagcaccggcgccaggttgtgacttgcgagggacgtacgtacgcctctcgccgggcacgctgtcttttccatgtggtccgtggcgtcgtcgcgcggaacgagagaggacccggccgggcaaccggcgccggcgttttcggttggatatatgacgaaatctgcaggccgcagcggagcatgcatgggtcgggtcggtgcactgactgattttctgtctgtccgctaacagtcacaggtcggtgctgtttgtctgaggatgcctgtgttgcccagaggaaaggcaaagctggtgcagagagaagatacagtacagtggtgactggtagtgcagctggtggtaggatcagatgtcatcttttgtcattttggcatgtaacgtgagtgatgagtaatgagaagagcacagttctggccgttcaccagagactcccttcccatgtctgtaaaagcatagaagcgtgccttttgttttctcccttttcttttgcttgttcatcgtaaagatattgtacgtagtgcttggtattacacacttctcttcggtttgtacaagctcgtttgcatcaaccacggt

SEQ ID NO: 2459 - DNA, 2654 bp, Zea Mays
ctcgtgtctgctttcgcccatccctgctcttgccccgtttctcccttccatcgtgcttcctcctctctctctctctttttcgctcccgatttccaaatctcaaataataaataaccagaagggaagcgaatcttctccatcaacccagcaaatcgctcgttcgagcgtcccactcgacgagaaattctcacccatcacctccgcgtcgctccccccgttcgccgccaggcacaggctgctgtgatcctttggtggatgggggcagcgcagctagccaccggaggttgcctagtttgaaatttaaccgcgttaccgaagtggtactccgtagttcttatggatcaacttgccctgcttgcgacggagctgggtgactcgtcagactttgaggtggagggcatccagaacctcactgagaacgatgtcagtgacgaggagattgagcccgaggacctggcgcggcgaatgtggaaggacagagtcaggctgaggaggatcaaggagcggcagcacaagcttgccctgcagcaggcagagctgcagaagttgaggcccaagcccatatccgaccaggccatgcgcaagaagatgtcaagggcacacgacgggatcctcaagtatatgctcaagctcatgcaggtgtgcaatgcacgcgggttcgtttatgggatcatcccggacaaggggaagcctgtcagtggcgcttccgataatatcagagcttggtggaaggagaaggtgaagtttgataagaacgggcctgcggcgattgagaaatacgagtctgacaacttagtatccgctactgcccagagtggtggaactaagagccagcacagcttgatggatctccaagatgccactcttggttcactgctttcctcattgatgcagcattgtgatccaccgcagcgcaagtacccattggagaagggtgcttcacccccgtggtggccttcagggaaggaggaatggtggaccgccctgggtcttccaagcggccaagttcctccttacaagaaaccacatgatcttaagaaggtctggaaggctggtgtgcttacaggtgtaatcaagcacatgtctcccaattttgataagataaggaatcatgtacggaaatcaaagtgtttgcaggataaaatgactgcaaaagaaagcctgatttggctgggagttctacagagagaagaaagccttgttcacagaatcgacaatggcgtatcggagattactcagcgcagtatgccagaggagaggattgcagacacaaatagcagcagtaatgagtatgatgtgtatggttttgaggatgctcctgtttctacatcatctaaagatgatgaacaagatctgtctccagttgcacaatctgctgtggagcatgttccgaaaagaggaagggaaagagcttacaataaacgccctaatcaaatcgttcctggtaaggcaaaagaaccaccaaagagaaaaagaacacgccacagctccactgttaccgagccagatgcacacagagttgttgatgcaccagaaaactcaagaaatttgatccctgatatgaatagattggatcaagtagaaatcccaggcacgtcaaaccagattgtcacctttgaccatgggggcaccacaactgaagctttacaacacagaggagatgctcaagtacaggtccatcctcctggtgctgaggttaatagcttctatagtgctccaactgcaaaccctactcctataagcatatatatgggtgaccagcctataccttatcaaaataatgacagcacaaggccgagatctgaaaatagttttcctgtagatgctcatactggtttaaataatcttcccagcagttatcagaacttacctccgaaacaatcactaccacttcccatgatggatcatcatgtggttcccatgggtatcagggcacctactgatagcattccttacggtgatcatatactaggtggtggaaattcaacttctgttcctggagatatgcagcaactcatagattttcctttctatgctgaacaagataagtttgttggcagttcctttgaggggttgcctttagactatatcagtatcagtagtccaatcccagatattgatgacttgctgcatgatgatgatttaatggaatacttgggaacataacattcggtcaggatgagtctgctagcatttgttttcatccattttagtctcactggagtcatcatcctaacttaagtatggagggctaaacttctcattttgttgccggtcttgtcattggagaccaaccatctgttgtatgctgagtgatgacttgtattctttggcaataatgtgtcatacagtgacacaattgcacatgtggaaggtgaacatggcctaagttaaatatgatatctttctggagataatatctgttgaagaaagggctagatttttttttatagttttagaatccttgagatatgattgttttcctctgtcatcctatctttgtctatggcttttgccatctacaaaaacatcgggaatccaacactgtatatgcaataaagaaatgaaaaaaatgattttgccatcctctctgttgtgtttgttttttatttcaatgtcccctaagaatgctgttgttgcataacaaagtccac

SEQ ID NO: 2460 - DNA, 2029 bp, Zea Mays
gtctcgatggagcatacttgaagcagcagatcactttgcattgttttgttattatacacatatacaataacaatcattattttctgaggcgctggtctgaataatgctctcgttactgcatgttctttccgctctataaaaacgaatacgttcgcctgaaccttcagcacgcacgcgccgccggtgtgcgacttctgcacacgccacgcctcactggttgccactgcatcagcaagacagcaaggcatatcctgctgggcagcaataatggctcacttcgtcgtcggcatcgcggcggcgctgctccttctgcagcagctgatggcctcgtcgtcgtcctaccccagcagtgcggtccttgcagactctgtgctcggccggaaagctggcatcgtcgtcgacgaggcgtcgtcggcgactgagagttcacccccgggggctaggactgggaggtacgccgtgatcttcgacgccggcagcacagggacccgtgtacacgtcttcaggttcgacaggaagctcgagctcctcgagatcggcgacgacggcatcgaggtgttcgccaaggtgaagcccgggctgagctcatacgctggacatccccaagaggctgcaaattccatgctgcctcttcttgacaaggccaagagcgccgtccctaaacagctgacgaaaaggaccccgcttagactcggagtcaggaaccttatccacactaagagcaaatttcagtacaagcccgagtggatcaatgttattgagggatctcaagaaggatcatacctatgggttgctctgaattatctgttggataaattgggaggggactactcacagacagtagctgtgcttgacatgggcggtggatcagtgcaaatggcctatgccgtttctgcaaatgccgctgcaagtgctccggcgccgactcatggggaagacccctatgttacaagagagtatcttaaaggaaaagattacaacatctatactcacagttacttgcactatggtgcttttgcatcacgagcagagattttgaaggcaaaggatggaccattcagcagctgcatgttacgtggattcattggtcaatacacctacaatgaggagcaatatgacgcgactgccgcgccggaaggagcagtctatggcaagtgcagggaagagatcggcagagcactgaacctgaacgcgccatgtgaaatgaagaactgcaccttcaatggcatatggaatggcggcggcggagcaggccaaggcagcatctatgttgcatccagcttctacttcgtggcctcagaggtcggcatcgtagatggcaacgcaccaagcgggaacactacccctggcgcattcggagcttccgcggagaaggcttgccagatgagtgttgaagaagccaagatcgaatacccaaacgtcaacgatgtcgatgtgccctacctgtgcatggaccttgcctaccagtatactttgctagtagatggctttggtgtggagaggaccaaggagatcacagtggtggacaaggtgaagcacggagagtactacgtcgaagctgcatggcctctaggctctgctattgaggctgtgtcgtcaaccaaagaatggcgtcaagataaatgatctgttggtccaatctcatatgctagtattgtatctgacatgtacagtactggcacaacttatgaaataaacgaaaacgtctgtggtctcacgctaatatacgcattaagcactcggcaaagatgattttgccgagtgtctgtcaatgatgagtgtctcacgctcggtaaacattattgttgtcgagagtgttatttcacgcaccgagtacccgacaaaaatgcattcggcaaaaaaccggattccgacagtgaaatgcatattccttgaatggttatatgcaccaccaaagaaaactaagcattttcttcaatgtttgtcaaggaagaaaattacaatatgatcatggcttgtaaagttcttatattgatatatgaattcaatatcatggttgcaatccata

SEQ ID NO: 2461 - DNA, 1988 bp, Zea Mays
atcaccactgagtcacgactccagatctcgcaccgctcgccatggacctcctcgacgcgaggcaccgccacacgccggatttgagctcctcccaagatgccgcctccaacatggggctcccgctcgccggtgccgcctaccagccctacgtttctgagcttctttccttctccatcgagcgcctccacaaggagccggagcttttgagggtcgacgcggagcgggtgcggcggcagatgcaggaggtggcggtggaaaactacgccgcgttcatcgccgcctctgaggcgctctccttcgtccgcgcgcagcttgagagcttcgacggccacctcgaggccatggtgtatacggaatgggaactatgatgaagcacttgacctagaagcttttgtgagcaaaatctggaagttgcaccctgatttacctgttgtccaaggattagccactgaagtcaagaagacagtgcaatcattagtttcacagcttctccagaaacttcgatcaaatattcagttacctgagtgcctacgaattgtagcacatctgcgccgaattggagttttcagcgagtcagaattgcgcttacagggaagcttggctttctggaattcttgaagatctggaccaaaggaatgtttatgattacctgaaaggcatggtgacttgccacagggtacatctatttgatgttgttaatcaatatcgagcaatattcaacaatgataaatctggaaatgatgagaactatgacggcgggctgcttttcagctgggcaatgcaacaagttagtaatcacctcactactcttcaagttatgttaccaaacataacagaaggtggttctctgtccaacattcttgaacaatgcatgtattgtgcaatgggtcttggcttagtcggattggattttcgtggccttcttccaccgatctttgagaatgcggttctaaatttattctcaaagaatatgagtacggcggtcgaaaattttcaggtcattttggattcacactgttgggttccgatgccatctgttggttttgtagcaaatggtgttgtcgatgagacttctgatgatgtgactccaccttccgttttaatggagcatccacctcttgcagtgtttgtcaacggtgtttcagcagcaatgaatgagctaagaccgtgcgcaccattgagcttgaaagttgtccttgctcaggaggtggtcaagggactacatgcagtctctgactccctagtaagatacaaagctatgcggatgcttcgtggaaatgagtccgcccttttcctttcactatgccaggcattcatcgaggttgcatatccttattgtgccgcatgttttggccgatgctacccaaacggggcaacattgatctcagagcgtcaaggcacatttgacgctgtccgtcagctattgaccgtgccggcaagatctaacagttccagcatcgaaagaaggcagtcaggaggcatcgaaagaaggcagtcaggagccattgaaagaaagcagtctgttgagagcactgggatagcggtcactgataacgggctctcagccgatggacctgggctagagacgaacagttctgctgcaaccaccacctcaccggtagacgacggtccaccagcgagtaagtagcttggacctccgtttgaatcgtcaaagtccttcatcaaggcctggtttagtcaaccagagaaaaaattgctgcaaagttatattaatagagaattattcatagttttgttctcagtcttacagtgcacacaagatctcactggatatctgtatctcacttttttatcactcgaacaattaaacttctagctgttcattgttatactcgatacctagatgttgtagagtttccaaccggaacattcaataatctgattaagtgattagtacaaaccgtgttcaccgtgttgactacacttttgaagtcaaagaactgattcatgagtcatatatgtaatct

SEQ ID NO: 2462 - DNA, 994 bp, Zea Mays
ttccatgtatcacatcaaacccaaccatgccttgtacatatgcaccatgagtcctttcggggcggtgatcacgccagaaacgctcaagtacatgtccaagtaccagggacgtgagatcacgcaggtggattgtgcgcgggaggcgatgaggctgatccacgcggaagacaagaacctgcaagccgagaattccgcatgggaactcaagaagaagttcggcaacggcgtgagcaccatggtgctcgtctacaacgccaccggcgccaccctgagcctggcggacgacggccaggactggacgggctccgtctacagctcgccgatctcggacaccttccacaacgggcagtggatcgccttcctccacgtcaagcccgccgcgttggcgctaggcagccaggccgccagggtgttccgcggcagggacgtcgatggccggactcgggacttcgtcgtcgcctggcttacactgaaattggcagtgaaaactacttcaagacacggtggagtagtgtgaaaacgagtctaggacatgcaaggagagtgacccgtgccaaggacgagaactgtgcgtcaacggttagcattggtggctacactacagccttctgcatcgcagtcctacaacaccagttccagcccctgccggaagagcgcgaataatccagctgcaacgagtttgcgcgcgtgcgcatcattattattacctcctaatttaaataagtaggtgtttggtttctatggactaatgtttggtcccttcattttattcatttttagtctataaattgctaaatatagaaactaaaataaagttttagtttctatatttagtaattttaaaactaaaatgaaataaaatgtagggactaaacattagtccctagaaaccaaacaccccctaagctgtgcacgcaaacgtacgactgtactagtatttatctatgtattacatgtatgtcgtctattacaatacttaatcttttccttctat

SEQ ID NO: 2463 - DNA, 1246 bp, Zea Mays
atcactgatgtaatttcaatatgtagtttgtctagtttgaatcttcttctaagccagtggctgtggctccatcgtccgattatctatccatggttactagcgacctcgagtttctgattgagttcggtaacagcctcccgcggcgccggcggacacgcaggcggcgcaattgatacagacgctgttcaagccctcggtcgtgtcggcgcccgcggcggcaggtcgattccgtgttggtcgcagacttgtaggcaccttcggctcccctcctgccggatgccaatggcctggtcaggcctgttaaaggtaatgagaaactatttatgattggtggacatgagggagactttatgactaaaccaggatcacctgtttttaaatgttggtggaactacagaaaagcatgccatcaccaagaagatgattcttgttggtgaagtcttccgttttgatttggaagcattgacctggtcagtcattgggcgcatgcctttccgaatcaagacatccttatctaggtactgactactgagaggggaggggggctctgttttacttctgggcagcgagatcatgggcctgacaatccagctccaaagaaagttgttgggagtctgggactatgtggagaacgaggctgcacttgtgatggcagaagttgtgacagtttgtttcccctgaaaattgtagatttgcatctgatttcctgtccaacagctaggtccctttcagagaagagagttgcttgttttgattcccacatccggaatccgaagttcagatatgtctccaaacaaccagaagatatggacataagcaactaccaaagatcattcttattggagatattcagcgcaaagcccacccaccaaataatcatgatgttcttctttccctagctgttgcagagaggtcggaactgtttgggctttcactagccaattaaaatattaagtagcaagctgagtaccatgtcagtattaaatctgtctctgtaattgcctccgaaattggtgtgcgtgtttctcatcttgttggtttcttagtatatgtaatctgcacttagaggtacaatataggtgcacaggggcaggacctgtacttaaatgttagaatacctgttcagggtttggagtttttcccgtgtaattactatttcacccctctgtaatgggcctggcccagtttactcgcatctattaatatatcacccaacccctgttagggttagggttttcaccggtca

SEQ ID NO: 2464 - DNA, 2071 bp, Zea Mays
cttcactgtaggcgtccacaggcttggttctgccatcgcgctccgtccgcgatcccctccccgcgcccgatcctccacgctcgatcctcgaatcccgcggcttccttcgatggcacgaccccatccatctcgccagtgtccgtggtcccctccccgcgctccccaccacgacgacacgaccccatccatctcgctgctgtccacgcccagtcgcgcctcccacgatcacgcccacggacgcaacctccctccctccccgtccccgttcatgtcgcccccgtccgtgatcccctccccgccctcctctccgcgaccccatccatcctgtcgccgtccacgcccagcagcgctcaaaagcaaaaaagggtacgaatacgaatcccaatccagggccggagggcgagcgaactcaaaagcaagctgttccagtccaatccgccccagtccaaatctaatcgccgggtttaggcagaaggggtgggacgcggcgaggtttaggcggggtttgttttgtccctttcgtgcgattctgctctccgcgcgggaggcaagtactgacggaagcgaagaccaaggcggaggagggggtccccggcggtggaagtggaacgcgccgatgcgcaagtttcaggactccatcaaggccctccaggccgacatcgatcatgccaatgcgatggtgtcggaattcttgagggactacgatggctcggtcatccagatgcgggtggcgtacagcgccgtcgcgcatttcctcctgcagtggaccgactgcaagctcgccggcgcgctcggcctcctcaaggttatgctatacaaggtgtgcgcggacggctcgtcggcgcttcctgattgggacatggaggccagcatcagggagttttacggcgtcattttcccgttgttgctgcagcttccgagtggcatcaccgagctggacgacaggaagcagaggaagctctgcctcaagaaattcaggagcagggatgagcagctctgggaggtggacacggagagggagcttgagtgtgggatctgcctcgaggttagccccaaggtcgtgctgcccaactgtgcccacatgctctgcatgcggtgctttgaggattggaaatgacacctactctactccgcagcttaaaacctcaagatatgtcggtaatcaaacaagtacaagtttcaaggaaatgggaatttcatggaaatacagacattgggtccatattacacattgatatgattttggctgacaaagaggttgtcggtttggagcctttttagtgtcagatggtctgtctctatatctctattcatttcactgcagcgctgtctgaggtgcgtggtcaagtcgaggcgaagatgagcaaggaggatgtgctcaaggtgcaggtcttggattcaacatagtactagcagtttggaatcacccgacggggatgctttccatgtaataaatatttttggaacgtttcggatttaacttatgttgtttctattgcaatcaacatggtgtcactatttggattcaccagtaagaatatttgccatttgggcttgttaattagggtgaaattttatataaaacatgcctcgttcacttgctttccagttcttgatttcagatctctgaagccaattacgtacacattttcctaccacgacttttattctgctttccgtttctcaacgtcttggacattgccggcgagcgcggtctcctcgacaacttctactgctaactcgggtgcaagatgcccagcaaacttcccaatccagctgccggcaaggagatgaggttcccgacggcgacaattttccactacacaaccggattcttcagcagcatatggatccgttgaagcgccgtgtgacaatgccaccaaagagcagcaacaaacaagctcaaagtctccgctaaccactaatctcataaagcttgaattttctcattgctatgtttccttctcctagcaaagttaagatgtttgcacatttctagcttattaggtccttgtgtggaatgtgtttgaacaatgatctcatttaaacaatatcaacatgtgtgatatat

(The sequence listing continues in the following parts.)

What is claimed is:

1. A recombinant DNA construct comprising a polynucleotide operably linked to at least one regulatory sequence wherein said polynucleotide comprises:
a. a nucleic acid sequence of at least 70% sequence identity, based on the Clustal V method of alignment, when compared to any of SEQ ID NOs:1-44,180;
b. a nucleic acid sequence encoding an amino acid sequence of at least 70% sequence identity, based on the Clustal V method of alignment, when compared to any of SEQ ID NOs:44,181-72,254; or
c. a nucleic acid sequence that is transcribed into an RNA molecule that suppresses the level of an endogenous polypeptide having an amino acid sequence of at least 70% sequence identity, based on the Clustal V method of alignment, when compared to any of SEQ ID NOs:44,181-72,254.

2. The recombinant DNA construct of claim 1, wherein said at least one regulatory sequence is a promoter functional in a plant cell.

3. A transgenic plant cell comprising the recombinant DNA construct of claim 1.

4. A transgenic plant comprising the transgenic plant cell of claim 3.

5. The transgenic plant of claim 3, wherein said transgenic plant is selected from the group consisting of: Arabidopsis, maize, soybean, sunflower, sorghum, canola, wheat, alfalfa, cotton, rice, barley, millet, sugar cane and switchgrass.

6. Transgenic seed produced from the transgenic plant of claim 4.

7. A method of producing a transgenic plant having an improved agronomic characteristic, wherein said method comprises:
a. transforming a plant cell with the recombinant DNA construct of claim 1; and
b. regenerating a plant from the transformed plant cell.

8. The method of claim 7, wherein said agronomic characteristic is abiotic stress tolerance.

9. The method of claim 8, wherein said abiotic stress is nitrogen deficiency.

10. The method of claim 9, wherein the recombinant DNA construct comprises any of the polynucleotides found in Table 4.

11. The method of claim 8, wherein said abiotic stress is drought.

12. The method of claim 11, wherein the recombinant DNA construct comprises any of the polynucleotides found in Table 5.

13. A method for introducing a polynucleotide of Interest into a target site in the genome of a plant cell, the method comprising:
a. introducing into a plant cell a first recombinant DNA construct capable of expressing a guide RNA and a second recombinant DNA construct capable of expressing a Cas endonuclease, wherein said guide RNA and Cas endonuclease are capable of forming a complex that enables the Cas endonuclease to introduce a double strand break at said target site;
b. contacting the plant cell of (a) with a donor DNA comprising a polynucleotide of interest, wherein said polynucleotide of interest is a fragment selected from the group consisting of:
i. a nucleic acid sequence of at least 70% sequence identity, based on the Clustal V method of alignment, when compared to any of SEQ ID NOs:1-44,180; or
ii. a nucleic acid sequence encoding an amino acid sequence of at least 70% sequence identity, based on the Clustal V method of alignment, when compared to any of SEQ ID NOs:44,181-72,254; and
c. identifying at least one plant cell from (b) comprising in its genome the polynucleotide of interest integrated at said target site.

14. The method of claim 13, wherein the nucleotide sequence is a guide RNA sequence selected from the group consisting of SEQ ID NOs:1-44,180.

15. The method of claim 13, wherein the integrated polynucleotide results in downregulation of the nucleotide sequence expressed at the target site.

16. The method of claim 13, wherein the integrated polynucleotide results in upregulation of the nucleotide sequence expressed at the target site.
